United States Patent Application Publication US 2024/0084334 A1 - sequence listing, part 5

SEQ ID NO: 6101 - protein, 2183 aa, synthetic construct
MPAAKRVKLDGGDKKYSIGLDIGTNSVGWAVITDEYKVPSKKFKVLGNTDRHSIKKNLIGALLFDSGETAEATRLKRTARRRYTRRKNRICYLQEIFSNEMAKVDDSFFHRLEESFLVEEDKKHERHPIFGNIVDEVAYHEKYPTIYHLRKKLVDSTDKADLRLIYLALAHMIKFRGHFLIEGDLNPDNSDVDKLFIQLVQTYNQLFEENPINASGVDAKAILSARLSKSRRLENLIAQLPGEKKNGLFGNLIALSLGLTPNFKSNFDLAEDAKLQLSKDTYDDDLDNLLAQIGDQYADLFLAAKNLSDAILLSDILRVNTEITKAPLSASMIKRYDEHHQDLTLLKALVRQQLPEKYKEIFFDQSKNGYAGYIDGGASQEEFYKFIKPILEKMDGTEELLVKLNREDLLRKQRTFDNGSIPHQIHLGELHAILRRQEDFYPFLKDNREKIEKILTFRIPYYVGPLARGNSRFAWMTRKSEETITPWNFEEVVDKGASAQSFIERMTNFDKNLPNEKVLPKHSLLYEYFTVYNELTKVKYVTEGMRKPAFLSGEQKKAIVDLLFKTNRKVTVKQLKEDYFKKIECFDSVEISGVEDRFNASLGTYHDLLKIIKDKDFLDNEENEDILEDIVLTLTLFEDREMIEERLKTYAHLFDDKVMKQLKRRRYTGWGRLSRKLINGIRDKQSGKTILDFLKSDGFANRNFMQLIHDDSLTFKEDIQKAQVSGQGDSLHEHIANLAGSPAIKKGILQTVKVVDELVKVMGRHKPENIVIEMARENQTTQKGQKNSRERMKRIEEGIKELGSQILKEHPVENTQLQNEKLYLYYLQNGRDMYVDQELDINRLSDYDVDHIVPQSFLKDDSIDNKVLTRSDKARGKSDNVPSEEVVKKMKNYWRQLLNAKLITQRKFDNLTKAERGGLSELDKAGFIKRQLVETRQITKHVAQILDSRMNTKYDENDKLIREVKVITLKSKLVSDFRKDFQFYKVREINNYHHAHDAYLNAVVGTALIKKYPKLESEFVYGDYKVYDVRKMIAKSEQEIGKATAKYFFYSNIMNFFKTEITLANGEIRKRPLIETNGETGEIVWDKGRDFATVRKVLSMPQVNIVKKTEVQTGGFSKESILPKRNSDKLIARKKDWDPKKYGGFDSPTVAYSVLVVAKVEKGKSKKLKSVKELLGITIMERSSFEKNPIDFLEAKGYKEVKKDLIIKLPKYSLFELENGRKRMLASAGELQKGNELALPSKYVNFLYLASHYEKLKGSPEDNEQKQLFVEQHKHYLDEIIEQISEFSKRVILADANLDKVLSAYNKHRDKPIREQAENIIHLFTLTNLGAPAAFKYFDTTIDRKRYTSTKEVLDATLIHQSITGLYETRIDLSQLGGDGGGGSGGSGGSGGSGGSGGSGGMDPLQLLQPLEAEIKGTKLKAHWNSGATITCVPQAFLEEEVPIKNIWIKTIHGEKEQPVYYLTFKIQGRKVEAEVISSPYDYILVSPSDIPWLMKKPLQLTTLVPLQEYEERLLKQTMLTGSYKEKLQSLFLKYDALWQHWENQVGHRRIKPHHIATGTVNPRPQKQYPINPKAKASIQTVINDLLKQGVLIQQNSIMNTPVYPVPKPDGKWRMVLDYREVNKTIPLIAAQNQHSAGILSSIFRGKYKTTLDLSNGFWAHSITPESYWLTAFTWLGQQYCWTRLPQGFLNSPALFTADVVDLLKEVPNVQVYVDDIYISHDDPREHLEQLEKVFSLLLNAGYVVSLKKSEIAQHEVEFLGFNITKEGRGLTETFKQKLLNITPPRDLKQLQSILGLLNFARNFIPNFSELVKPLYNIIATANGKYITWTTDNSQQLQNIISMLNSAENLEERNPEVRLIMKVNTSPSAGYIRFYNEFAKRPIMYLNYVYTKAEVKFTNTEKLLTTIHKGLIKALDLGMGQEILVYSPIVSMTKIQKTPLPERKALPIRWITWMSYLEDPRIQFHYDKTLPELQQVPTVTDDIIAKIKHPSEFSMVFYTDGSAIKHPNVNKSHNAGMGIAQVQFKPEFTVINTWSIPLGDHTAQLAEVAAVEFACKKALKIDGPVLIVTDSFYVAESVNKELPYWQSNGFFNNKKKPLKHVSKWKSIADCIQLKPDIIIIHEKGHQPTASTFHTEGNNLADKLATQGSYVVNAGKRTADGSEFEKRTADGSEFESPKKKAKVE

SEQ ID NO: 6102 - protein, 2094 aa, synthetic construct
MPAAKRVKLDGGDKKYSIGLDIGTNSVGWAVITDEYKVPSKKFKVLGNTDRHSIKKNLIGALLFDSGETAEATRLKRTARRRYTRRKNRICYLQEIFSNEMAKVDDSFFHRLEESFLVEEDKKHERHPIFGNIVDEVAYHEKYPTIYHLRKKLVDSTDKADLRLIYLALAHMIKFRGHFLIEGDLNPDNSDVDKLFIQLVQTYNQLFEENPINASGVDAKAILSARLSKSRRLENLIAQLPGEKKNGLFGNLIALSLGLTPNFKSNFDLAEDAKLQLSKDTYDDDLDNLLAQIGDQYADLFLAAKNLSDAILLSDILRVNTEITKAPLSASMIKRYDEHHQDLTLLKALVRQQLPEKYKEIFFDQSKNGYAGYIDGGASQEEFYKFIKPILEKMDGTEELLVKLNREDLLRKQRTFDNGSIPHQIHLGELHAILRRQEDFYPFLKDNREKIEKILTFRIPYYVGPLARGNSRFAWMTRKSEETITPWNFEEVVDKGASAQSFIERMTNFDKNLPNEKVLPKHSLLYEYFTVYNELTKVKYVTEGMRKPAFLSGEQKKAIVDLLFKTNRKVTVKQLKEDYFKKIECFDSVEISGVEDRFNASLGTYHDLLKIIKDKDFLDNEENEDILEDIVLTLTLFEDREMIEERLKTYAHLFDDKVMKQLKRRRYTGWGRLSRKLINGIRDKQSGKTILDFLKSDGFANRNFMQLIHDDSLTFKEDIQKAQVSGQGDSLHEHIANLAGSPAIKKGILQTVKVVDELVKVMGRHKPENIVIEMARENQTTQKGQKNSRERMKRIEEGIKELGSQILKEHPVENTQLQNEKLYLYYLQNGRDMYVDQELDINRLSDYDVDHIVPQSFLKDDSIDNKVLTRSDKARGKSDNVPSEEVVKKMKNYWRQLLNAKLITQRKFDNLTKAERGGLSELDKAGFIKRQLVETRQITKHVAQILDSRMNTKYDENDKLIREVKVITLKSKLVSDFRKDFQFYKVREINNYHHAHDAYLNAVVGTALIKKYPKLESEFVYGDYKVYDVRKMIAKSEQEIGKATAKYFFYSNIMNFFKTEITLANGEIRKRPLIETNGETGEIVWDKGRDFATVRKVLSMPQVNIVKKTEVQTGGFSKESILPKRNSDKLIARKKDWDPKKYGGFDSPTVAYSVLVVAKVEKGKSKKLKSVKELLGITIMERSSFEKNPIDFLEAKGYKEVKKDLIIKLPKYSLFELENGRKRMLASAGELQKGNELALPSKYVNFLYLASHYEKLKGSPEDNEQKQLFVEQHKHYLDEIIEQISEFSKRVILADANLDKVLSAYNKHRDKPIREQAENIIHLFTLTNLGAPAAFKYFDTTIDRKRYTSTKEVLDATLIHQSITGLYETRIDLSQLGGDGGGGSGGSGGSGGSGGSGGSGGIPWLMKKPLQLTTLVPLQEYEERLLKQTMLTGSYKEKLQSLFLKYDALWQHWENQVGHRRIKPHHIATGTVNPRPQKQYPINPKAKASIQTVINDLLKQGVLIQQNSIMNTPVYPVPKPDGKWRMVLDYREVNKTIPLIAAQNQHSAGILSSIFRGKYKTTLDLSNGFWAHSITPESYWLTAFTWLGQQYCWTRLPQGFLNSPALFNADVVDLLKEVPNVQVYVDDIYISHDDPREHLEQLEKVFSLLLNAGYVVSLKKSEIAQHEVEFLGFNITKEGRGLTETFKQKLLNITPPRDLKQLQSILGLLNFARNFIPNFSELVKPLYNIIATAPGKYITWTTDNSQQLQNIISMLNSAENLEERNPEVRLIMKVNTSPSAGYIRFYNEFAKRPIMYLNYVYTKAEVKFTNTEKLLTTIHKGLIKALDLGMGQEILVYSPIVSMTKIQKTPLPERKALPIRWITWMSYLEDPRIQFHYDKTLPELQQVPTVTDDIIAKIKHPSEFSMVFYTDGSAIKHPNVNKSHNAGMGIAQVQFKPEFTVINTWSIPLGDHTAQLAEVAAVEFACKKALKIDGPVLIVTDSFYVAESVNKELPYWQSNGFFNNKKKPLKHVSKWKSIADCIQLKPDIIIIHEKGHQPTASTFHTEGNNLADKLATQGSYVVNAGKRTADGSEFEKRTADGSEFESPKKKAKVE

SEQ ID NO: 6103 - protein, 2094 aa, synthetic construct
MPAAKRVKLDGGDKKYSIGLDIGTNSVGWAVITDEYKVPSKKFKVLGNTDRHSIKKNLIGALLFDSGETAEATRLKRTARRRYTRRKNRICYLQEIFSNEMAKVDDSFFHRLEESFLVEEDKKHERHPIFGNIVDEVAYHEKYPTIYHLRKKLVDSTDKADLRLIYLALAHMIKFRGHFLIEGDLNPDNSDVDKLFIQLVQTYNQLFEENPINASGVDAKAILSARLSKSRRLENLIAQLPGEKKNGLFGNLIALSLGLTPNFKSNFDLAEDAKLQLSKDTYDDDLDNLLAQIGDQYADLFLAAKNLSDAILLSDILRVNTEITKAPLSASMIKRYDEHHQDLTLLKALVRQQLPEKYKEIFFDQSKNGYAGYIDGGASQEEFYKFIKPILEKMDGTEELLVKLNREDLLRKQRTFDNGSIPHQIHLGELHAILRRQEDFYPFLKDNREKIEKILTFRIPYYVGPLARGNSRFAWMTRKSEETITPWNFEEVVDKGASAQSFIERMTNFDKNLPNEKVLPKHSLLYEYFTVYNELTKVKYVTEGMRKPAFLSGEQKKAIVDLLFKTNRKVTVKQLKEDYFKKIECFDSVEISGVEDRFNASLGTYHDLLKIIKDKDFLDNEENEDILEDIVLTLTLFEDREMIEERLKTYAHLFDDKVMKQLKRRRYTGWGRLSRKLINGIRDKQSGKTILDFLKSDGFANRNFMQLIHDDSLTFKEDIQKAQVSGQGDSLHEHIANLAGSPAIKKGILQTVKVVDELVKVMGRHKPENIVIEMARENQTTQKGQKNSRERMKRIEEGIKELGSQILKEHPVENTQLQNEKLYLYYLQNGRDMYVDQELDINRLSDYDVDHIVPQSFLKDDSIDNKVLTRSDKARGKSDNVPSEEVVKKMKNYWRQLLNAKLITQRKFDNLTKAERGGLSELDKAGFIKRQLVETRQITKHVAQILDSRMNTKYDENDKLIREVKVITLKSKLVSDFRKDFQFYKVREINNYHHAHDAYLNAVVGTALIKKYPKLESEFVYGDYKVYDVRKMIAKSEQEIGKATAKYFFYSNIMNFFKTEITLANGEIRKRPLIETNGETGEIVWDKGRDFATVRKVLSMPQVNIVKKTEVQTGGFSKESILPKRNSDKLIARKKDWDPKKYGGFDSPTVAYSVLVVAKVEKGKSKKLKSVKELLGITIMERSSFEKNPIDFLEAKGYKEVKKDLIIKLPKYSLFELENGRKRMLASAGELQKGNELALPSKYVNFLYLASHYEKLKGSPEDNEQKQLFVEQHKHYLDEIIEQISEFSKRVILADANLDKVLSAYNKHRDKPIREQAENIIHLFTLTNLGAPAAFKYFDTTIDRKRYTSTKEVLDATLIHQSITGLYETRIDLSQLGGDGGGGSGGSGGSGGSGGSGGSGGIPWLMKKPLQLTTLVPLQEYEERLLKQTMLTGSYKEKLQSLFLKYDALWQHWENQVGHRRIKPHHIATGTVNPRPQKQYPINPKAKASIQTVINDLLKQGVLIQQNSIMNTPVYPVPKPDGKWRMVLDYREVNKTIPLIAAQNQHSAGILSSIFRGKYKTTLDLSNGFWAHSITPESYWLTAFTWLGQQYCWTRLPQGFLNSPALFNADVVDLLKEVPNVQVYVDDIYISHDDPREHLEQLEKVFSLLLNAGYVVSLKKSEIAQHEVEFLGFNITKEGRGLTETFKQKLLNITPPRDLKQLQSILGKLNFARNFIPNFSELVKPLYNIIATAPGKYITWTTDNSQQLQNIISMLNSAENLEERNPEVRLIMKVNTSPSAGYIRFYNEFAKRPIMYLNYVYTKAEVKFTNTEKLLTTIHKGLIKALDLGMGQEILVYSPIVSMTKIQKTPLPERKALPIRWITWMSYLEDPRIQFHYDKTLPELQQVPTVTDDIIAKIKHPSEFSMVFYTDGSAIKHPNVNKSHNAGMGIAQVQFKPEFTVINTWSIPLGDHTAQLAEVAAVEFACKKALKIDGPVLIVTDSFYVAESVNKELPYWQSNGFFNNKKKPLKHVSKWKSIADCIQLKPDIIIIHEKGHQPTASTFHTEGNNLADKLATQGSYVVNAGKRTADGSEFEKRTADGSEFESPKKKAKVE

SEQ ID NO: 6104 - protein, 2024 aa, synthetic construct
MPAAKRVKLDGGDKKYSIGLDIGTNSVGWAVITDEYKVPSKKFKVLGNTDRHSIKKNLIGALLFDSGETAEATRLKRTARRRYTRRKNRICYLQEIFSNEMAKVDDSFFHRLEESFLVEEDKKHERHPIFGNIVDEVAYHEKYPTIYHLRKKLVDSTDKADLRLIYLALAHMIKFRGHFLIEGDLNPDNSDVDKLFIQLVQTYNQLFEENPINASGVDAKAILSARLSKSRRLENLIAQLPGEKKNGLFGNLIALSLGLTPNFKSNFDLAEDAKLQLSKDTYDDDLDNLLAQIGDQYADLFLAAKNLSDAILLSDILRVNTEITKAPLSASMIKRYDEHHQDLTLLKALVRQQLPEKYKEIFFDQSKNGYAGYIDGGASQEEFYKFIKPILEKMDGTEELLVKLNREDLLRKQRTFDNGSIPHQIHLGELHAILRRQEDFYPFLKDNREKIEKILTFRIPYYVGPLARGNSRFAWMTRKSEETITPWNFEEVVDKGASAQSFIERMTNFDKNLPNEKVLPKHSLLYEYFTVYNELTKVKYVTEGMRKPAFLSGEQKKAIVDLLFKTNRKVTVKQLKEDYFKKIECFDSVEISGVEDRFNASLGTYHDLLKIIKDKDFLDNEENEDILEDIVLTLTLFEDREMIEERLKTYAHLFDDKVMKQLKRRRYTGWGRLSRKLINGIRDKQSGKTILDFLKSDGFANRNFMQLIHDDSLTFKEDIQKAQVSGQGDSLHEHIANLAGSPAIKKGILQTVKVVDELVKVMGRHKPENIVIEMARENQTTQKGQKNSRERMKRIEEGIKELGSQILKEHPVENTQLQNEKLYLYYLQNGRDMYVDQELDINRLSDYDVDHIVPQSFLKDDSIDNKVLTRSDKARGKSDNVPSEEVVKKMKNYWRQLLNAKLITQRKFDNLTKAERGGLSELDKAGFIKRQLVETRQITKHVAQILDSRMNTKYDENDKLIREVKVITLKSKLVSDFRKDFQFYKVREINNYHHAHDAYLNAVVGTALIKKYPKLESEFVYGDYKVYDVRKMIAKSEQEIGKATAKYFFYSNIMNFFKTEITLANGEIRKRPLIETNGETGEIVWDKGRDFATVRKVLSMPQVNIVKKTEVQTGGFSKESILPKRNSDKLIARKKDWDPKKYGGFDSPTVAYSVLVVAKVEKGKSKKLKSVKELLGITIMERSSFEKNPIDFLEAKGYKEVKKDLIIKLPKYSLFELENGRKRMLASAGELQKGNELALPSKYVNFLYLASHYEKLKGSPEDNEQKQLFVEQHKHYLDEIIEQISEFSKRVILADANLDKVLSAYNKHRDKPIREQAENIIHLFTLTNLGAPAAFKYFDTTIDRKRYTSTKEVLDATLIHQSITGLYETRIDLSQLGGDGGGGSGGSGGSGGSGGSGGSGGPRSRAIDIPVPHADKISWKITDPVWVDQWPLTYEKTLAAIALVQEQLAAGHIEPTNSPWNTPIFIIKKKSGSWRLLQDLRAVNKVMVPMGALQPGLPSPVAIPLNYHKIVIDLKDCFFTIPLHPEDRPYFAFSVPQINFQSPMPRYQWKVLPQGMANSPTLCQKFVAAAIAPVRSQWPEAYILHYMDDILLACDSAEAAKACYAHIISCLTSYGLKIAPDKVQVSEPFSYLGFELHHQQVFTPRVCLKTDHLKTLNDFQKLLGDIQWLRPYLKLPTSALVPLNNILKGDPNPLSVRALTPEAKQSLALINKAIQNQSVQQISYNLPLVLLLLPTPHTPTAVFWQPNGTDPTKNGSPLLWLHLPASPSKVLLTYPSLLAMLIIKGRYTGRQLFGRDPHSIIIPYTQDQLTWLLQTSDEWAIALSSFTGDIDNHYPSDPVIQFAKLHQFIFPKITKCAPIPQATLVFTDGSSNGIAAYVIDNQPISIKSPYLSAQLVELYAILQVFTVLAHQPFNLYTDSAYIAQSVPLLETVPFIKSSTNATPLFSKLQQLILNRQHPFFIGHLRAHLNLPGPLAEGNALADAATQIFPIISDAGKRTADGSEFEKRTADGSEFESPKKKAKVE

SEQ ID NO: 6105 - protein, 2101 aa, synthetic construct
MPAAKRVKLDGGDKKYSIGLDIGTNSVGWAVITDEYKVPSKKFKVLGNTDRHSIKKNLIGALLFDSGETAEATRLKRTARRRYTRRKNRICYLQEIFSNEMAKVDDSFFHRLEESFLVEEDKKHERHPIFGNIVDEVAYHEKYPTIYHLRKKLVDSTDKADLRLIYLALAHMIKFRGHFLIEGDLNPDNSDVDKLFIQLVQTYNQLFEENPINASGVDAKAILSARLSKSRRLENLIAQLPGEKKNGLFGNLIALSLGLTPNFKSNFDLAEDAKLQLSKDTYDDDLDNLLAQIGDQYADLFLAAKNLSDAILLSDILRVNTEITKAPLSASMIKRYDEHHQDLTLLKALVRQQLPEKYKEIFFDQSKNGYAGYIDGGASQEEFYKFIKPILEKMDGTEELLVKLNREDLLRKQRTFDNGSIPHQIHLGELHAILRRQEDFYPFLKDNREKIEKILTFRIPYYVGPLARGNSRFAWMTRKSEETITPWNFEEVVDKGASAQSFIERMTNFDKNLPNEKVLPKHSLLYEYFTVYNELTKVKYVTEGMRKPAFLSGEQKKAIVDLLFKTNRKVTVKQLKEDYFKKIECFDSVEISGVEDRFNASLGTYHDLLKIIKDKDFLDNEENEDILEDIVLTLTLFEDREMIEERLKTYAHLFDDKVMKQLKRRRYTGWGRLSRKLINGIRDKQSGKTILDFLKSDGFANRNFMQLIHDDSLTFKEDIQKAQVSGQGDSLHEHIANLAGSPAIKKGILQTVKVVDELVKVMGRHKPENIVIEMARENQTTQKGQKNSRERMKRIEEGIKELGSQILKEHPVENTQLQNEKLYLYYLQNGRDMYVDQELDINRLSDYDVDHIVPQSFLKDDSIDNKVLTRSDKARGKSDNVPSEEVVKKMKNYWRQLLNAKLITQRKFDNLTKAERGGLSELDKAGFIKRQLVETRQITKHVAQILDSRMNTKYDENDKLIREVKVITLKSKLVSDFRKDFQFYKVREINNYHHAHDAYLNAVVGTALIKKYPKLESEFVYGDYKVYDVRKMIAKSEQEIGKATAKYFFYSNIMNFFKTEITLANGEIRKRPLIETNGETGEIVWDKGRDFATVRKVLSMPQVNIVKKTEVQTGGFSKESILPKRNSDKLIARKKDWDPKKYGGFDSPTVAYSVLVVAKVEKGKSKKLKSVKELLGITIMERSSFEKNPIDFLEAKGYKEVKKDLIIKLPKYSLFELENGRKRMLASAGELQKGNELALPSKYVNFLYLASHYEKLKGSPEDNEQKQLFVEQHKHYLDEIIEQISEFSKRVILADANLDKVLSAYNKHRDKPIREQAENIIHLFTLTNLGAPAAFKYFDTTIDRKRYTSTKEVLDATLIHQSITGLYETRIDLSQLGGDGGGGSGGSGGSGGSGGSGGSGGVLNLEEEYRLHEKPVPSSIDPSWLQLFPTVWAERAGMGLANQVPPVVVELRSGASPVAVRQYPMSKEAREGIRPHIQRFLDLGVLVPCQSPWNTPLLPVKKPGTNDYRPVQDLREINKRVQDIHPTVPNPYNLLSSLPPSHTWYSVLDLKDAFFCLKLHPNSQPLFAFEWRDPEKGNTGQLTWTRLPQGFKNSPTLFDEALHRDLAPFRALNPQVVLLQYVDDLLVAAPTYRDCKEGTQKLLQELSKLGYRVSAKKAQLCQKEVTYLGYLLKEGKRWLTPARKATVMKIPPPTTPRQVREFLGTAGFCRLWIPGFASLAAPLYPLTKESIPFIWTEEHQKAFDRIKEALLSAPALALPDLTKPFTLYVDERAGVARGVLTQTLGPWRRPVAYLSKKLDPVASGWPTCLKAVAAVALLLKDADKLTLGQNVTVIASHSLESIVRQPPDRWMTNARMTHYQSLLLNERVSFAPPAVLNPATLLPVESEATPVHRCSEILAEETGTRRDLKDQPLPGVPAWYTDGSSFIAEGKRRAGAAIVDGKRTVWASSLPEGTSAQKAELVALTQALRLAEGKDINIYTDSRYAFATAHIHGAIYKQRGLLTSAGKDIKNKEEILALLEAIHLPKRVAIIHCPGHQKGNDPVATGNRRADEAAKQAALSTRVLAETTKPAGKRTADGSEFEKRTADGSEFESPKKKAKVE

SEQ ID NO: 6106 - protein, 2101 aa, synthetic construct
MPAAKRVKLDGGDKKYSIGLDIGTNSVGWAVITDEYKVPSKKFKVLGNTDRHSIKKNLIGALLFDSGETAEATRLKRTARRRYTRRKNRICYLQEIFSNEMAKVDDSFFHRLEESFLVEEDKKHERHPIFGNIVDEVAYHEKYPTIYHLRKKLVDSTDKADLRLIYLALAHMIKFRGHFLIEGDLNPDNSDVDKLFIQLVQTYNQLFEENPINASGVDAKAILSARLSKSRRLENLIAQLPGEKKNGLFGNLIALSLGLTPNFKSNFDLAEDAKLQLSKDTYDDDLDNLLAQIGDQYADLFLAAKNLSDAILLSDILRVNTEITKAPLSASMIKRYDEHHQDLTLLKALVRQQLPEKYKEIFFDQSKNGYAGYIDGGASQEEFYKFIKPILEKMDGTEELLVKLNREDLLRKQRTFDNGSIPHQIHLGELHAILRRQEDFYPFLKDNREKIEKILTFRIPYYVGPLARGNSRFAWMTRKSEETITPWNFEEVVDKGASAQSFIERMTNFDKNLPNEKVLPKHSLLYEYFTVYNELTKVKYVTEGMRKPAFLSGEQKKAIVDLLFKTNRKVTVKQLKEDYFKKIECFDSVEISGVEDRFNASLGTYHDLLKIIKDKDFLDNEENEDILEDIVLTLTLFEDREMIEERLKTYAHLFDDKVMKQLKRRRYTGWGRLSRKLINGIRDKQSGKTILDFLKSDGFANRNFMQLIHDDSLTFKEDIQKAQVSGQGDSLHEHIANLAGSPAIKKGILQTVKVVDELVKVMGRHKPENIVIEMARENQTTQKGQKNSRERMKRIEEGIKELGSQILKEHPVENTQLQNEKLYLYYLQNGRDMYVDQELDINRLSDYDVDHIVPQSFLKDDSIDNKVLTRSDKARGKSDNVPSEEVVKKMKNYWRQLLNAKLITQRKFDNLTKAERGGLSELDKAGFIKRQLVETRQITKHVAQILDSRMNTKYDENDKLIREVKVITLKSKLVSDFRKDFQFYKVREINNYHHAHDAYLNAVVGTALIKKYPKLESEFVYGDYKVYDVRKMIAKSEQEIGKATAKYFFYSNIMNFFKTEITLANGEIRKRPLIETNGETGEIVWDKGRDFATVRKVLSMPQVNIVKKTEVQTGGFSKESILPKRNSDKLIARKKDWDPKKYGGFDSPTVAYSVLVVAKVEKGKSKKLKSVKELLGITIMERSSFEKNPIDFLEAKGYKEVKKDLIIKLPKYSLFELENGRKRMLASAGELQKGNELALPSKYVNFLYLASHYEKLKGSPEDNEQKQLFVEQHKHYLDEIIEQISEFSKRVILADANLDKVLSAYNKHRDKPIREQAENIIHLFTLTNLGAPAAFKYFDTTIDRKRYTSTKEVLDATLIHQSITGLYETRIDLSQLGGDGGGGSGGSGGSGGSGGSGGSGGVLNLEEEYRLHEKPVPSSIDPSWLQLFPTVWAERAGMGLANQVPPVVVELRSGASPVAVRQYPMSKEAREGIRPHIQRFLDLGVLVPCQSPWNTPLLPVKKPGTNDYRPVQDLREINKRVQDIHPTVPNPYNLLSSLPPSHTWYSVLDLKDAFFCLKLHPNSQPLFAFEWRDPEKGNTGQLTWTRLPQGFKNSPTLFNEALHRDLAPFRALNPQVVLLQYVDDLLVAAPTYRDCKEGTQKLLQELSKLGYRVSAKKAQLCQKEVTYLGYLLKEGKRWLTPARKATVMKIPPPTTPRQVREFLGTAGFCRLWIPGFASLAAPLYPLTKPSIPFIWTEEHQKAFDRIKEALLSAPALALPDLTKPFTLYVDERAGVARGVLTQTLGPWRRPVAYLSKKLDPVASGWPTCLKAVAAVALLLKDADKLTLGQNVTVIASHSLESIVRQPPDRWMTNARMTHYQSLLLNERVSFAPPAVLNPATLLPVESEATPVHRCSEILAEETGTRRDLKDQPLPGVPAWYTDGSSFIAEGKRRAGAAIVDGKRTVWASSLPEGTSAQKAELVALTQALRLAEGKDINIYTDSRYAFATAHIHGAIYKQRGWLTSAGKDIKNKEEILALLEAIHLPKRVAIIHCPGHQKGNDPVATGNRRADEAAKQAALSTRVLAETTKPAGKRTADGSEFEKRTADGSEFESPKKKAKVE

SEQ ID NO: 6107 - protein, 2103 aa, synthetic construct
MPAAKRVKLDGGDKKYSIGLDIGTNSVGWAVITDEYKVPSKKFKVLGNTDRHSIKKNLIGALLFDSGETAEATRLKRTARRRYTRRKNRICYLQEIFSNEMAKVDDSFFHRLEESFLVEEDKKHERHPIFGNIVDEVAYHEKYPTIYHLRKKLVDSTDKADLRLIYLALAHMIKFRGHFLIEGDLNPDNSDVDKLFIQLVQTYNQLFEENPINASGVDAKAILSARLSKSRRLENLIAQLPGEKKNGLFGNLIALSLGLTPNFKSNFDLAEDAKLQLSKDTYDDDLDNLLAQIGDQYADLFLAAKNLSDAILLSDILRVNTEITKAPLSASMIKRYDEHHQDLTLLKALVRQQLPEKYKEIFFDQSKNGYAGYIDGGASQEEFYKFIKPILEKMDGTEELLVKLNREDLLRKQRTFDNGSIPHQIHLGELHAILRRQEDFYPFLKDNREKIEKILTFRIPYYVGPLARGNSRFAWMTRKSEETITPWNFEEVVDKGASAQSFIERMTNFDKNLPNEKVLPKHSLLYEYFTVYNELTKVKYVTEGMRKPAFLSGEQKKAIVDLLFKTNRKVTVKQLKEDYFKKIECFDSVEISGVEDRFNASLGTYHDLLKIIKDKDFLDNEENEDILEDIVLTLTLFEDREMIEERLKTYAHLFDDKVMKQLKRRRYTGWGRLSRKLINGIRDKQSGKTILDFLKSDGFANRNFMQLIHDDSLTFKEDIQKAQVSGQGDSLHEHIANLAGSPAIKKGILQTVKVVDELVKVMGRHKPENIVIEMARENQTTQKGQKNSRERMKRIEEGIKELGSQILKEHPVENTQLQNEKLYLYYLQNGRDMYVDQELDINRLSDYDVDHIVPQSFLKDDSIDNKVLTRSDKARGKSDNVPSEEVVKKMKNYWRQLLNAKLITQRKFDNLTKAERGGLSELDKAGFIKRQLVETRQITKHVAQILDSRMNTKYDENDKLIREVKVITLKSKLVSDFRKDFQFYKVREINNYHHAHDAYLNAVVGTALIKKYPKLESEFVYGDYKVYDVRKMIAKSEQEIGKATAKYFFYSNIMNFFKTEITLANGEIRKRPLIETNGETGEIVWDKGRDFATVRKVLSMPQVNIVKKTEVQTGGFSKESILPKRNSDKLIARKKDWDPKKYGGFDSPTVAYSVLVVAKVEKGKSKKLKSVKELLGITIMERSSFEKNPIDFLEAKGYKEVKKDLIIKLPKYSLFELENGRKRMLASAGELQKGNELALPSKYVNFLYLASHYEKLKGSPEDNEQKQLFVEQHKHYLDEIIEQISEFSKRVILADANLDKVLSAYNKHRDKPIREQAENIIHLFTLTNLGAPAAFKYFDTTIDRKRYTSTKEVLDATLIHQSITGLYETRIDLSQLGGDGGGGSGGSGGSGGSGGSGGSGGTLNIEDEYRLHETSKEPDVPLGSTWLSDFPQAWAETGGMGLAVRQAPLIIPLKATSTPVSIKQYPMSQEARLGIKPHIQRLLDQGILVPCQSPWNTPLLPVKKPGTNDYRPVQDLREVNKRVEDIHPTVPNPYNLLSGLPPSHQWYTVLDLKDAFFCLRLHPTSQPLFAFEWRDPEMGISGQLTWTRLPQGFKNSPTLFNEALHRDLADFRIQHPDLILLQYVDDLLLAATSEQDCQRGTRALLQTLGNLGYRASAKKAQICQKQVKYLGYLLKEGQRWLTEARKETVMGQPTPKTPRQLREFLGKAGFCRLFIPGFAEMAAPLYPLTKPGTLFNWGPDQQKAYQEIKQALLTAPALGLPDLTKPFELFVDEKQGYAKGVLTQKLGPWRRPVAYLSKKLDPVAAGWPPCLRMVAAIAVLTKDAGKLTMGQPLVILAPHAVEALVKQPPDRWLSNARMTHYQAMLLDTDRVQFGPVVALNPATLLPLPEKEAPHDCLEILAETHGTRPDLTDQPIPDADYTWYTDGSSFLQEGQRRAGAAVTTETEVIWARALPAGTSAQRAELIALTQALKMAEGKKLNVYTDSRYAFATAHVHGEIYRRRGWLTSEGREIKNKNEILALLKALFLPKRLSIIHCPGHQKGNSAEARGNRMADQAAREAAMKAVLETSTLLAGKRTADGSEFEKRTADGSEFESPKKKAKVE

SEQ ID NO: 6108 - protein, 2092 aa, synthetic construct
MPAAKRVKLDGGDKKYSIGLDIGTNSVGWAVITDEYKVPSKKFKVLGNTDRHSIKKNLIGALLFDSGETAEATRLKRTARRRYTRRKNRICYLQEIFSNEMAKVDDSFFHRLEESFLVEEDKKHERHPIFGNIVDEVAYHEKYPTIYHLRKKLVDSTDKADLRLIYLALAHMIKFRGHFLIEGDLNPDNSDVDKLFIQLVQTYNQLFEENPINASGVDAKAILSARLSKSRRLENLIAQLPGEKKNGLFGNLIALSLGLTPNFKSNFDLAEDAKLQLSKDTYDDDLDNLLAQIGDQYADLFLAAKNLSDAILLSDILRVNTEITKAPLSASMIKRYDEHHQDLTLLKALVRQQLPEKYKEIFFDQSKNGYAGYIDGGASQEEFYKFIKPILEKMDGTEELLVKLNREDLLRKQRTFDNGSIPHQIHLGELHAILRRQEDFYPFLKDNREKIEKILTFRIPYYVGPLARGNSRFAWMTRKSEETITPWNFEEVVDKGASAQSFIERMTNFDKNLPNEKVLPKHSLLYEYFTVYNELTKVKYVTEGMRKPAFLSGEQKKAIVDLLFKTNRKVTVKQLKEDYFKKIECFDSVEISGVEDRFNASLGTYHDLLKIIKDKDFLDNEENEDILEDIVLTLTLFEDREMIEERLKTYAHLFDDKVMKQLKRRRYTGWGRLSRKLINGIRDKQSGKTILDFLKSDGFANRNFMQLIHDDSLTFKEDIQKAQVSGQGDSLHEHIANLAGSPAIKKGILQTVKVVDELVKVMGRHKPENIVIEMARENQTTQKGQKNSRERMKRIEEGIKELGSQILKEHPVENTQLQNEKLYLYYLQNGRDMYVDQELDINRLSDYDVDHIVPQSFLKDDSIDNKVLTRSDKARGKSDNVPSEEVVKKMKNYWRQLLNAKLITQRKFDNLTKAERGGLSELDKAGFIKRQLVETRQITKHVAQILDSRMNTKYDENDKLIREVKVITLKSKLVSDFRKDFQFYKVREINNYHHAHDAYLNAVVGTALIKKYPKLESEFVYGDYKVYDVRKMIAKSEQEIGKATAKYFFYSNIMNFFKTEITLANGEIRKRPLIETNGETGEIVWDKGRDFATVRKVLSMPQVNIVKKTEVQTGGFSKESILPKRNSDKLIARKKDWDPKKYGGFDSPTVAYSVLVVAKVEKGKSKKLKSVKELLGITIMERSSFEKNPIDFLEAKGYKEVKKDLIIKLPKYSLFELENGRKRMLASAGELQKGNELALPSKYVNFLYLASHYEKLKGSPEDNEQKQLFVEQHKHYLDEIIEQISEFSKRVILADANLDKVLSAYNKHRDKPIREQAENIIHLFTLTNLGAPAAFKYFDTTIDRKRYTSTKEVLDATLIHQSITGLYETRIDLSQLGGDGGGGGGSGGTAPLEEEYRLFLEAPIQNVTLLEQWKREIPKVWAEINPPGLASTQAPIHVQLLSTALPVRVRQYPITLEAKRSLRETIRKFRAAGILRPVHSPWNTPLLPVRKSGTSEYRMVQDLREVNKRVETIHPTVPNPYTLLSLLPPDRIWYSVLDLKDAFFCIPLAPESQLIFAFEWADAEEGESGQLTWTRLPQGFKNSPTLFNEALNRDLQGFRLDHPSVSLLQYVDDLLIAADTQAACLSATRDLLMTLAELGYRVSGKKAQLCQEEVTYLGFKIHKGSRSLSNSRTQAILQIPVPKTKRQVREFLGKIGYCRLFIPGFAELAQPLYAATRPGNDPLVWGEKEEEAFQSLKLALTQPPALALPSLDKPFQLFVEETSGAAKGVLTQALGPWKRPVAYLSKRLDPVAAGWPRCLRAIAAAALLTREASKLTFGQDIEITSSHNLESLLRSPPDKWLTNARITQYQVLLLDPPRVRFKQTAALNPATLLPETDDTLPIHHCLDTLDSLTSTRPDLTDQPLAQAEATLFTDGSSYIRDGKRYAGAAVVTLDSVIWAEPLPIGTSAQKAELIALTKALEWSKDKSVNIYTDSRYAFATLHVHGMIYRERGWLTAGGKAIKNAPEILALLTAVWLPKRVAVMHCKGHQKDDAPTSTGNRRADEVAREVAIRPLSTQATISAGKRTADGSEFEKRTADGSEFESPKKKAKVE

SEQ ID NO: 6109 - protein, 2081 aa, synthetic construct
MPAAKRVKLDGGDKKYSIGLDIGTNSVGWAVITDEYKVPSKKFKVLGNTDRHSIKKNLIGALLFDSGETAEATRLKRTARRRYTRRKNRICYLQEIFSNEMAKVDDSFFHRLEESFLVEEDKKHERHPIFGNIVDEVAYHEKYPTIYHLRKKLVDSTDKADLRLIYLALAHMIKFRGHFLIEGDLNPDNSDVDKLFIQLVQTYNQLFEENPINASGVDAKAILSARLSKSRRLENLIAQLPGEKKNGLFGNLIALSLGLTPNFKSNFDLAEDAKLQLSKDTYDDDLDNLLAQIGDQYADLFLAAKNLSDAILLSDILRVNTEITKAPLSASMIKRYDEHHQDLTLLKALVRQQLPEKYKEIFFDQSKNGYAGYIDGGASQEEFYKFIKPILEKMDGTEELLVKLNREDLLRKQRTFDNGSIPHQIHLGELHAILRRQEDFYPFLKDNREKIEKILTFRIPYYVGPLARGNSRFAWMTRKSEETITPWNFEEVVDKGASAQSFIERMTNFDKNLPNEKVLPKHSLLYEYFTVYNELTKVKYVTEGMRKPAFLSGEQKKAIVDLLFKTNRKVTVKQLKEDYFKKIECFDSVEISGVEDRFNASLGTYHDLLKIIKDKDFLDNEENEDILEDIVLTLTLFEDREMIEERLKTYAHLFDDKVMKQLKRRRYTGWGRLSRKLINGIRDKQSGKTILDFLKSDGFANRNFMQLIHDDSLTFKEDIQKAQVSGQGDSLHEHIANLAGSPAIKKGILQTVKVVDELVKVMGRHKPENIVIEMARENQTTQKGQKNSRERMKRIEEGIKELGSQILKEHPVENTQLQNEKLYLYYLQNGRDMYVDQELDINRLSDYDVDHIVPQSFLKDDSIDNKVLTRSDKARGKSDNVPSEEVVKKMKNYWRQLLNAKLITQRKFDNLTKAERGGLSELDKAGFIKRQLVETRQITKHVAQILDSRMNTKYDENDKLIREVKVITLKSKLVSDFRKDFQFYKVREINNYHHAHDAYLNAVVGTALIKKYPKLESEFVYGDYKVYDVRKMIAKSEQEIGKATAKYFFYSNIMNFFKTEITLANGEIRKRPLIETNGETGEIVWDKGRDFATVRKVLSMPQVNIVKKTEVQTGGFSKESILPKRNSDKLIARKKDWDPKKYGGFDSPTVAYSVLVVAKVEKGKSKKLKSVKELLGITIMERSSFEKNPIDFLEAKGYKEVKKDLIIKLPKYSLFELENGRKRMLASAGELQKGNELALPSKYVNFLYLASHYEKLKGSPEDNEQKQLFVEQHKHYLDEIIEQISEFSKRVILADANLDKVLSAYNKHRDKPIREQAENIIHLFTLTNLGAPAAFKYFDTTIDRKRYTSTKEVLDATLIHQSITGLYETRIDLSQLGGDGGGGGGSGGVPWILKKPLELTIKLDLEEQQGTLLNNSILSKKGKEELKQLFEKYSALWQSWENQVGHRRIRPHKIATGTVKPTPQKQYHINPKAKPDIQIVINDLLKQGVLIQKESTMNTPVYPVPKPNGRWRMVLDYRAVNKVTPLIAVQNQHSYGILGSLFKGRYKTTIDLSNGFWAHPIVPEDYWITAFTWQGKQYCWTVLPQGFLNSPGLFTGDVVDLLQGIPNVEVYVDDVYISHDSEKEHLEYLDILFNRLKEAGYIISLKKSNIANSIVDFLGFQITNEGRGLTDTFKEKLENITAPTTLKQLQSILGLLNFARNFIPDFTELIAPLYALIPKSTKNYVPWQIEHSTTLETLITKLNGAEYLQGRKGDKTLIMKVNASYTTGYIRYYNEGEKKPISYVSIVFSKTELKFTELEKLLTTVHKGLLKALDLSMGQNIHVYSPIVSMQNIQKTPQTAKKALASRWLSWLSYLEDPRIRFFYDPQMPALKDLPAVDTGKDNKKHPSNFQHIFYTDGSAITSPTKEGHLNAGMGIVYFINKDGNLQKQQEWSISLGNHTAQFAEIAAFEFALKKCLPLGGNILVVTDSNYVAKAYNEELDVWASNGFVNNRKKPLKHISKWKSVADLKRLRPDVVVTHEPGHQKLDSSPHAYGNNLADQLATQASFKVHAGKRTADGSEFEKRTADGSEFESPKKKAKVE

SEQ ID NO: 6110 - protein, 2088 aa, synthetic construct
MPAAKRVKLDGGDKKYSIGLDIGTNSVGWAVITDEYKVPSKKFKVLGNTDRHSIKKNLIGALLFDSGETAEATRLKRTARRRYTRRKNRICYLQEIFSNEMAKVDDSFFHRLEESFLVEEDKKHERHPIFGNIVDEVAYHEKYPTIYHLRKKLVDSTDKADLRLIYLALAHMIKFRGHFLIEGDLNPDNSDVDKLFIQLVQTYNQLFEENPINASGVDAKAILSARLSKSRRLENLIAQLPGEKKNGLFGNLIALSLGLTPNFKSNFDLAEDAKLQLSKDTYDDDLDNLLAQIGDQYADLFLAAKNLSDAILLSDILRVNTEITKAPLSASMIKRYDEHHQDLTLLKALVRQQLPEKYKEIFFDQSKNGYAGYIDGGASQEEFYKFIKPILEKMDGTEELLVKLNREDLLRKQRTFDNGSIPHQIHLGELHAILRRQEDFYPFLKDNREKIEKILTFRIPYYVGPLARGNSRFAWMTRKSEETITPWNFEEVVDKGASAQSFIERMTNFDKNLPNEKVLPKHSLLYEYFTVYNELTKVKYVTEGMRKPAFLSGEQKKAIVDLLFKTNRKVTVKQLKEDYFKKIECFDSVEISGVEDRFNASLGTYHDLLKIIKDKDFLDNEENEDILEDIVLTLTLFEDREMIEERLKTYAHLFDDKVMKQLKRRRYTGWGRLSRKLINGIRDKQSGKTILDFLKSDGFANRNFMQLIHDDSLTFKEDIQKAQVSGQGDSLHEHIANLAGSPAIKKGILQTVKVVDELVKVMGRHKPENIVIEMARENQTTQKGQKNSRERMKRIEEGIKELGSQILKEHPVENTQLQNEKLYLYYLQNGRDMYVDQELDINRLSDYDVDHIVPQSFLKDDSIDNKVLTRSDKARGKSDNVPSEEVVKKMKNYWRQLLNAKLITQRKFDNLTKAERGGLSELDKAGFIKRQLVETRQITKHVAQILDSRMNTKYDENDKLIREVKVITLKSKLVSDFRKDFQFYKVREINNYHHAHDAYLNAVVGTALIKKYPKLESEFVYGDYKVYDVRKMIAKSEQEIGKATAKYFFYSNIMNFFKTEITLANGEIRKRPLIETNGETGEIVWDKGRDFATVRKVLSMPQVNIVKKTEVQTGGFSKESILPKRNSDKLIARKKDWDPKKYGGFDSPTVAYSVLVVAKVEKGKSKKLKSVKELLGITIMERSSFEKNPIDFLEAKGYKEVKKDLIIKLPKYSLFELENGRKRMLASAGELQKGNELALPSKYVNFLYLASHYEKLKGSPEDNEQKQLFVEQHKHYLDEIIEQISEFSKRVILADANLDKVLSAYNKHRDKPIREQAENIIHLFTLTNLGAPAAFKYFDTTIDRKRYTSTKEVLDATLIHQSITGLYETRIDLSQLGGDGGGGGGSGGVLNLEEEYRLHEKPVPSSIDPSWLQLFPTVWAERAGMGLANQVPPVVVELRSGASPVAVRQYPMSKEAREGIRPHIQKFLDLGVLVPCRSPWNTPLLPVKKPGTNDYRPVQDLREINKRVQDIHPTVPNPYNLLSSLPPSYTWYSVLDLKDAFFCLRLHPNSQPLFAFEWKDPEKGNTGQLTWTRLPQGFKNSPTLFNEALHRDLAPFRALNPQVVLLQYVDDLLVAAPTYEDCKKGTQKLLQELSKLGYRVSAKKAQLCQREVTYLGYLLKEGKRWLTPARKATVMKIPVPTTPRQVREFLGTAGFCRLWIPGFASLAAPLYPLTKPSIPFIWTEEHQQAFDHIKKALLSAPALALPDLTKPFTLYIDERAGVARGVLTQTLGPWRRPVAYLSKKLDPVASGWPTCLKAVAAVALLLKDADKLTLGQNVTVIASHSLESIVRQPPDRWMTNARMTHYQSLLLNERVSFAPPAVLNPATLLPVESEATPVHRCSEILAEETGTRRDLEDQPLPGVPTWYTDGSSFITEGKRRAGAPIVDGKRTVWASSLPEGTSAQKAELVALTQALRLAEGKNINIYTDSRYAFATAHIHGAIYKQRGWLTSAGKDIKNKEEILALLEAIHLPRRVAIIHCPGHQRGSNPVATGNRRADEAAKQAALSTRVLAGTTKPAGKRTADGSEFEKRTADGSEFESPKKKAKVE

SEQ ID NO: 6111 - protein, 2090 aa, synthetic construct
MPAAKRVKLDGGDKKYSIGLDIGTNSVGWAVITDEYKVPSKKFKVLGNTDRHSIKKNLIGALLFDSGETAEATRLKRTARRRYTRRKNRICYLQEIFSNEMAKVDDSFFHRLEESFLVEEDKKHERHPIFGNIVDEVAYHEKYPTIYHLRKKLVDSTDKADLRLIYLALAHMIKFRGHFLIEGDLNPDNSDVDKLFIQLVQTYNQLFEENPINASGVDAKAILSARLSKSRRLENLIAQLPGEKKNGLFGNLIALSLGLTPNFKSNFDLAEDAKLQLSKDTYDDDLDNLLAQIGDQYADLFLAAKNLSDAILLSDILRVNTEITKAPLSASMIKRYDEHHQDLTLLKALVRQQLPEKYKEIFFDQSKNGYAGYIDGGASQEEFYKFIKPILEKMDGTEELLVKLNREDLLRKQRTFDNGSIPHQIHLGELHAILRRQEDFYPFLKDNREKIEKILTFRIPYYVGPLARGNSRFAWMTRKSEETITPWNFEEVVDKGASAQSFIERMTNFDKNLPNEKVLPKHSLLYEYFTVYNELTKVKYVTEGMRKPAFLSGEQKKAIVDLLFKTNRKVTVKQLKEDYFKKIECFDSVEISGVEDRFNASLGTYHDLLKIIKDKDFLDNEENEDILEDIVLTLTLFEDREMIEERLKTYAHLFDDKVMKQLKRRRYTGWGRLSRKLINGIRDKQSGKTILDFLKSDGFANRNFMQLIHDDSLTFKEDIQKAQVSGQGDSLHEHIANLAGSPAIKKGILQTVKVVDELVKVMGRHKPENIVIEMARENQTTQKGQKNSRERMKRIEEGIKELGSQILKEHPVENTQLQNEKLYLYYLQNGRDMYVDQELDINRLSDYDVDHIVPQSFLKDDSIDNKVLTRSDKARGKSDNVPSEEVVKKMKNYWRQLLNAKLITQRKFDNLTKAERGGLSELDKAGFIKRQLVETRQITKHVAQILDSRMNTKYDENDKLIREVKVITLKSKLVSDFRKDFQFYKVREINNYHHAHDAYLNAVVGTALIKKYPKLESEFVYGDYKVYDVRKMIAKSEQEIGKATAKYFFYSNIMNFFKTEITLANGEIRKRPLIETNGETGEIVWDKGRDFATVRKVLSMPQVNIVKKTEVQTGGFSKESILPKRNSDKLIARKKDWDPKKYGGFDSPTVAYSVLVVAKVEKGKSKKLKSVKELLGITIMERSSFEKNPIDFLEAKGYKEVKKDLIIKLPKYSLFELENGRKRMLASAGELQKGNELALPSKYVNFLYLASHYEKLKGSPEDNEQKQLFVEQHKHYLDEIIEQISEFSKRVILADANLDKVLSAYNKHRDKPIREQAENIIHLFTLTNLGAPAAFKYFDTTIDRKRYTSTKEVLDATLIHQSITGLYETRIDLSQLGGDGGGGGGSGGTLNIEDEYRLHETSKEPDVSLGSTWLSDFPQAWAETGGMGLAVRQAPLIIPLKATSTPVSIKQYPMSQEARLGIKPHIQRLLDQGILVPCQSPWNTPLLPVKKPGTNDYRPVQDLREVNKRVEDIHPTVPNPYNLLSGLPPSHQWYTVLDLKDAFFCLRLHPTSQPLFAFEWRDPEMGISGQLTWTRLPQGFKNSPTLFDEALHRDLAGFRIQHPDLILLQYVDDLLLAATSELDCQQGTRALLQTLGDLGYRASAKKAQICQKQVKYLGYLLKEGQRWLTEARKETVMGQPIPKTPRQLREFLGTAGFCRLWIPGFAEMAAPLYPLTKTGTLFNWGPDQQKAFQEIKQALLTAPALGLPDLTKPFELFVDEKQGYAKGVLTQKLGPWRRPVAYLSKKLDPVAAGWPPCLRMVAAIAVLTKDAGKLTMGQPLVILAPHAVEALVKQPPDRWLSNARMTHYQALLLDTDRVQFGPVVALNPATLLPLPEEGLQHDCLDILAEAHGTRSDLMDQPLPDADHTWYTDGSSFLQEGQRKAGAAVTTETEVIWARALPAGTSAQRAELIALTQALKMAEGKKLNVYTDSRYAFATAHIHGEIYRRRGLLTSEGKEIKNKDEILALLKALFLPKRLSIIHCPGHQKGNSAEARGNRMADQAAREVATRETPETSTLLAGKRTADGSEFEKRTADGSEFESPKKKAKVE

SEQ ID NO: 6112 - protein, 2090 aa, synthetic construct
MPAAKRVKLDGGDKKYSIGLDIGTNSVGWAVITDEYKVPSKKFKVLGNTDRHSIKKNLIGALLFDSGETAEATRLKRTARRRYTRRKNRICYLQEIFSNEMAKVDDSFFHRLEESFLVEEDKKHERHPIFGNIVDEVAYHEKYPTIYHLRKKLVDSTDKADLRLIYLALAHMIKFRGHFLIEGDLNPDNSDVDKLFIQLVQTYNQLFEENPINASGVDAKAILSARLSKSRRLENLIAQLPGEKKNGLFGNLIALSLGLTPNFKSNFDLAEDAKLQLSKDTYDDDLDNLLAQIGDQYADLFLAAKNLSDAILLSDILRVNTEITKAPLSASMIKRYDEHHQDLTLLKALVRQQLPEKYKEIFFDQSKNGYAGYIDGGASQEEFYKFIKPILEKMDGTEELLVKLNREDLLRKQRTFDNGSIPHQIHLGELHAILRRQEDFYPFLKDNREKIEKILTFRIPYYVGPLARGNSRFAWMTRKSEETITPWNFEEVVDKGASAQSFIERMTNFDKNLPNEKVLPKHSLLYEYFTVYNELTKVKYVTEGMRKPAFLSGEQKKAIVDLLFKTNRKVTVKQLKEDYFKKIECFDSVEISGVEDRFNASLGTYHDLLKIIKDKDFLDNEENEDILEDIVLTLTLFEDREMIEERLKTYAHLFDDKVMKQLKRRRYTGWGRLSRKLINGIRDKQSGKTILDFLKSDGFANRNFMQLIHDDSLTFKEDIQKAQVSGQGDSLHEHIANLAGSPAIKKGILQTVKVVDELVKVMGRHKPENIVIEMARENQTTQKGQKNSRERMKRIEEGIKELGSQILKEHPVENTQLQNEKLYLYYLQNGRDMYVDQELDINRLSDYDVDHIVPQSFLKDDSIDNKVLTRSDKARGKSDNVPSEEVVKKMKNYWRQLLNAKLITQRKFDNLTKAERGGLSELDKAGFIKRQLVETRQITKHVAQILDSRMNTKYDENDKLIREVKVITLKSKLVSDFRKDFQFYKVREINNYHHAHDAYLNAVVGTALIKKYPKLESEFVYGDYKVYDVRKMIAKSEQEIGKATAKYFFYSNIMNFFKTEITLANGEIRKRPLIETNGETGEIVWDKGRDFATVRKVLSMPQVNIVKKTEVQTGGFSKESILPKRNSDKLIARKKDWDPKKYGGFDSPTVAYSVLVVAKVEKGKSKKLKSVKELLGITIMERSSFEKNPIDFLEAKGYKEVKKDLIIKLPKYSLFELENGRKRMLASAGELQKGNELALPSKYVNFLYLASHYEKLKGSPEDNEQKQLFVEQHKHYLDEIIEQISEFSKRVILADANLDKVLSAYNKHRDKPIREQAENIIHLFTLTNLGAPAAFKYFDTTIDRKRYTSTKEVLDATLIHQSITGLYETRIDLSQLGGDGGGGGGSGGTLNIEDEYRLHETSKEPDVSLGSTWLSDFPQAWAETGGMGLAVRQAPLIIPLKATSTPVSIKQYPMSQEARLGIKPHIQRLLDQGILVPCQSPWNTPLLPVKKPGTNDYRPVQDLREVNKRVEDIHPTVPNPYNLLSGLPPSHQWYTVLDLKDAFFCLRLHPTSQPLFAFEWRDPEMGISGQLTWTRLPQGFKNSPTLFNEALHRDLAGFRIQHPDLILLQYVDDLLLAATSELDCQQGTRALLQTLGDLGYRASAKKAQICQKQVKYLGYLLKEGQRWLTEARKETVMGQPIPKTPRQLREFLGTAGFCRLWIPGFAEMAAPLYPLTKPGTLFNWGPDQQKAFQEIKQALLTAPALGLPDLTKPFELFVDEKQGYAKGVLTQKLGPWRRPVAYLSKKLDPVAAGWPPCLRMVAAIAVLTKDAGKLTMGQPLVILAPHAVEALVKQPPDRWLSNARMTHYQALLLDTDRVQFGPVVALNPATLLPLPEEGLQHDCLDILAEAHGTRSDLMDQPLPDADHTWYTDGSSFLQEGQRKAGAAVTTETEVIWARALPAGTSAQRAELIALTQALKMAEGKKLNVYTDSRYAFATAHIHGEIYRRRGWLTSEGKEIKNKDEILALLKALFLPKRLSIIHCPGHQKGNSAEARGNRMADQAAREVATRETPETSTLLAGKRTADGSEFEKRTADGSEFESPKKKAKVE

SEQ ID NO: 6113 - protein, 2110 aa, synthetic construct
MPAAKRVKLDGGDKKYSIGLDIGTNSVGWAVITDEYKVPSKKFKVLGNTDRHSIKKNLIGALLFDSGETAEATRLKRTARRRYTRRKNRICYLQEIFSNEMAKVDDSFFHRLEESFLVEEDKKHERHPIFGNIVDEVAYHEKYPTIYHLRKKLVDSTDKADLRLIYLALAHMIKFRGHFLIEGDLNPDNSDVDKLFIQLVQTYNQLFEENPINASGVDAKAILSARLSKSRRLENLIAQLPGEKKNGLFGNLIALSLGLTPNFKSNFDLAEDAKLQLSKDTYDDDLDNLLAQIGDQYADLFLAAKNLSDAILLSDILRVNTEITKAPLSASMIKRYDEHHQDLTLLKALVRQQLPEKYKEIFFDQSKNGYAGYIDGGASQEEFYKFIKPILEKMDGTEELLVKLNREDLLRKQRTFDNGSIPHQIHLGELHAILRRQEDFYPFLKDNREKIEKILTFRIPYYVGPLARGNSRFAWMTRKSEETITPWNFEEVVDKGASAQSFIERMTNFDKNLPNEKVLPKHSLLYEYFTVYNELTKVKYVTEGMRKPAFLSGEQKKAIVDLLFKTNRKVTVKQLKEDYFKKIECFDSVEISGVEDRFNASLGTYHDLLKIIKDKDFLDNEENEDILEDIVLTLTLFEDREMIEERLKTYAHLFDDKVMKQLKRRRYTGWGRLSRKLINGIRDKQSGKTILDFLKSDGFANRNFMQLIHDDSLTFKEDIQKAQVSGQGDSLHEHIANLAGSPAIKKGILQTVKVVDELVKVMGRHKPENIVIEMARENQTTQKGQKNSRERMKRIEEGIKELGSQILKEHPVENTQLQNEKLYLYYLQNGRDMYVDQELDINRLSDYDVDHIVPQSFLKDDSIDNKVLTRSDKARGKSDNVPSEEVVKKMKNYWRQLLNAKLITQRKFDNLTKAERGGLSELDKAGFIKRQLVETRQITKHVAQILDSRMNTKYDENDKLIREVKVITLKSKLVSDFRKDFQFYKVREINNYHHAHDAYLNAVVGTALIKKYPKLESEFVYGDYKVYDVRKMIAKSEQEIGKATAKYFFYSNIMNFFKTEITLANGEIRKRPLIETNGETGEIVWDKGRDFATVRKVLSMPQVNIVKKTEVQTGGFSKESILPKRNSDKLIARKKDWDPKKYGGFDSPTVAYSVLVVAKVEKGKSKKLKSVKELLGITIMERSSFEKNPIDFLEAKGYKEVKKDLIIKLPKYSLFELENGRKRMLASAGELQKGNELALPSKYVNFLYLASHYEKLKGSPEDNEQKQLFVEQHKHYLDEIIEQISEFSKRVILADANLDKVLSAYNKHRDKPIREQAENIIHLFTLTNLGAPAAFKYFDTTIDRKRYTSTKEVLDATLIHQSITGLYETRIDLSQLGGDGGGGGGSGGVQEISDSRPMLHIYLNGRRFLGLLDTGADKTCIAGRDWPANWPIHQTESSLQGLGMACGVARSSQPLRWQHEDKSGIIHPFVIPTLPFTLWGRDIMKDIKVRLMTDSPDDSQDLMIGAIESNLFADQISWKSDQPVWLNQWPLKQEKLQALQQLVTEQLQLGHLEESNSPWNTPVFVIKKKSGKWRLLQDLRAVNATMHDMGALQPGLPSPVAVPKGWEIIIIDLQDCFFNIKLHPEDCKRFAFSVPSPNFKRPYQRFQWKVLPQGMKNSPTLCQKFVDKAILTVRDKYQDSYIVHYMDDILLAHPSRSIVDEILTSMIQALNKHGLVVSTEKIQKYDNLKYLGTHIQGDSVSYQKLQIRTDKLRTLNDFQKLLGNINWIRPFLKLTTGELKPLFEILNGDSNPISTRKLTPEACKALQLMNERLSTARVKRLDLSQPWSLCILKTEYTPTACLWQDGVVEWIHLPHISPKVITPYDIFCTQLIIKGRHRSKELFSKDPDYIVVPYTKVQFDLLLQEKEDWPISLLGFLGEVHFHLPKDPLLTFTLQTAIIFPHMTSTTPLEKGIVIFTDGSANGRSVTYIQGREPIIKENTQNTAQQAEIVAVITAFEEVSQPFNLYTDSKYVTGLFPEIETATLSPRTKIYTELKHLQRLIHKRQEKFYIGHIRGHTGLPGPLAQGNAYADSLTRILTAAGKRTADGSEFEKRTADGSEFESPKKKAKVE

SEQ ID NO: 6114 - protein, 2170 aa, synthetic construct
MPAAKRVKLDGGDKKYSIGLDIGTNSVGWAVITDEYKVPSKKFKVLGNTDRHSIKKNLIGALLFDSGETAEATRLKRTARRRYTRRKNRICYLQEIFSNEMAKVDDSFFHRLEESFLVEEDKKHERHPIFGNIVDEVAYHEKYPTIYHLRKKLVDSTDKADLRLIYLALAHMIKFRGHFLIEGDLNPDNSDVDKLFIQLVQTYNQLFEENPINASGVDAKAILSARLSKSRRLENLIAQLPGEKKNGLFGNLIALSLGLTPNFKSNFDLAEDAKLQLSKDTYDDDLDNLLAQIGDQYADLFLAAKNLSDAILLSDILRVNTEITKAPLSASMIKRYDEHHQDLTLLKALVRQQLPEKYKEIFFDQSKNGYAGYIDGGASQEEFYKFIKPILEKMDGTEELLVKLNREDLLRKQRTFDNGSIPHQIHLGELHAILRRQEDFYPFLKDNREKIEKILTFRIPYYVGPLARGNSRFAWMTRKSEETITPWNFEEVVDKGASAQSFIERMTNFDKNLPNEKVLPKHSLLYEYFTVYNELTKVKYVTEGMRKPAFLSGEQKKAIVDLLFKTNRKVTVKQLKEDYFKKIECFDSVEISGVEDRFNASLGTYHDLLKIIKDKDFLDNEENEDILEDIVLTLTLFEDREMIEERLKTYAHLFDDKVMKQLKRRRYTGWGRLSRKLINGIRDKQSGKTILDFLKSDGFANRNFMQLIHDDSLTFKEDIQKAQVSGQGDSLHEHIANLAGSPAIKKGILQTVKVVDELVKVMGRHKPENIVIEMARENQTTQKGQKNSRERMKRIEEGIKELGSQILKEHPVENTQLQNEKLYLYYLQNGRDMYVDQELDINRLSDYDVDHIVPQSFLKDDSIDNKVLTRSDKARGKSDNVPSEEVVKKMKNYWRQLLNAKLITQRKFDNLTKAERGGLSELDKAGFIKRQLVETRQITKHVAQILDSRMNTKYDENDKLIREVKVITLKSKLVSDFRKDFQFYKVREINNYHHAHDAYLNAVVGTALIKKYPKLESEFVYGDYKVYDVRKMIAKSEQEIGKATAKYFFYSNIMNFFKTEITLANGEIRKRPLIETNGETGEIVWDKGRDFATVRKVLSMPQVNIVKKTEVQTGGFSKESILPKRNSDKLIARKKDWDPKKYGGFDSPTVAYSVLVVAKVEKGKSKKLKSVKELLGITIMERSSFEKNPIDFLEAKGYKEVKKDLIIKLPKYSLFELENGRKRMLASAGELQKGNELALPSKYVNFLYLASHYEKLKGSPEDNEQKQLFVEQHKHYLDEIIEQISEFSKRVILADANLDKVLSAYNKHRDKPIREQAENIIHLFTLTNLGAPAAFKYFDTTIDRKRYTSTKEVLDATLIHQSITGLYETRIDLSQLGGDGGGGGGSGGMDPLQLLQPLEAEIKGTKLKAHWNSGATITCVPEAFLEDERPIQTMLIKTIHGEKQQDVYYLTFKVQGRKVEAEVLASPYDYILLNPSDVPWLMKKPLQLTVLVPLHEYQERLLQQTALPKEQKELLQKLFLKYDALWQHWENQVGHRRIKPHNIATGTLAPRPQKQYPINPKAKPSIQIVIDDLLKQGVLIQQNSTMNTPVYPVPKPDGKWRMVLDYREVNKTIPLIAAQNQHSAGILSSIYRGKYKTTLDLTNGFWAHPITPESYWLTAFTWQGKQYCWTRLPQGFLNSPALFNADVVDLLKEIPNVQAYVDDIYISHDDPQEHLEQLEKIFSILLNAGYVVSLKKSEIAQREVEFLGFNITKEGRGLTDTFKQKLLNITPPKDLKQLQSILGKLNFARNFIPNYSELVKPLYTIVAPANGKFISWTEDNSNQLQHIISVLNQADNLEERNPETRLIIKVNSSPSAGYIRYYNEGSKRPIMYVNYIFSKAEAKFTQTEKLLTTMHKGLIKAMDLAMGQEILVYSPIVSMTKIQRTPLPERKALPVRWITWMTYLEDPRIQFHYDKSLPELQQIPNVTEDVIAKTKHPSEFAMVFYTDGSAIKHPDVNKSHSAGMGIAQVQFIPEYKIVHQWSIPLGDHTAQLAEIAAVEFACKKALKISGPVLIVTDSFYVAESANKELPYWKSNGFLNNKKKPLRHVSKWKSIAECLQLKPDIIIMHEKGHQQPMTTLHTEGNNLADKLATQGSYVVHAGKRTADGSEFEKRTADGSEFESPKKKAKVE

SEQ ID NO: 6115 - protein, 2088 aa, synthetic construct
MPAAKRVKLDGGDKKYSIGLDIGTNSVGWAVITDEYKVPSKKFKVLGNTDRHSIKKNLIGALLFDSGETAEATRLKRTARRRYTRRKNRICYLQEIFSNEMAKVDDSFFHRLEESFLVEEDKKHERHPIFGNIVDEVAYHEKYPTIYHLRKKLVDSTDKADLRLIYLALAHMIKFRGHFLIEGDLNPDNSDVDKLFIQLVQTYNQLFEENPINASGVDAKAILSARLSKSRRLENLIAQLPGEKKNGLFGNLIALSLGLTPNFKSNFDLAEDAKLQLSKDTYDDDLDNLLAQIGDQYADLFLAAKNLSDAILLSDILRVNTEITKAPLSASMIKRYDEHHQDLTLLKALVRQQLPEKYKEIFFDQSKNGYAGYIDGGASQEEFYKFIKPILEKMDGTEELLVKLNREDLLRKQRTFDNGSIPHQIHLGELHAILRRQEDFYPFLKDNREKIEKILTFRIPYYVGPLARGNSRFAWMTRKSEETITPWNFEEVVDKGASAQSFIERMTNFDKNLPNEKVLPKHSLLYEYFTVYNELTKVKYVTEGMRKPAFLSGEQKKAIVDLLFKTNRKVTVKQLKEDYFKKIECFDSVEISGVEDRFNASLGTYHDLLKIIKDKDFLDNEENEDILEDIVLTLTLFEDREMIEERLKTYAHLFDDKVMKQLKRRRYTGWGRLSRKLINGIRDKQSGKTILDFLKSDGFANRNFMQLIHDDSLTFKEDIQKAQVSGQGDSLHEHIANLAGSPAIKKGILQTVKVVDELVKVMGRHKPENIVIEMARENQTTQKGQKNSRERMKRIEEGIKELGSQILKEHPVENTQLQNEKLYLYYLQNGRDMYVDQELDINRLSDYDVDHIVPQSFLKDDSIDNKVLTRSDKARGKSDNVPSEEVVKKMKNYWRQLLNAKLITQRKFDNLTKAERGGLSELDKAGFIKRQLVETRQITKHVAQILDSRMNTKYDENDKLIREVKVITLKSKLVSDFRKDFQFYKVREINNYHHAHDAYLNAVVGTALIKKYPKLESEFVYGDYKVYDVRKMIAKSEQEIGKATAKYFFYSNIMNFFKTEITLANGEIRKRPLIETNGETGEIVWDKGRDFATVRKVLSMPQVNIVKKTEVQTGGFSKESILPKRNSDKLIARKKDWDPKKYGGFDSPTVAYSVLVVAKVEKGKSKKLKSVKELLGITIMERSSFEKNPIDFLEAKGYKEVKKDLIIKLPKYSLFELENGRKRMLASAGELQKGNELALPSKYVNFLYLASHYEKLKGSPEDNEQKQLFVEQHKHYLDEIIEQISEFSKRVILADANLDKVLSAYNKHRDKPIREQAENIIHLFTLTNLGAPAAFKYFDTTIDRKRYTSTKEVLDATLIHQSITGLYETRIDLSQLGGDGGGGGGSGGVLNLEEEYRLHEKPVPSSIDPSWLQLFPTVWAERAGMGLANQVPPVVVELRSGASPVAVRQYPMSKEAREGIRPHIQRFLDLGVLVPCQSPWNTPLLPVKKPGTNDYRPVQDLREINKRVQDIHPTVPNPYNLLSSLPPSHTWYSVLDLKDAFFCLKLHPNSQPLFAFEWRDPEKGNTGQLTWTRLPQGFKNSPTLFNEALHRDLAPFRALNPQVVLLQYVDDLLVAAPTYRDCKEGTQKLLQELSKLGYRVSAKKAQLCQKEVTYLGYLLKEGKRWLTPARKATVMKIPPPTTPRQVREFLGTAGFCRLWIPGFASLAAPLYPLTKPSIPFIWTEEHQKAFDRIKEALLSAPALALPDLTKPFTLYVDERAGVARGVLTQTLGPWRRPVAYLSKKLDPVASGWPTCLKAVAAVALLLKDADKLTLGQNVTVIASHSLESIVRQPPDRWMTNARMTHYQSLLLNERVSFAPPAVLNPATLLPVESEATPVHRCSEILAEETGTRRDLKDQPLPGVPAWYTDGSSFIAEGKRRAGAAIVDGKRTVWASSLPEGTSAQKAELVALTQALRLAEGKDINIYTDSRYAFATAHIHGAIYKQRGWLTSAGKDIKNKEEILALLEAIHLPKRVAIIHCPGHQKGNDPVATGNRRADEAAKQAALSTRVLAETTKPAGKRTADGSEFEKRTADGSEFESPKKKAKVE

SEQ ID NO: 6116 - protein, 2088 aa, synthetic construct
MPAAKRVKLDGGDKKYSIGLDIGTNSVGWAVITDEYKVPSKKFKVLGNTDRHSIKKNLIGALLFDSGETAEATRLKRTARRRYTRRKNRICYLQEIFSNEMAKVDDSFFHRLEESFLVEEDKKHERHPIFGNIVDEVAYHEKYPTIYHLRKKLVDSTDKADLRLIYLALAHMIKFRGHFLIEGDLNPDNSDVDKLFIQLVQTYNQLFEENPINASGVDAKAILSARLSKSRRLENLIAQLPGEKKNGLFGNLIALSLGLTPNFKSNFDLAEDAKLQLSKDTYDDDLDNLLAQIGDQYADLFLAAKNLSDAILLSDILRVNTEITKAPLSASMIKRYDEHHQDLTLLKALVRQQLPEKYKEIFFDQSKNGYAGYIDGGASQEEFYKFIKPILEKMDGTEELLVKLNREDLLRKQRTFDNGSIPHQIHLGELHAILRRQEDFYPFLKDNREKIEKILTFRIPYYVGPLARGNSRFAWMTRKSEETITPWNFEEVVDKGASAQSFIERMTNFDKNLPNEKVLPKHSLLYEYFTVYNELTKVKYVTEGMRKPAFLSGEQKKAIVDLLFKTNRKVTVKQLKEDYFKKIECFDSVEISGVEDRFNASLGTYHDLLKIIKDKDFLDNEENEDILEDIVLTLTLFEDREMIEERLKTYAHLFDDKVMKQLKRRRYTGWGRLSRKLINGIRDKQSGKTILDFLKSDGFANRNFMQLIHDDSLTFKEDIQKAQVSGQGDSLHEHIANLAGSPAIKKGILQTVKVVDELVKVMGRHKPENIVIEMARENQTTQKGQKNSRERMKRIEEGIKELGSQILKEHPVENTQLQNEKLYLYYLQNGRDMYVDQELDINRLSDYDVDHIVPQSFLKDDSIDNKVLTRSDKARGKSDNVPSEEVVKKMKNYWRQLLNAKLITQRKFDNLTKAERGGLSELDKAGFIKRQLVETRQITKHVAQILDSRMNTKYDENDKLIREVKVITLKSKLVSDFRKDFQFYKVREINNYHHAHDAYLNAVVGTALIKKYPKLESEFVYGDYKVYDVRKMIAKSEQEIGKATAKYFFYSNIMNFFKTEITLANGEIRKRPLIETNGETGEIVWDKGRDFATVRKVLSMPQVNIVKKTEVQTGGFSKESILPKRNSDKLIARKKDWDPKKYGGFDSPTVAYSVLVVAKVEKGKSKKLKSVKELLGITIMERSSFEKNPIDFLEAKGYKEVKKDLIIKLPKYSLFELENGRKRMLASAGELQKGNELALPSKYVNFLYLASHYEKLKGSPEDNEQKQLFVEQHKHYLDEIIEQISEFSKRVILADANLDKVLSAYNKHRDKPIREQAENIIHLFTLTNLGAPAAFKYFDTTIDRKRYTSTKEVLDATLIHQSITGLYETRIDLSQLGGDGGGGGGSGGVLNLEEEYRLHEKPVPSSIDPSWLQLFPTVWAERAGMGLANQVPPVVVELRSGASPVAVRQYPMSKEAREGIRPHIQRFLDLGVLVPCQSPWNTPLLPVKKPGTNDYRPVQDLREINKRVQDIHPTVPNPYNLLSSLPPSHTWYSVLDLKDAFFCLKLHPNSQPLFAFEWRDPEKGNTGQLTWTRLPQGFKNSPTLFNEALHRDLAPFRALNPQVVLLQYVDDLLVAAPTYRDCKEGTQKLLQELSKLGYRVSAKKAQLCQKEVTYLGYLLKEGKRWLTPARKATVMKIPPPTTPRQVREFLGKAGFCRLFIPGFASLAAPLYPLTKPSIPFIWTEEHQKAFDRIKEALLSAPALALPDLTKPFTLYVDERAGVARGVLTQTLGPWRRPVAYLSKKLDPVASGWPTCLKAVAAVALLLKDADKLTLGQNVTVIASHSLESIVRQPPDRWMTNARMTHYQSLLLNERVSFAPPAVLNPATLLPVESEATPVHRCSEILAEETGTRRDLKDQPLPGVPAWYTDGSSFIAEGKRRAGAAIVDGKRTVWASSLPEGTSAQKAELVALTQALRLAEGKDINIYTDSRYAFATAHIHGAIYKQRGWLTSAGKDIKNKEEILALLEAIHLPKRVAIIHCPGHQKGNDPVATGNRRADEAAKQAALSTRVLAETTKPAGKRTADGSEFEKRTADGSEFESPKKKAKVE

SEQ ID NO: 6117 - protein, 2090 aa, synthetic construct
MPAAKRVKLDGGDKKYSIGLDIGTNSVGWAVITDEYKVPSKKFKVLGNTDRHSIKKNLIGALLFDSGETAEATRLKRTARRRYTRRKNRICYLQEIFSNEMAKVDDSFFHRLEESFLVEEDKKHERHPIFGNIVDEVAYHEKYPTIYHLRKKLVDSTDKADLRLIYLALAHMIKFRGHFLIEGDLNPDNSDVDKLFIQLVQTYNQLFEENPINASGVDAKAILSARLSKSRRLENLIAQLPGEKKNGLFGNLIALSLGLTPNFKSNFDLAEDAKLQLSKDTYDDDLDNLLAQIGDQYADLFLAAKNLSDAILLSDILRVNTEITKAPLSASMIKRYDEHHQDLTLLKALVRQQLPEKYKEIFFDQSKNGYAGYIDGGASQEEFYKFIKPILEKMDGTEELLVKLNREDLLRKQRTFDNGSIPHQIHLGELHAILRRQEDFYPFLKDNREKIEKILTFRIPYYVGPLARGNSRFAWMTRKSEETITPWNFEEVVDKGASAQSFIERMTNFDKNLPNEKVLPKHSLLYEYFTVYNELTKVKYVTEGMRKPAFLSGEQKKAIVDLLFKTNRKVTVKQLKEDYFKKIECFDSVEISGVEDRFNASLGTYHDLLKIIKDKDFLDNEENEDILEDIVLTLTLFEDREMIEERLKTYAHLFDDKVMKQLKRRRYTGWGRLSRKLINGIRDKQSGKTILDFLKSDGFANRNFMQLIHDDSLTFKEDIQKAQVSGQGDSLHEHIANLAGSPAIKKGILQTVKVVDELVKVMGRHKPENIVIEMARENQTTQKGQKNSRERMKRIEEGIKELGSQILKEHPVENTQLQNEKLYLYYLQNGRDMYVDQELDINRLSDYDVDHIVPQSFLKDDSIDNKVLTRSDKARGKSDNVPSEEVVKKMKNYWRQLLNAKLITQRKFDNLTKAERGGLSELDKAGFIKRQLVETRQITKHVAQILDSRMNTKYDENDKLIREVKVITLKSKLVSDFRKDFQFYKVREINNYHHAHDAYLNAVVGTALIKKYPKLESEFVYGDYKVYDVRKMIAKSEQEIGKATAKYFFYSNIMNFFKTEITLANGEIRKRPLIETNGETGEIVWDKGRDFATVRKVLSMPQVNIVKKTEVQTGGFSKESILPKRNSDKLIARKKDWDPKKYGGFDSPTVAYSVLVVAKVEKGKSKKLKSVKELLGITIMERSSFEKNPIDFLEAKGYKEVKKDLIIKLPKYSLFELENGRKRMLASAGELQKGNELALPSKYVNFLYLASHYEKLKGSPEDNEQKQLFVEQHKHYLDEIIEQISEFSKRVILADANLDKVLSAYNKHRDKPIREQAENIIHLFTLTNLGAPAAFKYFDTTIDRKRYTSTKEVLDATLIHQSITGLYETRIDLSQLGGDGGGGGGSGGTLNIEDEYRLHETSKEPDVPLGSTWLSDFPQAWAETGGMGLAVRQAPLIIPLKATSTPVSIKQYPMSQEARLGIKPHIQRLLDQGILVPCQSPWNTPLLPVKKPGTNDYRPVQDLREVNKRVEDIHPTVPNPYNLLSGLPPSHQWYTVLDLKDAFFCLRLHPTSQPLFAFEWRDPEMGISGQLTWTRLPQGFKNSPTLFNEALHRDLADFRIQHPDLILLQYVDDLLLAATSEQDCQRGTRALLQTLGNLGYRASAKKAQICQKQVKYLGYLLKEGQRWLTEARKETVMGQPTPKTPRQLREFLGKAGFCRLFIPGFAEMAAPLYPLTKPGTLFNWGPDQQKAYQEIKQALLTAPALGLPDLTKPFELFVDEKQGYAKGVLTQKLGPWRRPVAYLSKKLDPVAAGWPPCLRMVAAIAVLTKDAGKLTMGQPLVILAPHAVEALVKQPPDRWLSNARMTHYQAMLLDTDRVQFGPVVALNPATLLPLPEKEAPHDCLEILAETHGTRPDLTDQPIPDADYTWYTDGSSFLQEGQRRAGAAVTTETEVIWARALPAGTSAQRAELIALTQALKMAEGKKLNVYTDSRYAFATAHVHGEIYRRRGWLTSEGREIKNKNEILALLKALFLPKRLSIIHCPGHQKGNSAEARGNRMADQAAREAAMKAVLETSTLLAGKRTADGSEFEKRTADGSEFESPKKKAKVE

SEQ ID NO: 6118 - protein, 2101 aa, synthetic construct
MPAAKRVKLDGGDKKYSIGLDIGTNSVGWAVITDEYKVPSKKFKVLGNTDRHSIKKNLIGALLFDSGETAEATRLKRTARRRYTRRKNRICYLQEIFSNEMAKVDDSFFHRLEESFLVEEDKKHERHPIFGNIVDEVAYHEKYPTIYHLRKKLVDSTDKADLRLIYLALAHMIKFRGHFLIEGDLNPDNSDVDKLFIQLVQTYNQLFEENPINASGVDAKAILSARLSKSRRLENLIAQLPGEKKNGLFGNLIALSLGLTPNFKSNFDLAEDAKLQLSKDTYDDDLDNLLAQIGDQYADLFLAAKNLSDAILLSDILRVNTEITKAPLSASMIKRYDEHHQDLTLLKALVRQQLPEKYKEIFFDQSKNGYAGYIDGGASQEEFYKFIKPILEKMDGTEELLVKLNREDLLRKQRTFDNGSIPHQIHLGELHAILRRQEDFYPFLKDNREKIEKILTFRIPYYVGPLARGNSRFAWMTRKSEETITPWNFEEVVDKGASAQSFIERMTNFDKNLPNEKVLPKHSLLYEYFTVYNELTKVKYVTEGMRKPAFLSGEQKKAIVDLLFKTNRKVTVKQLKEDYFKKIECFDSVEISGVEDRFNASLGTYHDLLKIIKDKDFLDNEENEDILEDIVLTLTLFEDREMIEERLKTYAHLFDDKVMKQLKRRRYTGWGRLSRKLINGIRDKQSGKTILDFLKSDGFANRNFMQLIHDDSLTFKEDIQKAQVSGQGDSLHEHIANLAGSPAIKKGILQTVKVVDELVKVMGRHKPENIVIEMARENQTTQKGQKNSRERMKRIEEGIKELGSQILKEHPVENTQLQNEKLYLYYLQNGRDMYVDQELDINRLSDYDVDHIVPQSFLKDDSIDNKVLTRSDKARGKSDNVPSEEVVKKMKNYWRQLLNAKLITQRKFDNLTKAERGGLSELDKAGFIKRQLVETRQITKHVAQILDSRMNTKYDENDKLIREVKVITLKSKLVSDFRKDFQFYKVREINNYHHAHDAYLNAVVGTALIKKYPKLESEFVYGDYKVYDVRKMIAKSEQEIGKATAKYFFYSNIMNFFKTEITLANGEIRKRPLIETNGETGEIVWDKGRDFATVRKVLSMPQVNIVKKTEVQTGGFSKESILPKRNSDKLIARKKDWDPKKYGGFDSPTVAYSVLVVAKVEKGKSKKLKSVKELLGITIMERSSFEKNPIDFLEAKGYKEVKKDLIIKLPKYSLFELENGRKRMLASAGELQKGNELALPSKYVNFLYLASHYEKLKGSPEDNEQKQLFVEQHKHYLDEIIEQISEFSKRVILADANLDKVLSAYNKHRDKPIREQAENIIHLFTLTNLGAPAAFKYFDTTIDRKRYTSTKEVLDATLIHQSITGLYETRIDLSQLGGDGGGGGGSGGGGSGGTVSLQDEHRLFDIPVTTSLPDVWLQDFPQAWAETGGLGRAKCQAPIIIDLKPTAVPVSIKQYPMSLEAHMGIRQHIIKFLELGVLRPCRSPWNTPLLPVKKPGTQDYRPVQDLREINKRTVDIHPTVPNPYNLLSTLKPDYSWYTVLDLKDAFFCLPLAPQSQELFAFEWKDPERGISGQLTWTRLPQGFKNSPTLFNEALHRDLTDFRTQHPEVTLLQYVDDLLLAAPTKKACTQGTRHLLQELGEKGYRASAKKAQICQTKVTYLGYILSEGKRWLTPGRIETVARIPPPRNPREVREFLGKAGFCRLFIPGFAELAAPLYALTKPSTPFTWQTEHQLAFEALKKALLSAPALGLPDTSKPFTLFLDERQGIAKGVLTQKLGPWKRPVAYLSKKLDPVAAGWPPCLRIMAATAMLVKDSAKLTLGQPLTVITPHTLEAIVRQPPDRWITNARLTHYQALLLDTDRVQFGPPVTLNPATLLPVPENQPSPHDCRQVLAETHGTREDLKDQELPDADHTWYTDGSSYLDSGTRRAGAAVVDGHNTIWAQSLPPGTSAQKAELIALTKALELSKGKKANIYTDSRYAFATAHTHGSIYERRGWLTSEGKEIKNKAEIIALLKALFLPQEVAIIHCPGHQKGQDPVAVGNRQADRVARQAAMAEVLTLATEPDNTSHITAGKRTADGSEFEKRTADGSEFESPKKKAKVE

SEQ ID NO: 6119 - protein, 2175 aa, synthetic construct
MPAAKRVKLDGGDKKYSIGLDIGTNSVGWAVITDEYKVPSKKFKVLGNTDRHSIKKNLIGALLFDSGETAEATRLKRTARRRYTRRKNRICYLQEIFSNEMAKVDDSFFHRLEESFLVEEDKKHERHPIFGNIVDEVAYHEKYPTIYHLRKKLVDSTDKADLRLIYLALAHMIKFRGHFLIEGDLNPDNSDVDKLFIQLVQTYNQLFEENPINASGVDAKAILSARLSKSRRLENLIAQLPGEKKNGLFGNLIALSLGLTPNFKSNFDLAEDAKLQLSKDTYDDDLDNLLAQIGDQYADLFLAAKNLSDAILLSDILRVNTEITKAPLSASMIKRYDEHHQDLTLLKALVRQQLPEKYKEIFFDQSKNGYAGYIDGGASQEEFYKFIKPILEKMDGTEELLVKLNREDLLRKQRTFDNGSIPHQIHLGELHAILRRQEDFYPFLKDNREKIEKILTFRIPYYVGPLARGNSRFAWMTRKSEETITPWNFEEVVDKGASAQSFIERMTNFDKNLPNEKVLPKHSLLYEYFTVYNELTKVKYVTEGMRKPAFLSGEQKKAIVDLLFKTNRKVTVKQLKEDYFKKIECFDSVEISGVEDRFNASLGTYHDLLKIIKDKDFLDNEENEDILEDIVLTLTLFEDREMIEERLKTYAHLFDDKVMKQLKRRRYTGWGRLSRKLINGIRDKQSGKTILDFLKSDGFANRNFMQLIHDDSLTFKEDIQKAQVSGQGDSLHEHIANLAGSPAIKKGILQTVKVVDELVKVMGRHKPENIVIEMARENQTTQKGQKNSRERMKRIEEGIKELGSQILKEHPVENTQLQNEKLYLYYLQNGRDMYVDQELDINRLSDYDVDHIVPQSFLKDDSIDNKVLTRSDKARGKSDNVPSEEVVKKMKNYWRQLLNAKLITQRKFDNLTKAERGGLSELDKAGFIKRQLVETRQITKHVAQILDSRMNTKYDENDKLIREVKVITLKSKLVSDFRKDFQFYKVREINNYHHAHDAYLNAVVGTALIKKYPKLESEFVYGDYKVYDVRKMIAKSEQEIGKATAKYFFYSNIMNFFKTEITLANGEIRKRPLIETNGETGEIVWDKGRDFATVRKVLSMPQVNIVKKTEVQTGGFSKESILPKRNSDKLIARKKDWDPKKYGGFDSPTVAYSVLVVAKVEKGKSKKLKSVKELLGITIMERSSFEKNPIDFLEAKGYKEVKKDLIIKLPKYSLFELENGRKRMLASAGELQKGNELALPSKYVNFLYLASHYEKLKGSPEDNEQKQLFVEQHKHYLDEIIEQISEFSKRVILADANLDKVLSAYNKHRDKPIREQAENIIHLFTLTNLGAPAAFKYFDTTIDRKRYTSTKEVLDATLIHQSITGLYETRIDLSQLGGDGGGGGGSGGGGSGGMNPLQLLQPLPAEIKGTKLLAHWNSGATITCIPESFLEDEQPIKKTLIKTIHGEKQQNVYYVTFKVKGRKVEAEVIASPYEYILLSPTDVPWLTQQPLQLTILVPLQEYQEKILSKTALPEDQKQQLKTLFVKYDNLWQHWENQVGHRKIRPHNIATGDYPPRPQKQYPINPKAKPSIQIVIDDLLKQGVLTPQNSTMNTPVYPVPKPDGRWRMVLDYREVNKTIPLTAAQNQHSAGILATIVRQKYKTTLDLANGFWAHPITPESYWLTAFTWQGKQYCWTRLPQGFLNSPALFNADVVDLLKEIPNVQVYVDDIYLSHDDPKEHVQQLEKVFQILLQAGYVVSLKKSEIGQKTVEFLGFNITKEGRGLTDTFKTKLLNITPPKDLKQLQSILGKLNFARNFIPNFAELVQPLYNLIAPAKGKYIEWSEENTKQLNMVIEALNTASNLEERLPEQRLVIKVNTSPSAGYVRYYNETGKKPIMYLNYVFSKAELKFSMLEKLLTTMHKALIKAMDLAMGQEILVYSPIVSMTKIQKTPLPERKALPIRWITWMTYLEDPRIQFHYDKTLPELKHIPDVYTSSQSPVKHPSQYEGVFYTDGSAIKSPDPTKSNNAGMGIVHATYKPEYQVLNQWSIPLGNHTAQMAEIAAVEFACKKALKIPGPVLVITDSFYVAESANKELPYWKSNGFVNNKKKPLKHISKWKSIAECLSMKPDITIQHEKGISLQIPVFILKGNALADKLATQGSYVVNAGKRTADGSEFEKRTADGSEFESPKKKAKVE

SEQ ID NO: 6120 - protein, 2217 aa, synthetic construct
MPAAKRVKLDGGDKKYSIGLDIGTNSVGWAVITDEYKVPSKKFKVLGNTDRHSIKKNLIGALLFDSGETAEATRLKRTARRRYTRRKNRICYLQEIFSNEMAKVDDSFFHRLEESFLVEEDKKHERHPIFGNIVDEVAYHEKYPTIYHLRKKLVDSTDKADLRLIYLALAHMIKFRGHFLIEGDLNPDNSDVDKLFIQLVQTYNQLFEENPINASGVDAKAILSARLSKSRRLENLIAQLPGEKKNGLFGNLIALSLGLTPNFKSNFDLAEDAKLQLSKDTYDDDLDNLLAQIGDQYADLFLAAKNLSDAILLSDILRVNTEITKAPLSASMIKRYDEHHQDLTLLKALVRQQLPEKYKEIFFDQSKNGYAGYIDGGASQEEFYKFIKPILEKMDGTEELLVKLNREDLLRKQRTFDNGSIPHQIHLGELHAILRRQEDFYPFLKDNREKIEKILTFRIPYYVGPLARGNSRFAWMTRKSEETITPWNFEEVVDKGASAQSFIERMTNFDKNLPNEKVLPKHSLLYEYFTVYNELTKVKYVTEGMRKPAFLSGEQKKAIVDLLFKTNRKVTVKQLKEDYFKKIECFDSVEISGVEDRFNASLGTYHDLLKIIKDKDFLDNEENEDILEDIVLTLTLFEDREMIEERLKTYAHLFDDKVMKQLKRRRYTGWGRLSRKLINGIRDKQSGKTILDFLKSDGFANRNFMQLIHDDSLTFKEDIQKAQVSGQGDSLHEHIANLAGSPAIKKGILQTVKVVDELVKVMGRHKPENIVIEMARENQTTQKGQKNSRERMKRIEEGIKELGSQILKEHPVENTQLQNEKLYLYYLQNGRDMYVDQELDINRLSDYDVDHIVPQSFLKDDSIDNKVLTRSDKARGKSDNVPSEEVVKKMKNYWRQLLNAKLITQRKFDNLTKAERGGLSELDKAGFIKRQLVETRQITKHVAQILDSRMNTKYDENDKLIREVKVITLKSKLVSDFRKDFQFYKVREINNYHHAHDAYLNAVVGTALIKKYPKLESEFVYGDYKVYDVRKMIAKSEQEIGKATAKYFFYSNIMNFFKTEITLANGEIRKRPLIETNGETGEIVWDKGRDFATVRKVLSMPQVNIVKKTEVQTGGFSKESILPKRNSDKLIARKKDWDPKKYGGFDSPTVAYSVLVVAKVEKGKSKKLKSVKELLGITIMERSSFEKNPIDFLEAKGYKEVKKDLIIKLPKYSLFELENGRKRMLASAGELQKGNELALPSKYVNFLYLASHYEKLKGSPEDNEQKQLFVEQHKHYLDEIIEQISEFSKRVILADANLDKVLSAYNKHRDKPIREQAENIIHLFTLTNLGAPAAFKYFDTTIDRKRYTSTKEVLDATLIHQSITGLYETRIDLSQLGGDGGGGGGSGGGGSGGTLGDQGSRGSDPLPEPRVTLTVEGIPTEFLVNTGAEHSVLTKPMGKMGSKRTVVAGATGSKVYPWTTKRLLKIGQKQVTHSFLVIPECPAPLLGRDLLTKLKAQIQFSTEGPQVTWEDRPAMCLVLNLEEEYRLHEKPVPPSIDPSWLQLFPMVWAEKAGMGLANQVPPVVVELKSDASPVAVRQYPMSKEAREGIRPHIQRFLDLGILVPCQSPWNTPLLPVKKPGTNDYRPVQDLREVNKRVQDIHPTVPNPYNLLSSLPPSHTWYSVLDLKDAFFCLKLHPNSQPLFAFEWRDPEKGNTGQLTWTRLPQGFKNSPTLFDEALHRDLASFRALNPQVVMLQYVDDLLVAAPTYRDCKEGTRRLLQELSKLGYRVSAKKAQLCREEVTYLGYLLKGGKRWLTPARKATVMKIPTPTTPRQVREFLGTAGFCRLWIPGFASLAAPLYPLTREKVPFTWTEAHQEAFGRIKEALLSAPALALPDLTKPFALYVDEKEGVARGVLTQTLGPWRRPVAYLSKKLDPVASGWPTCLKAIAAVALLLKDADKLTLGQNVLVIAPHNLESIVRQPPDRWMTNARMTHYQSLLLNERVSFAPPAILNPATLLPVESDDTPIHICSEILAEETGTRPDLRDQPLPGVPAWYTDGSSFIMDGRRQAGAAIVDNKRTVWASNLPEGTSAQKAELIALTQALRLAEGKSINIYTDSRYAFATAHVHGAIYKQRGLLTSAGKDIKNKEEILALLEAIHLPKRVAIIHCPGHQRGTDPVATGNRKADEAAKQAAQSTRILTETTKNAGKRTADGSEFEKRTADGSEFESPKKKAKVE

SEQ ID NO: 6121 - protein, 2126 aa, synthetic construct
MPAAKRVKLDGGDKKYSIGLDIGTNSVGWAVITDEYKVPSKKFKVLGNTDRHSIKKNLIGALLFDSGETAEATRLKRTARRRYTRRKNRICYLQEIFSNEMAKVDDSFFHRLEESFLVEEDKKHERHPIFGNIVDEVAYHEKYPTIYHLRKKLVDSTDKADLRLIYLALAHMIKFRGHFLIEGDLNPDNSDVDKLFIQLVQTYNQLFEENPINASGVDAKAILSARLSKSRRLENLIAQLPGEKKNGLFGNLIALSLGLTPNFKSNFDLAEDAKLQLSKDTYDDDLDNLLAQIGDQYADLFLAAKNLSDAILLSDILRVNTEITKAPLSASMIKRYDEHHQDLTLLKALVRQQLPEKYKEIFFDQSKNGYAGYIDGGASQEEFYKFIKPILEKMDGTEELLVKLNREDLLRKQRTFDNGSIPHQIHLGELHAILRRQEDFYPFLKDNREKIEKILTFRIPYYVGPLARGNSRFAWMTRKSEETITPWNFEEVVDKGASAQSFIERMTNFDKNLPNEKVLPKHSLLYEYFTVYNELTKVKYVTEGMRKPAFLSGEQKKAIVDLLFKTNRKVTVKQLKEDYFKKIECFDSVEISGVEDRFNASLGTYHDLLKIIKDKDFLDNEENEDILEDIVLTLTLFEDREMIEERLKTYAHLFDDKVMKQLKRRRYTGWGRLSRKLINGIRDKQSGKTILDFLKSDGFANRNFMQLIHDDSLTFKEDIQKAQVSGQGDSLHEHIANLAGSPAIKKGILQTVKVVDELVKVMGRHKPENIVIEMARENQTTQKGQKNSRERMKRIEEGIKELGSQILKEHPVENTQLQNEKLYLYYLQNGRDMYVDQELDINRLSDYDVDHIVPQSFLKDDSIDNKVLTRSDKARGKSDNVPSEEVVKKMKNYWRQLLNAKLITQRKFDNLTKAERGGLSELDKAGFIKRQLVETRQITKHVAQILDSRMNTKYDENDKLIREVKVITLKSKLVSDFRKDFQFYKVREINNYHHAHDAYLNAVVGTALIKKYPKLESEFVYGDYKVYDVRKMIAKSEQEIGKATAKYFFYSNIMNFFKTEITLANGEIRKRPLIETNGETGEIVWDKGRDFATVRKVLSMPQVNIVKKTEVQTGGFSKESILPKRNSDKLIARKKDWDPKKYGGFDSPTVAYSVLVVAKVEKGKSKKLKSVKELLGITIMERSSFEKNPIDFLEAKGYKEVKKDLIIKLPKYSLFELENGRKRMLASAGELQKGNELALPSKYVNFLYLASHYEKLKGSPEDNEQKQLFVEQHKHYLDEIIEQISEFSKRVILADANLDKVLSAYNKHRDKPIREQAENIIHLFTLTNLGAPAAFKYFDTTIDRKRYTSTKEVLDATLIHQSITGLYETRIDLSQLGGDGGGGGGSGGGGSGGLLGRDLLTKLKAQIQFSTEGPQVTWEDRPAMCLVLNLEEEYRLHEKPVPPSIDPSWLQLFPMVWAEKAGMGLANQVPPVVVELKSDASPVAVRQYPMSKEAREGIRPHIQRFLDLGILVPCQSPWNTPLLPVKKPGTNDYRPVQDLREVNKRVQDIHPTVPNPYNLLSSLPPSHTWYSVLDLKDAFFCLKLHPNSQPLFAFEWRDPEKGNTGQLTWTRLPQGFKNSPTLFNEALHRDLASFRALNPQVVMLQYVDDLLVAAPTYRDCKEGTRRLLQELSKLGYRVSAKKAQLCREEVTYLGYLLKGGKRWLTPARKATVMKIPTPTTPRQVREFLGTAGFCRLWIPGFASLAAPLYPLTRPKVPFTWTEAHQEAFGRIKEALLSAPALALPDLTKPFALYVDEKEGVARGVLTQTLGPWRRPVAYLSKKLDPVASGWPTCLKAIAAVALLLKDADKLTLGQNVLVIAPHNLESIVRQPPDRWMTNARMTHYQSLLLNERVSFAPPAILNPATLLPVESDDTPIHICSEILAEETGTRPDLRDQPLPGVPAWYTDGSSFIMDGRRQAGAAIVDNKRTVWASNLPEGTSAQKAELIALTQALRLAEGKSINIYTDSRYAFATAHVHGAIYKQRGWLTSAGKDIKNKEEILALLEAIHLPKRVAIIHCPGHQRGTDPVATGNRKADEAAKQAAQSTRILTETTKNAGKRTADGSEFEKRTADGSEFESPKKKAKVE

SEQ ID NO: 6122 - protein, 2217 aa, synthetic construct
MPAAKRVKLDGGDKKYSIGLDIGTNSVGWAVITDEYKVPSKKFKVLGNTDRHSIKKNLIGALLFDSGETAEATRLKRTARRRYTRRKNRICYLQEIFSNEMAKVDDSFFHRLEESFLVEEDKKHERHPIFGNIVDEVAYHEKYPTIYHLRKKLVDSTDKADLRLIYLALAHMIKFRGHFLIEGDLNPDNSDVDKLFIQLVQTYNQLFEENPINASGVDAKAILSARLSKSRRLENLIAQLPGEKKNGLFGNLIALSLGLTPNFKSNFDLAEDAKLQLSKDTYDDDLDNLLAQIGDQYADLFLAAKNLSDAILLSDILRVNTEITKAPLSASMIKRYDEHHQDLTLLKALVRQQLPEKYKEIFFDQSKNGYAGYIDGGASQEEFYKFIKPILEKMDGTEELLVKLNREDLLRKQRTFDNGSIPHQIHLGELHAILRRQEDFYPFLKDNREKIEKILTFRIPYYVGPLARGNSRFAWMTRKSEETITPWNFEEVVDKGASAQSFIERMTNFDKNLPNEKVLPKHSLLYEYFTVYNELTKVKYVTEGMRKPAFLSGEQKKAIVDLLFKTNRKVTVKQLKEDYFKKIECFDSVEISGVEDRFNASLGTYHDLLKIIKDKDFLDNEENEDILEDIVLTLTLFEDREMIEERLKTYAHLFDDKVMKQLKRRRYTGWGRLSRKLINGIRDKQSGKTILDFLKSDGFANRNFMQLIHDDSLTFKEDIQKAQVSGQGDSLHEHIANLAGSPAIKKGILQTVKVVDELVKVMGRHKPENIVIEMARENQTTQKGQKNSRERMKRIEEGIKELGSQILKEHPVENTQLQNEKLYLYYLQNGRDMYVDQELDINRLSDYDVDHIVPQSFLKDDSIDNKVLTRSDKARGKSDNVPSEEVVKKMKNYWRQLLNAKLITQRKFDNLTKAERGGLSELDKAGFIKRQLVETRQITKHVAQILDSRMNTKYDENDKLIREVKVITLKSKLVSDFRKDFQFYKVREINNYHHAHDAYLNAVVGTALIKKYPKLESEFVYGDYKVYDVRKMIAKSEQEIGKATAKYFFYSNIMNFFKTEITLANGEIRKRPLIETNGETGEIVWDKGRDFATVRKVLSMPQVNIVKKTEVQTGGFSKESILPKRNSDKLIARKKDWDPKKYGGFDSPTVAYSVLVVAKVEKGKSKKLKSVKELLGITIMERSSFEKNPIDFLEAKGYKEVKKDLIIKLPKYSLFELENGRKRMLASAGELQKGNELALPSKYVNFLYLASHYEKLKGSPEDNEQKQLFVEQHKHYLDEIIEQISEFSKRVILADANLDKVLSAYNKHRDKPIREQAENIIHLFTLTNLGAPAAFKYFDTTIDRKRYTSTKEVLDATLIHQSITGLYETRIDLSQLGGDGGGGGGSGGGGSGGTLGDQGSRGSDPLPEPRVTLTVEGIPTEFLVNTGAEHSVLTKPMGKMGSKRTVVAGATGSKVYPWTTKRLLKIGQKQVTHSFLVIPECPAPLLGRDLLTKLKAQIQFSTEGPQVTWEDRPAMCLVLNLEEEYRLHEKPVPPSIDPSWLQLFPMVWAEKAGMGLANQVPPVVVELKSDASPVAVRQYPMSKEAREGIRPHIQRFLDLGILVPCQSPWNTPLLPVKKPGTNDYRPVQDLREVNKRVQDIHPTVPNPYNLLSSLPPSHTWYSVLDLKDAFFCLKLHPNSQPLFAFEWRDPEKGNTGQLTWTRLPQGFKNSPTLFNEALHRDLASFRALNPQVVMLQYVDDLLVAAPTYRDCKEGTRRLLQELSKLGYRVSAKKAQLCREEVTYLGYLLKGGKRWLTPARKATVMKIPTPTTPRQVREFLGTAGFCRLWIPGFASLAAPLYPLTRPKVPFTWTEAHQEAFGRIKEALLSAPALALPDLTKPFALYVDEKEGVARGVLTQTLGPWRRPVAYLSKKLDPVASGWPTCLKAIAAVALLLKDADKLTLGQNVLVIAPHNLESIVRQPPDRWMTNARMTHYQSLLLNERVSFAPPAILNPATLLPVESDDTPIHICSEILAEETGTRPDLRDQPLPGVPAWYTDGSSFIMDGRRQAGAAIVDNKRTVWASNLPEGTSAQKAELIALTQALRLAEGKSINIYTDSRYAFATAHVHGAIYKQRGWLTSAGKDIKNKEEILALLEAIHLPKRVAIIHCPGHQRGTDPVATGNRKADEAAKQAAQSTRILTETTKNAGKRTADGSEFEKRTADGSEFESPKKKAKVE

SEQ ID NO: 6123 - protein, 2217 aa, synthetic construct
MPAAKRVKLDGGDKKYSIGLDIGTNSVGWAVITDEYKVPSKKFKVLGNTDRHSIKKNLIGALLFDSGETAEATRLKRTARRRYTRRKNRICYLQEIFSNEMAKVDDSFFHRLEESFLVEEDKKHERHPIFGNIVDEVAYHEKYPTIYHLRKKLVDSTDKADLRLIYLALAHMIKFRGHFLIEGDLNPDNSDVDKLFIQLVQTYNQLFEENPINASGVDAKAILSARLSKSRRLENLIAQLPGEKKNGLFGNLIALSLGLTPNFKSNFDLAEDAKLQLSKDTYDDDLDNLLAQIGDQYADLFLAAKNLSDAILLSDILRVNTEITKAPLSASMIKRYDEHHQDLTLLKALVRQQLPEKYKEIFFDQSKNGYAGYIDGGASQEEFYKFIKPILEKMDGTEELLVKLNREDLLRKQRTFDNGSIPHQIHLGELHAILRRQEDFYPFLKDNREKIEKILTFRIPYYVGPLARGNSRFAWMTRKSEETITPWNFEEVVDKGASAQSFIERMTNFDKNLPNEKVLPKHSLLYEYFTVYNELTKVKYVTEGMRKPAFLSGEQKKAIVDLLFKTNRKVTVKQLKEDYFKKIECFDSVEISGVEDRFNASLGTYHDLLKIIKDKDFLDNEENEDILEDIVLTLTLFEDREMIEERLKTYAHLFDDKVMKQLKRRRYTGWGRLSRKLINGIRDKQSGKTILDFLKSDGFANRNFMQLIHDDSLTFKEDIQKAQVSGQGDSLHEHIANLAGSPAIKKGILQTVKVVDELVKVMGRHKPENIVIEMARENQTTQKGQKNSRERMKRIEEGIKELGSQILKEHPVENTQLQNEKLYLYYLQNGRDMYVDQELDINRLSDYDVDHIVPQSFLKDDSIDNKVLTRSDKARGKSDNVPSEEVVKKMKNYWRQLLNAKLITQRKFDNLTKAERGGLSELDKAGFIKRQLVETRQITKHVAQILDSRMNTKYDENDKLIREVKVITLKSKLVSDFRKDFQFYKVREINNYHHAHDAYLNAVVGTALIKKYPKLESEFVYGDYKVYDVRKMIAKSEQEIGKATAKYFFYSNIMNFFKTEITLANGEIRKRPLIETNGETGEIVWDKGRDFATVRKVLSMPQVNIVKKTEVQTGGFSKESILPKRNSDKLIARKKDWDPKKYGGFDSPTVAYSVLVVAKVEKGKSKKLKSVKELLGITIMERSSFEKNPIDFLEAKGYKEVKKDLIIKLPKYSLFELENGRKRMLASAGELQKGNELALPSKYVNFLYLASHYEKLKGSPEDNEQKQLFVEQHKHYLDEIIEQISEFSKRVILADANLDKVLSAYNKHRDKPIREQAENIIHLFTLTNLGAPAAFKYFDTTIDRKRYTSTKEVLDATLIHQSITGLYETRIDLSQLGGDGGGGGGSGGGGSGGTLGDQGSRGSDPLPEPRVTLTVEGIPTEFLVNTGAEHSVLTKPMGKMGSKRTVVAGATGSKVYPWTTKRLLKIGQKQVTHSFLVIPECPAPLLGRDLLTKLKAQIQFSTEGPQVTWEDRPAMCLVLNLEEEYRLHEKPVPPSIDPSWLQLFPMVWAEKAGMGLANQVPPVVVELKSDASPVAVRQYPMSKEAREGIRPHIQRFLDLGILVPCQSPWNTPLLPVKKPGTNDYRPVQDLREVNKRVQDIHPTVPNPYNLLSSLPPSHTWYSVLDLKDAFFCLKLHPNSQPLFAFEWRDPEKGNTGQLTWTRLPQGFKNSPTLFNEALHRDLASFRALNPQVVMLQYVDDLLVAAPTYRDCKEGTRRLLQELSKLGYRVSAKKAQLCREEVTYLGYLLKGGKRWLTPARKATVMKIPTPTTPRQVREFLGKAGFCRLFIPGFASLAAPLYPLTRPKVPFTWTEAHQEAFGRIKEALLSAPALALPDLTKPFALYVDEKEGVARGVLTQTLGPWRRPVAYLSKKLDPVASGWPTCLKAIAAVALLLKDADKLTLGQNVLVIAPHNLESIVRQPPDRWMTNARMTHYQSLLLNERVSFAPPAILNPATLLPVESDDTPIHICSEILAEETGTRPDLRDQPLPGVPAWYTDGSSFIMDGRRQAGAAIVDNKRTVWASNLPEGTSAQKAELIALTQALRLAEGKSINIYTDSRYAFATAHVHGAIYKQRGWLTSAGKDIKNKEEILALLEAIHLPKRVAIIHCPGHQRGTDPVATGNRKADEAAKQAAQSTRILTETTKNAGKRTADGSEFEKRTADGSEFESPKKKAKVE

SEQ ID NO: 6124 - protein, 2095 aa, synthetic construct
MPAAKRVKLDGGDKKYSIGLDIGTNSVGWAVITDEYKVPSKKFKVLGNTDRHSIKKNLIGALLFDSGETAEATRLKRTARRRYTRRKNRICYLQEIFSNEMAKVDDSFFHRLEESFLVEEDKKHERHPIFGNIVDEVAYHEKYPTIYHLRKKLVDSTDKADLRLIYLALAHMIKFRGHFLIEGDLNPDNSDVDKLFIQLVQTYNQLFEENPINASGVDAKAILSARLSKSRRLENLIAQLPGEKKNGLFGNLIALSLGLTPNFKSNFDLAEDAKLQLSKDTYDDDLDNLLAQIGDQYADLFLAAKNLSDAILLSDILRVNTEITKAPLSASMIKRYDEHHQDLTLLKALVRQQLPEKYKEIFFDQSKNGYAGYIDGGASQEEFYKFIKPILEKMDGTEELLVKLNREDLLRKQRTFDNGSIPHQIHLGELHAILRRQEDFYPFLKDNREKIEKILTFRIPYYVGPLARGNSRFAWMTRKSEETITPWNFEEVVDKGASAQSFIERMTNFDKNLPNEKVLPKHSLLYEYFTVYNELTKVKYVTEGMRKPAFLSGEQKKAIVDLLFKTNRKVTVKQLKEDYFKKIECFDSVEISGVEDRFNASLGTYHDLLKIIKDKDFLDNEENEDILEDIVLTLTLFEDREMIEERLKTYAHLFDDKVMKQLKRRRYTGWGRLSRKLINGIRDKQSGKTILDFLKSDGFANRNFMQLIHDDSLTFKEDIQKAQVSGQGDSLHEHIANLAGSPAIKKGILQTVKVVDELVKVMGRHKPENIVIEMARENQTTQKGQKNSRERMKRIEEGIKELGSQILKEHPVENTQLQNEKLYLYYLQNGRDMYVDQELDINRLSDYDVDHIVPQSFLKDDSIDNKVLTRSDKARGKSDNVPSEEVVKKMKNYWRQLLNAKLITQRKFDNLTKAERGGLSELDKAGFIKRQLVETRQITKHVAQILDSRMNTKYDENDKLIREVKVITLKSKLVSDFRKDFQFYKVREINNYHHAHDAYLNAVVGTALIKKYPKLESEFVYGDYKVYDVRKMIAKSEQEIGKATAKYFFYSNIMNFFKTEITLANGEIRKRPLIETNGETGEIVWDKGRDFATVRKVLSMPQVNIVKKTEVQTGGFSKESILPKRNSDKLIARKKDWDPKKYGGFDSPTVAYSVLVVAKVEKGKSKKLKSVKELLGITIMERSSFEKNPIDFLEAKGYKEVKKDLIIKLPKYSLFELENGRKRMLASAGELQKGNELALPSKYVNFLYLASHYEKLKGSPEDNEQKQLFVEQHKHYLDEIIEQISEFSKRVILADANLDKVLSAYNKHRDKPIREQAENIIHLFTLTNLGAPAAFKYFDTTIDRKRYTSTKEVLDATLIHQSITGLYETRIDLSQLGGDGGGGGGSGGGGSGGTLNLEDEYRLYETSAEPEVSPGSTWLSDFPQAWAETGGMGLAVRQAPLIIPLKATSTPVSIKQYPMSQEAKLGIKPHIQRLLDQGILVPCQSPWNTPLLPVKKPGTNDYRPVQDLREVNKRVEDIHPTVPNPYNLLSGLPPSHRWYTVLDLKDAFFCLRLHPTSQPLFAFEWRDPGMGISGQLTWTRLPQGFKNSPTLFNEALHRDLADFRIQHPDLILLQYVDDILLAATSELDCQQGTRALLLTLGNLGYRASAKKAQLCQKQVKYLGYLLKEGQRWLTEARKETVMGQPTPKTPRQLREFLGTAGFCRLWIPGFAEMAAPLYPLTKPGTLFNWGPDQQKAYQEIKQALLTAPALGLPDLTKPFELFVDEKQGYAKGVLTQKLGPWRRPVAYLSKKLDPVAAGWPPCLRMVAAIAVLRKDAGKLTMGQPLVILAPHAVEALVKQPPDRWLSNARMTHYQAMLLDTDRVQFGPVVALNPATLLPLPEEGAPHDCLEILAETHGTRPDLTDQPIPDADHTWYTDGSSFLQEGQRKAGAAVTTETEVIWARALPAGTSAQRAELIALTQALKMAEGKRLNVYTDSRYAFATAHIHGEIYRRRGWLTSEGREIKNKSEILALLKALFLPKRLSIIHCLGHQKGDSAEARGNRLADQAAREAAIKTPPDTSTLLAGKRTADGSEFEKRTADGSEFESPKKKAKVE

SEQ ID NO: 6125 - protein, 2095 aa, synthetic construct
MPAAKRVKLDGGDKKYSIGLDIGTNSVGWAVITDEYKVPSKKFKVLGNTDRHSIKKNLIGALLFDSGETAEATRLKRTARRRYTRRKNRICYLQEIFSNEMAKVDDSFFHRLEESFLVEEDKKHERHPIFGNIVDEVAYHEKYPTIYHLRKKLVDSTDKADLRLIYLALAHMIKFRGHFLIEGDLNPDNSDVDKLFIQLVQTYNQLFEENPINASGVDAKAILSARLSKSRRLENLIAQLPGEKKNGLFGNLIALSLGLTPNFKSNFDLAEDAKLQLSKDTYDDDLDNLLAQIGDQYADLFLAAKNLSDAILLSDILRVNTEITKAPLSASMIKRYDEHHQDLTLLKALVRQQLPEKYKEIFFDQSKNGYAGYIDGGASQEEFYKFIKPILEKMDGTEELLVKLNREDLLRKQRTFDNGSIPHQIHLGELHAILRRQEDFYPFLKDNREKIEKILTFRIPYYVGPLARGNSRFAWMTRKSEETITPWNFEEVVDKGASAQSFIERMTNFDKNLPNEKVLPKHSLLYEYFTVYNELTKVKYVTEGMRKPAFLSGEQKKAIVDLLFKTNRKVTVKQLKEDYFKKIECFDSVEISGVEDRFNASLGTYHDLLKIIKDKDFLDNEENEDILEDIVLTLTLFEDREMIEERLKTYAHLFDDKVMKQLKRRRYTGWGRLSRKLINGIRDKQSGKTILDFLKSDGFANRNFMQLIHDDSLTFKEDIQKAQVSGQGDSLHEHIANLAGSPAIKKGILQTVKVVDELVKVMGRHKPENIVIEMARENQTTQKGQKNSRERMKRIEEGIKELGSQILKEHPVENTQLQNEKLYLYYLQNGRDMYVDQELDINRLSDYDVDHIVPQSFLKDDSIDNKVLTRSDKARGKSDNVPSEEVVKKMKNYWRQLLNAKLITQRKFDNLTKAERGGLSELDKAGFIKRQLVETRQITKHVAQILDSRMNTKYDENDKLIREVKVITLKSKLVSDFRKDFQFYKVREINNYHHAHDAYLNAVVGTALIKKYPKLESEFVYGDYKVYDVRKMIAKSEQEIGKATAKYFFYSNIMNFFKTEITLANGEIRKRPLIETNGETGEIVWDKGRDFATVRKVLSMPQVNIVKKTEVQTGGFSKESILPKRNSDKLIARKKDWDPKKYGGFDSPTVAYSVLVVAKVEKGKSKKLKSVKELLGITIMERSSFEKNPIDFLEAKGYKEVKKDLIIKLPKYSLFELENGRKRMLASAGELQKGNELALPSKYVNFLYLASHYEKLKGSPEDNEQKQLFVEQHKHYLDEIIEQISEFSKRVILADANLDKVLSAYNKHRDKPIREQAENIIHLFTLTNLGAPAAFKYFDTTIDRKRYTSTKEVLDATLIHQSITGLYETRIDLSQLGGDGGGGGGSGGGGSGGTLNLEDEYRLYETSAEPEVSPGSTWLSDFPQAWAETGGMGLAVRQAPLIIPLKATSTPVSIKQYPMSQEAKLGIKPHIQRLLDQGILVPCQSPWNTPLLPVKKPGTNDYRPVQDLREVNKRVEDIHPTVPNPYNLLSGLPPSHRWYTVLDLKDAFFCLRLHPTSQPLFAFEWRDPGMGISGQLTWTRLPQGFKNSPTLFNEALHRDLADFRIQHPDLILLQYVDDILLAATSELDCQQGTRALLLTLGNLGYRASAKKAQLCQKQVKYLGYLLKEGQRWLTEARKETVMGQPTPKTPRQLREFLGKAGFCRLFIPGFAEMAAPLYPLTKPGTLFNWGPDQQKAYQEIKQALLTAPALGLPDLTKPFELFVDEKQGYAKGVLTQKLGPWRRPVAYLSKKLDPVAAGWPPCLRMVAAIAVLRKDAGKLTMGQPLVILAPHAVEALVKQPPDRWLSNARMTHYQAMLLDTDRVQFGPVVALNPATLLPLPEEGAPHDCLEILAETHGTRPDLTDQPIPDADHTWYTDGSSFLQEGQRKAGAAVTTETEVIWARALPAGTSAQRAELIALTQALKMAEGKRLNVYTDSRYAFATAHIHGEIYRRRGWLTSEGREIKNKSEILALLKALFLPKRLSIIHCLGHQKGDSAEARGNRLADQAAREAAIKTPPDTSTLLAGKRTADGSEFEKRTADGSEFESPKKKAKVE

SEQ ID NO: 6126 - protein, 2095 aa, synthetic construct
MPAAKRVKLDGGDKKYSIGLDIGTNSVGWAVITDEYKVPSKKFKVLGNTDRHSIKKNLIGALLFDSGETAEATRLKRTARRRYTRRKNRICYLQEIFSNEMAKVDDSFFHRLEESFLVEEDKKHERHPIFGNIVDEVAYHEKYPTIYHLRKKLVDSTDKADLRLIYLALAHMIKFRGHFLIEGDLNPDNSDVDKLFIQLVQTYNQLFEENPINASGVDAKAILSARLSKSRRLENLIAQLPGEKKNGLFGNLIALSLGLTPNFKSNFDLAEDAKLQLSKDTYDDDLDNLLAQIGDQYADLFLAAKNLSDAILLSDILRVNTEITKAPLSASMIKRYDEHHQDLTLLKALVRQQLPEKYKEIFFDQSKNGYAGYIDGGASQEEFYKFIKPILEKMDGTEELLVKLNREDLLRKQRTFDNGSIPHQIHLGELHAILRRQEDFYPFLKDNREKIEKILTFRIPYYVGPLARGNSRFAWMTRKSEETITPWNFEEVVDKGASAQSFIERMTNFDKNLPNEKVLPKHSLLYEYFTVYNELTKVKYVTEGMRKPAFLSGEQKKAIVDLLFKTNRKVTVKQLKEDYFKKIECFDSVEISGVEDRFNASLGTYHDLLKIIKDKDFLDNEENEDILEDIVLTLTLFEDREMIEERLKTYAHLFDDKVMKQLKRRRYTGWGRLSRKLINGIRDKQSGKTILDFLKSDGFANRNFMQLIHDDSLTFKEDIQKAQVSGQGDSLHEHIANLAGSPAIKKGILQTVKVVDELVKVMGRHKPENIVIEMARENQTTQKGQKNSRERMKRIEEGIKELGSQILKEHPVENTQLQNEKLYLYYLQNGRDMYVDQELDINRLSDYDVDHIVPQSFLKDDSIDNKVLTRSDKARGKSDNVPSEEVVKKMKNYWRQLLNAKLITQRKFDNLTKAERGGLSELDKAGFIKRQLVETRQITKHVAQILDSRMNTKYDENDKLIREVKVITLKSKLVSDFRKDFQFYKVREINNYHHAHDAYLNAVVGTALIKKYPKLESEFVYGDYKVYDVRKMIAKSEQEIGKATAKYFFYSNIMNFFKTEITLANGEIRKRPLIETNGETGEIVWDKGRDFATVRKVLSMPQVNIVKKTEVQTGGFSKESILPKRNSDKLIARKKDWDPKKYGGFDSPTVAYSVLVVAKVEKGKSKKLKSVKELLGITIMERSSFEKNPIDFLEAKGYKEVKKDLIIKLPKYSLFELENGRKRMLASAGELQKGNELALPSKYVNFLYLASHYEKLKGSPEDNEQKQLFVEQHKHYLDEIIEQISEFSKRVILADANLDKVLSAYNKHRDKPIREQAENIIHLFTLTNLGAPAAFKYFDTTIDRKRYTSTKEVLDATLIHQSITGLYETRIDLSQLGGDGGGGGGSGGGGSGGTLGIEDEYRLHETSTEPDVSLGSTWLSDFPQAWAETGGMGLAVRQAPLIIPLKATSTPVSIQQYPMSHEARLGIKPHIQRLLDQGILVPCQSPWNTPLLPVKKPGTNDYRPVQDLREVNKRVEDIHPTVPNPYNLLSGLPPSHQWYTVLDLKDAFFCLRLHPTSQPLFAFEWRDPGMGISGQLTWTRLPQGFKNSPTLFNEALHRDLADFRIQHPDLILLQYVDDILLAATSELDCQQGTRALLQTLGDLGYRASAKKAQICQKQVKYLGYLLREGQRWLTEARKETVMGQPVPKTPRQLREFLGTAGFCRLWIPGFAEMAAPLYPLTKPGTLFSWGPDQQKAYQEIKQALLTAPALGLPDLTKPFELFVDEKQGYAKGVLTQKLGPWRRPVAYLSKKLDPVAAGWPPCLRMVAAIAVLTKDAGKLTMGQPLVILAPHAVEALVKQPPDRWLSNARMTHYQAMLLDTDRVQFGPVVALNPATLLPLPEEGAPHDCLEILAETHGTRPDLTDQPIPDADHTWYTDGSSFLQEGQRKAGAAVTTETEVIWAGALPAGTSAQRAELIALTQALKMAEGKRLNVYTDSRYAFATAHIHGEIYRRRGWLTSEGREIKNKSEILALLKALFLPKRLSIIHCLGHQKGDSAEARGNRLADQAAREAAIKTPPDTSTLLAGKRTADGSEFEKRTADGSEFESPKKKAKVE

SEQ ID NO: 6127 - protein, 2095 aa, synthetic construct
MPAAKRVKLDGGDKKYSIGLDIGTNSVGWAVITDEYKVPSKKFKVLGNTDRHSIKKNLIGALLFDSGETAEATRLKRTARRRYTRRKNRICYLQEIFSNEMAKVDDSFFHRLEESFLVEEDKKHERHPIFGNIVDEVAYHEKYPTIYHLRKKLVDSTDKADLRLIYLALAHMIKFRGHFLIEGDLNPDNSDVDKLFIQLVQTYNQLFEENPINASGVDAKAILSARLSKSRRLENLIAQLPGEKKNGLFGNLIALSLGLTPNFKSNFDLAEDAKLQLSKDTYDDDLDNLLAQIGDQYADLFLAAKNLSDAILLSDILRVNTEITKAPLSASMIKRYDEHHQDLTLLKALVRQQLPEKYKEIFFDQSKNGYAGYIDGGASQEEFYKFIKPILEKMDGTEELLVKLNREDLLRKQRTFDNGSIPHQIHLGELHAILRRQEDFYPFLKDNREKIEKILTFRIPYYVGPLARGNSRFAWMTRKSEETITPWNFEEVVDKGASAQSFIERMTNFDKNLPNEKVLPKHSLLYEYFTVYNELTKVKYVTEGMRKPAFLSGEQKKAIVDLLFKTNRKVTVKQLKEDYFKKIECFDSVEISGVEDRFNASLGTYHDLLKIIKDKDFLDNEENEDILEDIVLTLTLFEDREMIEERLKTYAHLFDDKVMKQLKRRRYTGWGRLSRKLINGIRDKQSGKTILDFLKSDGFANRNFMQLIHDDSLTFKEDIQKAQVSGQGDSLHEHIANLAGSPAIKKGILQTVKVVDELVKVMGRHKPENIVIEMARENQTTQKGQKNSRERMKRIEEGIKELGSQILKEHPVENTQLQNEKLYLYYLQNGRDMYVDQELDINRLSDYDVDHIVPQSFLKDDSIDNKVLTRSDKARGKSDNVPSEEVVKKMKNYWRQLLNAKLITQRKFDNLTKAERGGLSELDKAGFIKRQLVETRQITKHVAQILDSRMNTKYDENDKLIREVKVITLKSKLVSDFRKDFQFYKVREINNYHHAHDAYLNAVVGTALIKKYPKLESEFVYGDYKVYDVRKMIAKSEQEIGKATAKYFFYSNIMNFFKTEITLANGEIRKRPLIETNGETGEIVWDKGRDFATVRKVLSMPQVNIVKKTEVQTGGFSKESILPKRNSDKLIARKKDWDPKKYGGFDSPTVAYSVLVVAKVEKGKSKKLKSVKELLGITIMERSSFEKNPIDFLEAKGYKEVKKDLIIKLPKYSLFELENGRKRMLASAGELQKGNELALPSKYVNFLYLASHYEKLKGSPEDNEQKQLFVEQHKHYLDEIIEQISEFSKRVILADANLDKVLSAYNKHRDKPIREQAENIIHLFTLTNLGAPAAFKYFDTTIDRKRYTSTKEVLDATLIHQSITGLYETRIDLSQLGGDGGGGGGSGGGGSGGTLNIEDEYRLHETSKGPDVPLGSTWLSDFPQAWAETGGMGLAFRQAPLIISLKATSTPVSIKQYPMSQEARLGIKPHIQRLLDQGILVPCQSPWNTPLLPVKKPGTNDYRPVQDLREVNKRVEDIHPTVPNPYNLLSGLPPSHQWYTVLDLKDAFFCLRLHPTSQSLFAFEWKDPEMGISGQLTWTRLPQGFKNSPTLFNEALHRDLADFRIQHPDLILLQYVDDLLLAATSELDCQQGTRALLQTLGDLGYRASAKKAQICQKQVKYLGYLLKEGQRWLTEARKETVMGQPTPKTPRQLREFLGTAGLCRLWIPGFAEMAAPLYPLTKPGTLFKWGPDQQKAYQEIKQALLTAPALGLPDLTKPFELFVDEKQGYAKGVLTQKLGPWRRPVAYLSKKLDPVAAGWPPCLRMVAAIAVLTKDVGKLTMGQPLVILAPHAVEALVKQPPDRWLSNARMTHYQALLLDTDRVQFGPIVALNPATLLPLPEEGLQHDCLDILAEAHGTRPDLTDQPLPDADHTWYTDGSSFLQEGQRRAGAAVTTETEVIWAKALPAGTSAQRAELIALTQALKMAAGKKLNVYTDSRYAFATAHIHGEIYRRRGWLTSEGKEIKNKDEILALLKALFLPKRLSIIHCPGHQKGNHAEARGNRMADQAAREVATRETPETSTLLAGKRTADGSEFEKRTADGSEFESPKKKAKVE

SEQ ID NO: 6128 - protein, 2086 aa, synthetic construct
MPAAKRVKLDGGDKKYSIGLDIGTNSVGWAVITDEYKVPSKKFKVLGNTDRHSIKKNLIGALLFDSGETAEATRLKRTARRRYTRRKNRICYLQEIFSNEMAKVDDSFFHRLEESFLVEEDKKHERHPIFGNIVDEVAYHEKYPTIYHLRKKLVDSTDKADLRLIYLALAHMIKFRGHFLIEGDLNPDNSDVDKLFIQLVQTYNQLFEENPINASGVDAKAILSARLSKSRRLENLIAQLPGEKKNGLFGNLIALSLGLTPNFKSNFDLAEDAKLQLSKDTYDDDLDNLLAQIGDQYADLFLAAKNLSDAILLSDILRVNTEITKAPLSASMIKRYDEHHQDLTLLKALVRQQLPEKYKEIFFDQSKNGYAGYIDGGASQEEFYKFIKPILEKMDGTEELLVKLNREDLLRKQRTFDNGSIPHQIHLGELHAILRRQEDFYPFLKDNREKIEKILTFRIPYYVGPLARGNSRFAWMTRKSEETITPWNFEEVVDKGASAQSFIERMTNFDKNLPNEKVLPKHSLLYEYFTVYNELTKVKYVTEGMRKPAFLSGEQKKAIVDLLFKTNRKVTVKQLKEDYFKKIECFDSVEISGVEDRFNASLGTYHDLLKIIKDKDFLDNEENEDILEDIVLTLTLFEDREMIEERLKTYAHLFDDKVMKQLKRRRYTGWGRLSRKLINGIRDKQSGKTILDFLKSDGFANRNFMQLIHDDSLTFKEDIQKAQVSGQGDSLHEHIANLAGSPAIKKGILQTVKVVDELVKVMGRHKPENIVIEMARENQTTQKGQKNSRERMKRIEEGIKELGSQILKEHPVENTQLQNEKLYLYYLQNGRDMYVDQELDINRLSDYDVDHIVPQSFLKDDSIDNKVLTRSDKARGKSDNVPSEEVVKKMKNYWRQLLNAKLITQRKFDNLTKAERGGLSELDKAGFIKRQLVETRQITKHVAQILDSRMNTKYDENDKLIREVKVITLKSKLVSDFRKDFQFYKVREINNYHHAHDAYLNAVVGTALIKKYPKLESEFVYGDYKVYDVRKMIAKSEQEIGKATAKYFFYSNIMNFFKTEITLANGEIRKRPLIETNGETGEIVWDKGRDFATVRKVLSMPQVNIVKKTEVQTGGFSKESILPKRNSDKLIARKKDWDPKKYGGFDSPTVAYSVLVVAKVEKGKSKKLKSVKELLGITIMERSSFEKNPIDFLEAKGYKEVKKDLIIKLPKYSLFELENGRKRMLASAGELQKGNELALPSKYVNFLYLASHYEKLKGSPEDNEQKQLFVEQHKHYLDEIIEQISEFSKRVILADANLDKVLSAYNKHRDKPIREQAENIIHLFTLTNLGAPAAFKYFDTTIDRKRYTSTKEVLDATLIHQSITGLYETRIDLSQLGGDGGGGGGSGGGGSGGVPWLMKKPLQLTVLVPLHEYQERLLQQTALPKEQKELLQKLFLKYDALWQHWENQVGHRRIKPHNIATGTLAPRPQKQYPINPKAKPSIQIVIDDLLKQGVLIQQNSTMNTPVYPVPKPDGKWRMVLDYREVNKTIPLIAAQNQHSAGILSSIYRGKYKTTLDLTNGFWAHPITPESYWLTAFTWQGKQYCWTRLPQGFLNSPALFTADVVDLLKEIPNVQAYVDDIYISHDDPQEHLEQLEKIFSILLNAGYVVSLKKSEIAQREVEFLGFNITKEGRGLTDTFKQKLLNITPPKDLKQLQSILGLLNFARNFIPNYSELVKPLYTIVANANGKFISWTEDNSNQLQHIISVLNQADNLEERNPETRLIIKVNSSPSAGYIRYYNEGSKRPIMYVNYIFSKAEAKFTQTEKLLTTMHKGLIKAMDLAMGQEILVYSPIVSMTKIQRTPLPERKALPVRWITWMTYLEDPRIQFHYDKSLPELQQIPNVTEDVIAKTKHPSEFAMVFYTDGSAIKHPDVNKSHSAGMGIAQVQFIPEYKIVHQWSIPLGDHTAQLAEIAAVEFACKKALKISGPVLIVTDSFYVAESANKELPYWKSNGFLNNKKKPLRHVSKWKSIAECLQLKPDIIIMHEKGHQQPMTTLHTEGNNLADKLATQGSYVVHAGKRTADGSEFEKRTADGSEFESPKKKAKVE

SEQ ID NO: 6129 - protein, 2102 aa, synthetic construct
MPAAKRVKLDGGDKKYSIGLDIGTNSVGWAVITDEYKVPSKKFKVLGNTDRHSIKKNLIGALLFDSGETAEATRLKRTARRRYTRRKNRICYLQEIFSNEMAKVDDSFFHRLEESFLVEEDKKHERHPIFGNIVDEVAYHEKYPTIYHLRKKLVDSTDKADLRLIYLALAHMIKFRGHFLIEGDLNPDNSDVDKLFIQLVQTYNQLFEENPINASGVDAKAILSARLSKSRRLENLIAQLPGEKKNGLFGNLIALSLGLTPNFKSNFDLAEDAKLQLSKDTYDDDLDNLLAQIGDQYADLFLAAKNLSDAILLSDILRVNTEITKAPLSASMIKRYDEHHQDLTLLKALVRQQLPEKYKEIFFDQSKNGYAGYIDGGASQEEFYKFIKPILEKMDGTEELLVKLNREDLLRKQRTFDNGSIPHQIHLGELHAILRRQEDFYPFLKDNREKIEKILTFRIPYYVGPLARGNSRFAWMTRKSEETITPWNFEEVVDKGASAQSFIERMTNFDKNLPNEKVLPKHSLLYEYFTVYNELTKVKYVTEGMRKPAFLSGEQKKAIVDLLFKTNRKVTVKQLKEDYFKKIECFDSVEISGVEDRFNASLGTYHDLLKIIKDKDFLDNEENEDILEDIVLTLTLFEDREMIEERLKTYAHLFDDKVMKQLKRRRYTGWGRLSRKLINGIRDKQSGKTILDFLKSDGFANRNFMQLIHDDSLTFKEDIQKAQVSGQGDSLHEHIANLAGSPAIKKGILQTVKVVDELVKVMGRHKPENIVIEMARENQTTQKGQKNSRERMKRIEEGIKELGSQILKEHPVENTQLQNEKLYLYYLQNGRDMYVDQELDINRLSDYDVDHIVPQSFLKDDSIDNKVLTRSDKARGKSDNVPSEEVVKKMKNYWRQLLNAKLITQRKFDNLTKAERGGLSELDKAGFIKRQLVETRQITKHVAQILDSRMNTKYDENDKLIREVKVITLKSKLVSDFRKDFQFYKVREINNYHHAHDAYLNAVVGTALIKKYPKLESEFVYGDYKVYDVRKMIAKSEQEIGKATAKYFFYSNIMNFFKTEITLANGEIRKRPLIETNGETGEIVWDKGRDFATVRKVLSMPQVNIVKKTEVQTGGFSKESILPKRNSDKLIARKKDWDPKKYGGFDSPTVAYSVLVVAKVEKGKSKKLKSVKELLGITIMERSSFEKNPIDFLEAKGYKEVKKDLIIKLPKYSLFELENGRKRMLASAGELQKGNELALPSKYVNFLYLASHYEKLKGSPEDNEQKQLFVEQHKHYLDEIIEQISEFSKRVILADANLDKVLSAYNKHRDKPIREQAENIIHLFTLTNLGAPAAFKYFDTTIDRKRYTSTKEVLDATLIHQSITGLYETRIDLSQLGGDGGGGGGSGGGGSGGGGSGGTAPLEEEYRLFLEAPIQNVTLLEQWKREIPKVWAEINPPGLASTQAPIHVQLLSTALPVRVRQYPITLEAKRSLRETIRKFRAAGILRPVHSPWNTPLLPVRKSGTSEYRMVQDLREVNKRVETIHPTVPNPYTLLSLLPPDRIWYSVLDLKDAFFCIPLAPESQLIFAFEWADAEEGESGQLTWTRLPQGFKNSPTLFNEALNRDLQGFRLDHPSVSLLQYVDDLLIAADTQAACLSATRDLLMTLAELGYRVSGKKAQLCQEEVTYLGFKIHKGSRSLSNSRTQAILQIPVPKTKRQVREFLGTIGYCRLWIPGFAELAQPLYAATRPGNDPLVWGEKEEEAFQSLKLALTQPPALALPSLDKPFQLFVEETSGAAKGVLTQALGPWKRPVAYLSKRLDPVAAGWPRCLRAIAAAALLTREASKLTFGQDIEITSSHNLESLLRSPPDKWLTNARITQYQVLLLDPPRVRFKQTAALNPATLLPETDDTLPIHHCLDTLDSLTSTRPDLTDQPLAQAEATLFTDGSSYIRDGKRYAGAAVVTLDSVIWAEPLPIGTSAQKAELIALTKALEWSKDKSVNIYTDSRYAFATLHVHGMIYRERGWLTAGGKAIKNAPEILALLTAVWLPKRVAVMHCKGHQKDDAPTSTGNRRADEVAREVAIRPLSTQATISAGKRTADGSEFEKRTADGSEFESPKKKAKVE

SEQ ID NO: 6130 - protein, 2102 aa, synthetic construct
MPAAKRVKLDGGDKKYSIGLDIGTNSVGWAVITDEYKVPSKKFKVLGNTDRHSIKKNLIGALLFDSGETAEATRLKRTARRRYTRRKNRICYLQEIFSNEMAKVDDSFFHRLEESFLVEEDKKHERHPIFGNIVDEVAYHEKYPTIYHLRKKLVDSTDKADLRLIYLALAHMIKFRGHFLIEGDLNPDNSDVDKLFIQLVQTYNQLFEENPINASGVDAKAILSARLSKSRRLENLIAQLPGEKKNGLFGNLIALSLGLTPNFKSNFDLAEDAKLQLSKDTYDDDLDNLLAQIGDQYADLFLAAKNLSDAILLSDILRVNTEITKAPLSASMIKRYDEHHQDLTLLKALVRQQLPEKYKEIFFDQSKNGYAGYIDGGASQEEFYKFIKPILEKMDGTEELLVKLNREDLLRKQRTFDNGSIPHQIHLGELHAILRRQEDFYPFLKDNREKIEKILTFRIPYYVGPLARGNSRFAWMTRKSEETITPWNFEEVVDKGASAQSFIERMTNFDKNLPNEKVLPKHSLLYEYFTVYNELTKVKYVTEGMRKPAFLSGEQKKAIVDLLFKTNRKVTVKQLKEDYFKKIECFDSVEISGVEDRFNASLGTYHDLLKIIKDKDFLDNEENEDILEDIVLTLTLFEDREMIEERLKTYAHLFDDKVMKQLKRRRYTGWGRLSRKLINGIRDKQSGKTILDFLKSDGFANRNFMQLIHDDSLTFKEDIQKAQVSGQGDSLHEHIANLAGSPAIKKGILQTVKVVDELVKVMGRHKPENIVIEMARENQTTQKGQKNSRERMKRIEEGIKELGSQILKEHPVENTQLQNEKLYLYYLQNGRDMYVDQELDINRLSDYDVDHIVPQSFLKDDSIDNKVLTRSDKARGKSDNVPSEEVVKKMKNYWRQLLNAKLITQRKFDNLTKAERGGLSELDKAGFIKRQLVETRQITKHVAQILDSRMNTKYDENDKLIREVKVITLKSKLVSDFRKDFQFYKVREINNYHHAHDAYLNAVVGTALIKKYPKLESEFVYGDYKVYDVRKMIAKSEQEIGKATAKYFFYSNIMNFFKTEITLANGEIRKRPLIETNGETGEIVWDKGRDFATVRKVLSMPQVNIVKKTEVQTGGFSKESILPKRNSDKLIARKKDWDPKKYGGFDSPTVAYSVLVVAKVEKGKSKKLKSVKELLGITIMERSSFEKNPIDFLEAKGYKEVKKDLIIKLPKYSLFELENGRKRMLASAGELQKGNELALPSKYVNFLYLASHYEKLKGSPEDNEQKQLFVEQHKHYLDEIIEQISEFSKRVILADANLDKVLSAYNKHRDKPIREQAENIIHLFTLTNLGAPAAFKYFDTTIDRKRYTSTKEVLDATLIHQSITGLYETRIDLSQLGGDGGGGGGSGGGGSGGGGSGGTAPLEEEYRLFLEAPIQNVTLLEQWKREIPKVWAEINPPGLASTQAPIHVQLLSTALPVRVRQYPITLEAKRSLRETIRKFRAAGILRPVHSPWNTPLLPVRKSGTSEYRMVQDLREVNKRVETIHPTVPNPYTLLSLLPPDRIWYSVLDLKDAFFCIPLAPESQLIFAFEWADAEEGESGQLTWTRLPQGFKNSPTLFNEALNRDLQGFRLDHPSVSLLQYVDDLLIAADTQAACLSATRDLLMTLAELGYRVSGKKAQLCQEEVTYLGFKIHKGSRSLSNSRTQAILQIPVPKTKRQVREFLGKIGYCRLFIPGFAELAQPLYAATRPGNDPLVWGEKEEEAFQSLKLALTQPPALALPSLDKPFQLFVEETSGAAKGVLTQALGPWKRPVAYLSKRLDPVAAGWPRCLRAIAAAALLTREASKLTFGQDIEITSSHNLESLLRSPPDKWLTNARITQYQVLLLDPPRVRFKQTAALNPATLLPETDDTLPIHHCLDTLDSLTSTRPDLTDQPLAQAEATLFTDGSSYIRDGKRYAGAAVVTLDSVIWAEPLPIGTSAQKAELIALTKALEWSKDKSVNIYTDSRYAFATLHVHGMIYRERGWLTAGGKAIKNAPEILALLTAVWLPKRVAVMHCKGHQKDDAPTSTGNRRADEVAREVAIRPLSTQATISAGKRTADGSEFEKRTADGSEFESPKKKAKVE

SEQ ID NO: 6131 - protein, 2106 aa, synthetic construct
MPAAKRVKLDGGDKKYSIGLDIGTNSVGWAVITDEYKVPSKKFKVLGNTDRHSIKKNLIGALLFDSGETAEATRLKRTARRRYTRRKNRICYLQEIFSNEMAKVDDSFFHRLEESFLVEEDKKHERHPIFGNIVDEVAYHEKYPTIYHLRKKLVDSTDKADLRLIYLALAHMIKFRGHFLIEGDLNPDNSDVDKLFIQLVQTYNQLFEENPINASGVDAKAILSARLSKSRRLENLIAQLPGEKKNGLFGNLIALSLGLTPNFKSNFDLAEDAKLQLSKDTYDDDLDNLLAQIGDQYADLFLAAKNLSDAILLSDILRVNTEITKAPLSASMIKRYDEHHQDLTLLKALVRQQLPEKYKEIFFDQSKNGYAGYIDGGASQEEFYKFIKPILEKMDGTEELLVKLNREDLLRKQRTFDNGSIPHQIHLGELHAILRRQEDFYPFLKDNREKIEKILTFRIPYYVGPLARGNSRFAWMTRKSEETITPWNFEEVVDKGASAQSFIERMTNFDKNLPNEKVLPKHSLLYEYFTVYNELTKVKYVTEGMRKPAFLSGEQKKAIVDLLFKTNRKVTVKQLKEDYFKKIECFDSVEISGVEDRFNASLGTYHDLLKIIKDKDFLDNEENEDILEDIVLTLTLFEDREMIEERLKTYAHLFDDKVMKQLKRRRYTGWGRLSRKLINGIRDKQSGKTILDFLKSDGFANRNFMQLIHDDSLTFKEDIQKAQVSGQGDSLHEHIANLAGSPAIKKGILQTVKVVDELVKVMGRHKPENIVIEMARENQTTQKGQKNSRERMKRIEEGIKELGSQILKEHPVENTQLQNEKLYLYYLQNGRDMYVDQELDINRLSDYDVDHIVPQSFLKDDSIDNKVLTRSDKARGKSDNVPSEEVVKKMKNYWRQLLNAKLITQRKFDNLTKAERGGLSELDKAGFIKRQLVETRQITKHVAQILDSRMNTKYDENDKLIREVKVITLKSKLVSDFRKDFQFYKVREINNYHHAHDAYLNAVVGTALIKKYPKLESEFVYGDYKVYDVRKMIAKSEQEIGKATAKYFFYSNIMNFFKTEITLANGEIRKRPLIETNGETGEIVWDKGRDFATVRKVLSMPQVNIVKKTEVQTGGFSKESILPKRNSDKLIARKKDWDPKKYGGFDSPTVAYSVLVVAKVEKGKSKKLKSVKELLGITIMERSSFEKNPIDFLEAKGYKEVKKDLIIKLPKYSLFELENGRKRMLASAGELQKGNELALPSKYVNFLYLASHYEKLKGSPEDNEQKQLFVEQHKHYLDEIIEQISEFSKRVILADANLDKVLSAYNKHRDKPIREQAENIIHLFTLTNLGAPAAFKYFDTTIDRKRYTSTKEVLDATLIHQSITGLYETRIDLSQLGGDGGGGGGSGGGGSGGGGSGGTVSLQDEHRLFDIPVTTSLPDVWLQDFPQAWAETGGLGRAKCQAPIIIDLKPTAVPVSIKQYPMSLEAHMGIRQHIIKFLELGVLRPCRSPWNTPLLPVKKPGTQDYRPVQDLREINKRTVDIHPTVPNPYNLLSTLKPDYSWYTVLDLKDAFFCLPLAPQSQELFAFEWKDPERGISGQLTWTRLPQGFKNSPTLFNEALHRDLTDFRTQHPEVTLLQYVDDLLLAAPTKKACTQGTRHLLQELGEKGYRASAKKAQICQTKVTYLGYILSEGKRWLTPGRIETVARIPPPRNPREVREFLGTAGFCRLWIPGFAELAAPLYALTKPSTPFTWQTEHQLAFEALKKALLSAPALGLPDTSKPFTLFLDERQGIAKGVLTQKLGPWKRPVAYLSKKLDPVAAGWPPCLRIMAATAMLVKDSAKLTLGQPLTVITPHTLEAIVRQPPDRWITNARLTHYQALLLDTDRVQFGPPVTLNPATLLPVPENQPSPHDCRQVLAETHGTREDLKDQELPDADHTWYTDGSSYLDSGTRRAGAAVVDGHNTIWAQSLPPGTSAQKAELIALTKALELSKGKKANIYTDSRYAFATAHTHGSIYERRGWLTSEGKEIKNKAEIIALLKALFLPQEVAIIHCPGHQKGQDPVAVGNRQADRVARQAAMAEVLTLATEPDNTSHITAGKRTADGSEFEKRTADGSEFESPKKKAKVE

SEQ ID NO: 6132 - protein, 2091 aa, synthetic construct
MPAAKRVKLDGGDKKYSIGLDIGTNSVGWAVITDEYKVPSKKFKVLGNTDRHSIKKNLIGALLFDSGETAEATRLKRTARRRYTRRKNRICYLQEIFSNEMAKVDDSFFHRLEESFLVEEDKKHERHPIFGNIVDEVAYHEKYPTIYHLRKKLVDSTDKADLRLIYLALAHMIKFRGHFLIEGDLNPDNSDVDKLFIQLVQTYNQLFEENPINASGVDAKAILSARLSKSRRLENLIAQLPGEKKNGLFGNLIALSLGLTPNFKSNFDLAEDAKLQLSKDTYDDDLDNLLAQIGDQYADLFLAAKNLSDAILLSDILRVNTEITKAPLSASMIKRYDEHHQDLTLLKALVRQQLPEKYKEIFFDQSKNGYAGYIDGGASQEEFYKFIKPILEKMDGTEELLVKLNREDLLRKQRTFDNGSIPHQIHLGELHAILRRQEDFYPFLKDNREKIEKILTFRIPYYVGPLARGNSRFAWMTRKSEETITPWNFEEVVDKGASAQSFIERMTNFDKNLPNEKVLPKHSLLYEYFTVYNELTKVKYVTEGMRKPAFLSGEQKKAIVDLLFKTNRKVTVKQLKEDYFKKIECFDSVEISGVEDRFNASLGTYHDLLKIIKDKDFLDNEENEDILEDIVLTLTLFEDREMIEERLKTYAHLFDDKVMKQLKRRRYTGWGRLSRKLINGIRDKQSGKTILDFLKSDGFANRNFMQLIHDDSLTFKEDIQKAQVSGQGDSLHEHIANLAGSPAIKKGILQTVKVVDELVKVMGRHKPENIVIEMARENQTTQKGQKNSRERMKRIEEGIKELGSQILKEHPVENTQLQNEKLYLYYLQNGRDMYVDQELDINRLSDYDVDHIVPQSFLKDDSIDNKVLTRSDKARGKSDNVPSEEVVKKMKNYWRQLLNAKLITQRKFDNLTKAERGGLSELDKAGFIKRQLVETRQITKHVAQILDSRMNTKYDENDKLIREVKVITLKSKLVSDFRKDFQFYKVREINNYHHAHDAYLNAVVGTALIKKYPKLESEFVYGDYKVYDVRKMIAKSEQEIGKATAKYFFYSNIMNFFKTEITLANGEIRKRPLIETNGETGEIVWDKGRDFATVRKVLSMPQVNIVKKTEVQTGGFSKESILPKRNSDKLIARKKDWDPKKYGGFDSPTVAYSVLVVAKVEKGKSKKLKSVKELLGITIMERSSFEKNPIDFLEAKGYKEVKKDLIIKLPKYSLFELENGRKRMLASAGELQKGNELALPSKYVNFLYLASHYEKLKGSPEDNEQKQLFVEQHKHYLDEIIEQISEFSKRVILADANLDKVLSAYNKHRDKPIREQAENIIHLFTLTNLGAPAAFKYFDTTIDRKRYTSTKEVLDATLIHQSITGLYETRIDLSQLGGDGGGGGGSGGGGSGGGGSGGVPWLTQQPLQLTILVPLQEYQEKILSKTALPEDQKQQLKTLFVKYDNLWQHWENQVGHRKIRPHNIATGDYPPRPQKQYPINPKAKPSIQIVIDDLLKQGVLTPQNSTMNTPVYPVPKPDGRWRMVLDYREVNKTIPLTAAQNQHSAGILATIVRQKYKTTLDLANGFWAHPITPESYWLTAFTWQGKQYCWTRLPQGFLNSPALFNADVVDLLKEIPNVQVYVDDIYLSHDDPKEHVQQLEKVFQILLQAGYVVSLKKSEIGQKTVEFLGFNITKEGRGLTDTFKTKLLNITPPKDLKQLQSILGLLNFARNFIPNFAELVQPLYNLIAPAKGKYIEWSEENTKQLNMVIEALNTASNLEERLPEQRLVIKVNTSPSAGYVRYYNETGKKPIMYLNYVFSKAELKFSMLEKLLTTMHKALIKAMDLAMGQEILVYSPIVSMTKIQKTPLPERKALPIRWITWMTYLEDPRIQFHYDKTLPELKHIPDVYTSSQSPVKHPSQYEGVFYTDGSAIKSPDPTKSNNAGMGIVHATYKPEYQVLNQWSIPLGNHTAQMAEIAAVEFACKKALKIPGPVLVITDSFYVAESANKELPYWKSNGFVNNKKKPLKHISKWKSIAECLSMKPDITIQHEKGISLQIPVFILKGNALADKLATQGSYVVNAGKRTADGSEFEKRTADGSEFESPKKKAKVE

SEQ ID NO: 6133 - protein, 2222 aa, synthetic construct
MPAAKRVKLDGGDKKYSIGLDIGTNSVGWAVITDEYKVPSKKFKVLGNTDRHSIKKNLIGALLFDSGETAEATRLKRTARRRYTRRKNRICYLQEIFSNEMAKVDDSFFHRLEESFLVEEDKKHERHPIFGNIVDEVAYHEKYPTIYHLRKKLVDSTDKADLRLIYLALAHMIKFRGHFLIEGDLNPDNSDVDKLFIQLVQTYNQLFEENPINASGVDAKAILSARLSKSRRLENLIAQLPGEKKNGLFGNLIALSLGLTPNFKSNFDLAEDAKLQLSKDTYDDDLDNLLAQIGDQYADLFLAAKNLSDAILLSDILRVNTEITKAPLSASMIKRYDEHHQDLTLLKALVRQQLPEKYKEIFFDQSKNGYAGYIDGGASQEEFYKFIKPILEKMDGTEELLVKLNREDLLRKQRTFDNGSIPHQIHLGELHAILRRQEDFYPFLKDNREKIEKILTFRIPYYVGPLARGNSRFAWMTRKSEETITPWNFEEVVDKGASAQSFIERMTNFDKNLPNEKVLPKHSLLYEYFTVYNELTKVKYVTEGMRKPAFLSGEQKKAIVDLLFKTNRKVTVKQLKEDYFKKIECFDSVEISGVEDRFNASLGTYHDLLKIIKDKDFLDNEENEDILEDIVLTLTLFEDREMIEERLKTYAHLFDDKVMKQLKRRRYTGWGRLSRKLINGIRDKQSGKTILDFLKSDGFANRNFMQLIHDDSLTFKEDIQKAQVSGQGDSLHEHIANLAGSPAIKKGILQTVKVVDELVKVMGRHKPENIVIEMARENQTTQKGQKNSRERMKRIEEGIKELGSQILKEHPVENTQLQNEKLYLYYLQNGRDMYVDQELDINRLSDYDVDHIVPQSFLKDDSIDNKVLTRSDKARGKSDNVPSEEVVKKMKNYWRQLLNAKLITQRKFDNLTKAERGGLSELDKAGFIKRQLVETRQITKHVAQILDSRMNTKYDENDKLIREVKVITLKSKLVSDFRKDFQFYKVREINNYHHAHDAYLNAVVGTALIKKYPKLESEFVYGDYKVYDVRKMIAKSEQEIGKATAKYFFYSNIMNFFKTEITLANGEIRKRPLIETNGETGEIVWDKGRDFATVRKVLSMPQVNIVKKTEVQTGGFSKESILPKRNSDKLIARKKDWDPKKYGGFDSPTVAYSVLVVAKVEKGKSKKLKSVKELLGITIMERSSFEKNPIDFLEAKGYKEVKKDLIIKLPKYSLFELENGRKRMLASAGELQKGNELALPSKYVNFLYLASHYEKLKGSPEDNEQKQLFVEQHKHYLDEIIEQISEFSKRVILADANLDKVLSAYNKHRDKPIREQAENIIHLFTLTNLGAPAAFKYFDTTIDRKRYTSTKEVLDATLIHQSITGLYETRIDLSQLGGDGGGGGGSGGGGSGGGGSGGTLGDQGSRGSDPLPEPRVTLTVEGIPTEFLVNTGAEHSVLTKPMGKMGSKRTVVAGATGSKVYPWTTKRLLKIGQKQVTHSFLVIPECPAPLLGRDLLTKLKAQIQFSTEGPQVTWEDRPAMCLVLNLEEEYRLHEKPVPPSIDPSWLQLFPMVWAEKAGMGLANQVPPVVVELKSDASPVAVRQYPMSKEAREGIRPHIQRFLDLGILVPCQSPWNTPLLPVKKPGTNDYRPVQDLREVNKRVQDIHPTVPNPYNLLSSLPPSHTWYSVLDLKDAFFCLKLHPNSQPLFAFEWRDPEKGNTGQLTWTRLPQGFKNSPTLFNEALHRDLASFRALNPQVVMLQYVDDLLVAAPTYRDCKEGTRRLLQELSKLGYRVSAKKAQLCREEVTYLGYLLKGGKRWLTPARKATVMKIPTPTTPRQVREFLGKAGFCRLFIPGFASLAAPLYPLTRPKVPFTWTEAHQEAFGRIKEALLSAPALALPDLTKPFALYVDEKEGVARGVLTQTLGPWRRPVAYLSKKLDPVASGWPTCLKAIAAVALLLKDADKLTLGQNVLVIAPHNLESIVRQPPDRWMTNARMTHYQSLLLNERVSFAPPAILNPATLLPVESDDTPIHICSEILAEETGTRPDLRDQPLPGVPAWYTDGSSFIMDGRRQAGAAIVDNKRTVWASNLPEGTSAQKAELIALTQALRLAEGKSINIYTDSRYAFATAHVHGAIYKQRGWLTSAGKDIKNKEEILALLEAIHLPKRVAIIHCPGHQRGTDPVATGNRKADEAAKQAAQSTRILTETTKNAGKRTADGSEFEKRTADGSEFESPKKKAKVE

SEQ ID NO: 6134 - protein, 2100 aa, synthetic construct
MPAAKRVKLDGGDKKYSIGLDIGTNSVGWAVITDEYKVPSKKFKVLGNTDRHSIKKNLIGALLFDSGETAEATRLKRTARRRYTRRKNRICYLQEIFSNEMAKVDDSFFHRLEESFLVEEDKKHERHPIFGNIVDEVAYHEKYPTIYHLRKKLVDSTDKADLRLIYLALAHMIKFRGHFLIEGDLNPDNSDVDKLFIQLVQTYNQLFEENPINASGVDAKAILSARLSKSRRLENLIAQLPGEKKNGLFGNLIALSLGLTPNFKSNFDLAEDAKLQLSKDTYDDDLDNLLAQIGDQYADLFLAAKNLSDAILLSDILRVNTEITKAPLSASMIKRYDEHHQDLTLLKALVRQQLPEKYKEIFFDQSKNGYAGYIDGGASQEEFYKFIKPILEKMDGTEELLVKLNREDLLRKQRTFDNGSIPHQIHLGELHAILRRQEDFYPFLKDNREKIEKILTFRIPYYVGPLARGNSRFAWMTRKSEETITPWNFEEVVDKGASAQSFIERMTNFDKNLPNEKVLPKHSLLYEYFTVYNELTKVKYVTEGMRKPAFLSGEQKKAIVDLLFKTNRKVTVKQLKEDYFKKIECFDSVEISGVEDRFNASLGTYHDLLKIIKDKDFLDNEENEDILEDIVLTLTLFEDREMIEERLKTYAHLFDDKVMKQLKRRRYTGWGRLSRKLINGIRDKQSGKTILDFLKSDGFANRNFMQLIHDDSLTFKEDIQKAQVSGQGDSLHEHIANLAGSPAIKKGILQTVKVVDELVKVMGRHKPENIVIEMARENQTTQKGQKNSRERMKRIEEGIKELGSQILKEHPVENTQLQNEKLYLYYLQNGRDMYVDQELDINRLSDYDVDHIVPQSFLKDDSIDNKVLTRSDKARGKSDNVPSEEVVKKMKNYWRQLLNAKLITQRKFDNLTKAERGGLSELDKAGFIKRQLVETRQITKHVAQILDSRMNTKYDENDKLIREVKVITLKSKLVSDFRKDFQFYKVREINNYHHAHDAYLNAVVGTALIKKYPKLESEFVYGDYKVYDVRKMIAKSEQEIGKATAKYFFYSNIMNFFKTEITLANGEIRKRPLIETNGETGEIVWDKGRDFATVRKVLSMPQVNIVKKTEVQTGGFSKESILPKRNSDKLIARKKDWDPKKYGGFDSPTVAYSVLVVAKVEKGKSKKLKSVKELLGITIMERSSFEKNPIDFLEAKGYKEVKKDLIIKLPKYSLFELENGRKRMLASAGELQKGNELALPSKYVNFLYLASHYEKLKGSPEDNEQKQLFVEQHKHYLDEIIEQISEFSKRVILADANLDKVLSAYNKHRDKPIREQAENIIHLFTLTNLGAPAAFKYFDTTIDRKRYTSTKEVLDATLIHQSITGLYETRIDLSQLGGDGGGGGGSGGGGSGGGGSGGTLNLEDEYRLYETSAEPEVSPGSTWLSDFPQAWAETGGMGLAVRQAPLIIPLKATSTPVSIKQYPMSQEAKLGIKPHIQRLLDQGILVPCQSPWNTPLLPVKKPGTNDYRPVQDLREVNKRVEDIHPTVPNPYNLLSGLPPSHRWYTVLDLKDAFFCLRLHPTSQPLFAFEWRDPGMGISGQLTWTRLPQGFKNSPTLFNEALHRDLADFRIQHPDLILLQYVDDILLAATSELDCQQGTRALLLTLGNLGYRASAKKAQLCQKQVKYLGYLLKEGQRWLTEARKETVMGQPTPKTPRQLREFLGTAGFCRLWIPGFAEMAAPLYPLTKPGTLFNWGPDQQKAYQEIKQALLTAPALGLPDLTKPFELFVDEKQGYAKGVLTQKLGPWRRPVAYLSKKLDPVAAGWPPCLRMVAAIAVLRKDAGKLTMGQPLVILAPHAVEALVKQPPDRWLSNARMTHYQAMLLDTDRVQFGPVVALNPATLLPLPEEGAPHDCLEILAETHGTRPDLTDQPIPDADHTWYTDGSSFLQEGQRKAGAAVTTETEVIWARALPAGTSAQRAELIALTQALKMAEGKRLNVYTDSRYAFATAHIHGEIYRRRGWLTSEGREIKNKSEILALLKALFLPKRLSIIHCLGHQKGDSAEARGNRLADQAAREAAIKTPPDTSTLLAGKRTADGSEFEKRTADGSEFESPKKKAKVE

SEQ ID NO: 6135 - protein, 2100 aa, synthetic construct
MPAAKRVKLDGGDKKYSIGLDIGTNSVGWAVITDEYKVPSKKFKVLGNTDRHSIKKNLIGALLFDSGETAEATRLKRTARRRYTRRKNRICYLQEIFSNEMAKVDDSFFHRLEESFLVEEDKKHERHPIFGNIVDEVAYHEKYPTIYHLRKKLVDSTDKADLRLIYLALAHMIKFRGHFLIEGDLNPDNSDVDKLFIQLVQTYNQLFEENPINASGVDAKAILSARLSKSRRLENLIAQLPGEKKNGLFGNLIALSLGLTPNFKSNFDLAEDAKLQLSKDTYDDDLDNLLAQIGDQYADLFLAAKNLSDAILLSDILRVNTEITKAPLSASMIKRYDEHHQDLTLLKALVRQQLPEKYKEIFFDQSKNGYAGYIDGGASQEEFYKFIKPILEKMDGTEELLVKLNREDLLRKQRTFDNGSIPHQIHLGELHAILRRQEDFYPFLKDNREKIEKILTFRIPYYVGPLARGNSRFAWMTRKSEETITPWNFEEVVDKGASAQSFIERMTNFDKNLPNEKVLPKHSLLYEYFTVYNELTKVKYVTEGMRKPAFLSGEQKKAIVDLLFKTNRKVTVKQLKEDYFKKIECFDSVEISGVEDRFNASLGTYHDLLKIIKDKDFLDNEENEDILEDIVLTLTLFEDREMIEERLKTYAHLFDDKVMKQLKRRRYTGWGRLSRKLINGIRDKQSGKTILDFLKSDGFANRNFMQLIHDDSLTFKEDIQKAQVSGQGDSLHEHIANLAGSPAIKKGILQTVKVVDELVKVMGRHKPENIVIEMARENQTTQKGQKNSRERMKRIEEGIKELGSQILKEHPVENTQLQNEKLYLYYLQNGRDMYVDQELDINRLSDYDVDHIVPQSFLKDDSIDNKVLTRSDKARGKSDNVPSEEVVKKMKNYWRQLLNAKLITQRKFDNLTKAERGGLSELDKAGFIKRQLVETRQITKHVAQILDSRMNTKYDENDKLIREVKVITLKSKLVSDFRKDFQFYKVREINNYHHAHDAYLNAVVGTALIKKYPKLESEFVYGDYKVYDVRKMIAKSEQEIGKATAKYFFYSNIMNFFKTEITLANGEIRKRPLIETNGETGEIVWDKGRDFATVRKVLSMPQVNIVKKTEVQTGGFSKESILPKRNSDKLIARKKDWDPKKYGGFDSPTVAYSVLVVAKVEKGKSKKLKSVKELLGITIMERSSFEKNPIDFLEAKGYKEVKKDLIIKLPKYSLFELENGRKRMLASAGELQKGNELALPSKYVNFLYLASHYEKLKGSPEDNEQKQLFVEQHKHYLDEIIEQISEFSKRVILADANLDKVLSAYNKHRDKPIREQAENIIHLFTLTNLGAPAAFKYFDTTIDRKRYTSTKEVLDATLIHQSITGLYETRIDLSQLGGDGGGGGGSGGGGSGGGGSGGTLNIEDEYRLHETSKEPDVSLGSTWLSDFPQAWAETGGMGLAVRQAPLIIPLKATSTPVSIKQYPMSQEARLGIKPHIQRLLDQGILVPCQSPWNTPLLPVKKPGTNDYRPVQDLREVNKRVEDIHPTVPNPYNLLSGLPPSHQWYTVLDLKDAFFCLRLHPTSQPLFAFEWRDPEMGISGQLTWTRLPQGFKNSPTLFDEALHRDLAGFRIQHPDLILLQYVDDLLLAATSELDCQQGTRALLQTLGDLGYRASAKKAQICQKQVKYLGYLLKEGQRWLTEARKETVMGQPIPKTPRQLREFLGTAGFCRLWIPGFAEMAAPLYPLTKTGTLFNWGPDQQKAFQEIKQALLTAPALGLPDLTKPFELFVDEKQGYAKGVLTQKLGPWRRPVAYLSKKLDPVAAGWPPCLRMVAAIAVLTKDAGKLTMGQPLVILAPHAVEALVKQPPDRWLSNARMTHYQALLLDTDRVQFGPVVALNPATLLPLPEEGLQHDCLDILAEAHGTRSDLMDQPLPDADHTWYTDGSSFLQEGQRKAGAAVTTETEVIWARALPAGTSAQRAELIALTQALKMAEGKKLNVYTDSRYAFATAHIHGEIYRRRGLLTSEGKEIKNKDEILALLKALFLPKRLSIIHCPGHQKGNSAEARGNRMADQAAREVATRETPETSTLLAGKRTADGSEFEKRTADGSEFESPKKKAKVE

SEQ ID NO: 6136 - protein, 2100 aa, synthetic construct
MPAAKRVKLDGGDKKYSIGLDIGTNSVGWAVITDEYKVPSKKFKVLGNTDRHSIKKNLIGALLFDSGETAEATRLKRTARRRYTRRKNRICYLQEIFSNEMAKVDDSFFHRLEESFLVEEDKKHERHPIFGNIVDEVAYHEKYPTIYHLRKKLVDSTDKADLRLIYLALAHMIKFRGHFLIEGDLNPDNSDVDKLFIQLVQTYNQLFEENPINASGVDAKAILSARLSKSRRLENLIAQLPGEKKNGLFGNLIALSLGLTPNFKSNFDLAEDAKLQLSKDTYDDDLDNLLAQIGDQYADLFLAAKNLSDAILLSDILRVNTEITKAPLSASMIKRYDEHHQDLTLLKALVRQQLPEKYKEIFFDQSKNGYAGYIDGGASQEEFYKFIKPILEKMDGTEELLVKLNREDLLRKQRTFDNGSIPHQIHLGELHAILRRQEDFYPFLKDNREKIEKILTFRIPYYVGPLARGNSRFAWMTRKSEETITPWNFEEVVDKGASAQSFIERMTNFDKNLPNEKVLPKHSLLYEYFTVYNELTKVKYVTEGMRKPAFLSGEQKKAIVDLLFKTNRKVTVKQLKEDYFKKIECFDSVEISGVEDRFNASLGTYHDLLKIIKDKDFLDNEENEDILEDIVLTLTLFEDREMIEERLKTYAHLFDDKVMKQLKRRRYTGWGRLSRKLINGIRDKQSGKTILDFLKSDGFANRNFMQLIHDDSLTFKEDIQKAQVSGQGDSLHEHIANLAGSPAIKKGILQTVKVVDELVKVMGRHKPENIVIEMARENQTTQKGQKNSRERMKRIEEGIKELGSQILKEHPVENTQLQNEKLYLYYLQNGRDMYVDQELDINRLSDYDVDHIVPQSFLKDDSIDNKVLTRSDKARGKSDNVPSEEVVKKMKNYWRQLLNAKLITQRKFDNLTKAERGGLSELDKAGFIKRQLVETRQITKHVAQILDSRMNTKYDENDKLIREVKVITLKSKLVSDFRKDFQFYKVREINNYHHAHDAYLNAVVGTALIKKYPKLESEFVYGDYKVYDVRKMIAKSEQEIGKATAKYFFYSNIMNFFKTEITLANGEIRKRPLIETNGETGEIVWDKGRDFATVRKVLSMPQVNIVKKTEVQTGGFSKESILPKRNSDKLIARKKDWDPKKYGGFDSPTVAYSVLVVAKVEKGKSKKLKSVKELLGITIMERSSFEKNPIDFLEAKGYKEVKKDLIIKLPKYSLFELENGRKRMLASAGELQKGNELALPSKYVNFLYLASHYEKLKGSPEDNEQKQLFVEQHKHYLDEIIEQISEFSKRVILADANLDKVLSAYNKHRDKPIREQAENIIHLFTLTNLGAPAAFKYFDTTIDRKRYTSTKEVLDATLIHQSITGLYETRIDLSQLGGDGGGGGGSGGGGSGGGGSGGTLNIEDEHRLHETSKEPDVSLGSTWLSDFPQAWAETGGMGLAVRQAPLIIPLKATSTPVSIKQYPMSQEARLGIKPHIQRLLDQGILVPCQSPWNTPLLPVKKPGTNDYRPVQDLREVNKRVEDIHPTVPNPYNLLSGLPPSHQWYTVLDLKDAFFCLRLHPTSQPLFAFEWRDPEMGISGQLTWTRLPQGFKNSPTLFDEALHRDLADFRIQHPDLILLQYVDDLLLAATSELDCQQGTRALLQTLGNLGYRASAKKAQICQKQVKYLGYLLKEGQRWLTEARKETVMGQPTPKTPRQLREFLGTAGFCRLWIPGFAEMAAPLYPLTKTGTLFNWGPDQQKAYQEIKQALLTAPALGLPDLTKPFELFVDEKQGYAKGVLTQKLGPWRRPVAYLSKKLDPVAAGWPPCLRMVAAIAVLTKDAGKLTMGQPLVILAPHAVEALVKQPPDRWLSNARMTHYQALLLDTDRVQFGPVVALNPATLLPLPEEGLQHNCLDILAEAHGTRPDLTDQPLPDADHTWYTDGSSLLQEGQRKAGAAVTTETEVIWAKALPAGTSAQRAELIALTQALKMAEGKKLNVYTDSRYAFATAHIHGEIYRRRGLLTSEGKEIKNKDEILALLKALFLPKRLSIIHCPGHQKGHSAEARGNRMADQAARKAAITETPDTSTLLAGKRTADGSEFEKRTADGSEFESPKKKAKVE

SEQ ID NO: 6137 - protein, 2180 aa, synthetic construct
MPAAKRVKLDGGDKKYSIGLDIGTNSVGWAVITDEYKVPSKKFKVLGNTDRHSIKKNLIGALLFDSGETAEATRLKRTARRRYTRRKNRICYLQEIFSNEMAKVDDSFFHRLEESFLVEEDKKHERHPIFGNIVDEVAYHEKYPTIYHLRKKLVDSTDKADLRLIYLALAHMIKFRGHFLIEGDLNPDNSDVDKLFIQLVQTYNQLFEENPINASGVDAKAILSARLSKSRRLENLIAQLPGEKKNGLFGNLIALSLGLTPNFKSNFDLAEDAKLQLSKDTYDDDLDNLLAQIGDQYADLFLAAKNLSDAILLSDILRVNTEITKAPLSASMIKRYDEHHQDLTLLKALVRQQLPEKYKEIFFDQSKNGYAGYIDGGASQEEFYKFIKPILEKMDGTEELLVKLNREDLLRKQRTFDNGSIPHQIHLGELHAILRRQEDFYPFLKDNREKIEKILTFRIPYYVGPLARGNSRFAWMTRKSEETITPWNFEEVVDKGASAQSFIERMTNFDKNLPNEKVLPKHSLLYEYFTVYNELTKVKYVTEGMRKPAFLSGEQKKAIVDLLFKTNRKVTVKQLKEDYFKKIECFDSVEISGVEDRFNASLGTYHDLLKIIKDKDFLDNEENEDILEDIVLTLTLFEDREMIEERLKTYAHLFDDKVMKQLKRRRYTGWGRLSRKLINGIRDKQSGKTILDFLKSDGFANRNFMQLIHDDSLTFKEDIQKAQVSGQGDSLHEHIANLAGSPAIKKGILQTVKVVDELVKVMGRHKPENIVIEMARENQTTQKGQKNSRERMKRIEEGIKELGSQILKEHPVENTQLQNEKLYLYYLQNGRDMYVDQELDINRLSDYDVDHIVPQSFLKDDSIDNKVLTRSDKARGKSDNVPSEEVVKKMKNYWRQLLNAKLITQRKFDNLTKAERGGLSELDKAGFIKRQLVETRQITKHVAQILDSRMNTKYDENDKLIREVKVITLKSKLVSDFRKDFQFYKVREINNYHHAHDAYLNAVVGTALIKKYPKLESEFVYGDYKVYDVRKMIAKSEQEIGKATAKYFFYSNIMNFFKTEITLANGEIRKRPLIETNGETGEIVWDKGRDFATVRKVLSMPQVNIVKKTEVQTGGFSKESILPKRNSDKLIARKKDWDPKKYGGFDSPTVAYSVLVVAKVEKGKSKKLKSVKELLGITIMERSSFEKNPIDFLEAKGYKEVKKDLIIKLPKYSLFELENGRKRMLASAGELQKGNELALPSKYVNFLYLASHYEKLKGSPEDNEQKQLFVEQHKHYLDEIIEQISEFSKRVILADANLDKVLSAYNKHRDKPIREQAENIIHLFTLTNLGAPAAFKYFDTTIDRKRYTSTKEVLDATLIHQSITGLYETRIDLSQLGGDGGGGGGSGGGGSGGGGSGGMDPLQLLQPLEAEIKGTKLKAHWNSGATITCVPEAFLEDERPIQTMLIKTIHGEKQQDVYYLTFKVQGRKVEAEVLASPYDYILLNPSDVPWLMKKPLQLTVLVPLHEYQERLLQQTALPKEQKELLQKLFLKYDALWQHWENQVGHRRIKPHNIATGTLAPRPQKQYPINPKAKPSIQIVIDDLLKQGVLIQQNSTMNTPVYPVPKPDGKWRMVLDYREVNKTIPLIAAQNQHSAGILSSIYRGKYKTTLDLTNGFWAHPITPESYWLTAFTWQGKQYCWTRLPQGFLNSPALFNADVVDLLKEIPNVQAYVDDIYISHDDPQEHLEQLEKIFSILLNAGYVVSLKKSEIAQREVEFLGFNITKEGRGLTDTFKQKLLNITPPKDLKQLQSILGLLNFARNFIPNYSELVKPLYTIVAPANGKFISWTEDNSNQLQHIISVLNQADNLEERNPETRLIIKVNSSPSAGYIRYYNEGSKRPIMYVNYIFSKAEAKFTQTEKLLTTMHKGLIKAMDLAMGQEILVYSPIVSMTKIQRTPLPERKALPVRWITWMTYLEDPRIQFHYDKSLPELQQIPNVTEDVIAKTKHPSEFAMVFYTDGSAIKHPDVNKSHSAGMGIAQVQFIPEYKIVHQWSIPLGDHTAQLAEIAAVEFACKKALKISGPVLIVTDSFYVAESANKELPYWKSNGFLNNKKKPLRHVSKWKSIAECLQLKPDIIIMHEKGHQQPMTTLHTEGNNLADKLATQGSYVVHAGKRTADGSEFEKRTADGSEFESPKKKAKVE

SEQ ID NO: 6138 - protein, 2091 aa, synthetic construct
MPAAKRVKLDGGDKKYSIGLDIGTNSVGWAVITDEYKVPSKKFKVLGNTDRHSIKKNLIGALLFDSGETAEATRLKRTARRRYTRRKNRICYLQEIFSNEMAKVDDSFFHRLEESFLVEEDKKHERHPIFGNIVDEVAYHEKYPTIYHLRKKLVDSTDKADLRLIYLALAHMIKFRGHFLIEGDLNPDNSDVDKLFIQLVQTYNQLFEENPINASGVDAKAILSARLSKSRRLENLIAQLPGEKKNGLFGNLIALSLGLTPNFKSNFDLAEDAKLQLSKDTYDDDLDNLLAQIGDQYADLFLAAKNLSDAILLSDILRVNTEITKAPLSASMIKRYDEHHQDLTLLKALVRQQLPEKYKEIFFDQSKNGYAGYIDGGASQEEFYKFIKPILEKMDGTEELLVKLNREDLLRKQRTFDNGSIPHQIHLGELHAILRRQEDFYPFLKDNREKIEKILTFRIPYYVGPLARGNSRFAWMTRKSEETITPWNFEEVVDKGASAQSFIERMTNFDKNLPNEKVLPKHSLLYEYFTVYNELTKVKYVTEGMRKPAFLSGEQKKAIVDLLFKTNRKVTVKQLKEDYFKKIECFDSVEISGVEDRFNASLGTYHDLLKIIKDKDFLDNEENEDILEDIVLTLTLFEDREMIEERLKTYAHLFDDKVMKQLKRRRYTGWGRLSRKLINGIRDKQSGKTILDFLKSDGFANRNFMQLIHDDSLTFKEDIQKAQVSGQGDSLHEHIANLAGSPAIKKGILQTVKVVDELVKVMGRHKPENIVIEMARENQTTQKGQKNSRERMKRIEEGIKELGSQILKEHPVENTQLQNEKLYLYYLQNGRDMYVDQELDINRLSDYDVDHIVPQSFLKDDSIDNKVLTRSDKARGKSDNVPSEEVVKKMKNYWRQLLNAKLITQRKFDNLTKAERGGLSELDKAGFIKRQLVETRQITKHVAQILDSRMNTKYDENDKLIREVKVITLKSKLVSDFRKDFQFYKVREINNYHHAHDAYLNAVVGTALIKKYPKLESEFVYGDYKVYDVRKMIAKSEQEIGKATAKYFFYSNIMNFFKTEITLANGEIRKRPLIETNGETGEIVWDKGRDFATVRKVLSMPQVNIVKKTEVQTGGFSKESILPKRNSDKLIARKKDWDPKKYGGFDSPTVAYSVLVVAKVEKGKSKKLKSVKELLGITIMERSSFEKNPIDFLEAKGYKEVKKDLIIKLPKYSLFELENGRKRMLASAGELQKGNELALPSKYVNFLYLASHYEKLKGSPEDNEQKQLFVEQHKHYLDEIIEQISEFSKRVILADANLDKVLSAYNKHRDKPIREQAENIIHLFTLTNLGAPAAFKYFDTTIDRKRYTSTKEVLDATLIHQSITGLYETRIDLSQLGGDGGGGGGSGGGGSGGGGSGGIPWLMKKPLQLTTLVPLQEYEERLLKQTMLTGSYKEKLQSLFLKYDALWQHWENQVGHRRIKPHHIATGTVNPRPQKQYPINPKAKASIQTVINDLLKQGVLIQQNSIMNTPVYPVPKPDGKWRMVLDYREVNKTIPLIAAQNQHSAGILSSIFRGKYKTTLDLSNGFWAHSITPESYWLTAFTWLGQQYCWTRLPQGFLNSPALFNADVVDLLKEVPNVQVYVDDIYISHDDPREHLEQLEKVFSLLLNAGYVVSLKKSEIAQHEVEFLGFNITKEGRGLTETFKQKLLNITPPRDLKQLQSILGLLNFARNFIPNFSELVKPLYNIIATAPGKYITWTTDNSQQLQNIISMLNSAENLEERNPEVRLIMKVNTSPSAGYIRFYNEFAKRPIMYLNYVYTKAEVKFTNTEKLLTTIHKGLIKALDLGMGQEILVYSPIVSMTKIQKTPLPERKALPIRWITWMSYLEDPRIQFHYDKTLPELQQVPTVTDDIIAKIKHPSEFSMVFYTDGSAIKHPNVNKSHNAGMGIAQVQFKPEFTVINTWSIPLGDHTAQLAEVAAVEFACKKALKIDGPVLIVTDSFYVAESVNKELPYWQSNGFFNNKKKPLKHVSKWKSIADCIQLKPDIIIIHEKGHQPTASTFHTEGNNLADKLATQGSYVVNAGKRTADGSEFEKRTADGSEFESPKKKAKVE

SEQ ID NO: 6139 - protein, 2091 aa, synthetic construct
MPAAKRVKLDGGDKKYSIGLDIGTNSVGWAVITDEYKVPSKKFKVLGNTDRHSIKKNLIGALLFDSGETAEATRLKRTARRRYTRRKNRICYLQEIFSNEMAKVDDSFFHRLEESFLVEEDKKHERHPIFGNIVDEVAYHEKYPTIYHLRKKLVDSTDKADLRLIYLALAHMIKFRGHFLIEGDLNPDNSDVDKLFIQLVQTYNQLFEENPINASGVDAKAILSARLSKSRRLENLIAQLPGEKKNGLFGNLIALSLGLTPNFKSNFDLAEDAKLQLSKDTYDDDLDNLLAQIGDQYADLFLAAKNLSDAILLSDILRVNTEITKAPLSASMIKRYDEHHQDLTLLKALVRQQLPEKYKEIFFDQSKNGYAGYIDGGASQEEFYKFIKPILEKMDGTEELLVKLNREDLLRKQRTFDNGSIPHQIHLGELHAILRRQEDFYPFLKDNREKIEKILTFRIPYYVGPLARGNSRFAWMTRKSEETITPWNFEEVVDKGASAQSFIERMTNFDKNLPNEKVLPKHSLLYEYFTVYNELTKVKYVTEGMRKPAFLSGEQKKAIVDLLFKTNRKVTVKQLKEDYFKKIECFDSVEISGVEDRFNASLGTYHDLLKIIKDKDFLDNEENEDILEDIVLTLTLFEDREMIEERLKTYAHLFDDKVMKQLKRRRYTGWGRLSRKLINGIRDKQSGKTILDFLKSDGFANRNFMQLIHDDSLTFKEDIQKAQVSGQGDSLHEHIANLAGSPAIKKGILQTVKVVDELVKVMGRHKPENIVIEMARENQTTQKGQKNSRERMKRIEEGIKELGSQILKEHPVENTQLQNEKLYLYYLQNGRDMYVDQELDINRLSDYDVDHIVPQSFLKDDSIDNKVLTRSDKARGKSDNVPSEEVVKKMKNYWRQLLNAKLITQRKFDNLTKAERGGLSELDKAGFIKRQLVETRQITKHVAQILDSRMNTKYDENDKLIREVKVITLKSKLVSDFRKDFQFYKVREINNYHHAHDAYLNAVVGTALIKKYPKLESEFVYGDYKVYDVRKMIAKSEQEIGKATAKYFFYSNIMNFFKTEITLANGEIRKRPLIETNGETGEIVWDKGRDFATVRKVLSMPQVNIVKKTEVQTGGFSKESILPKRNSDKLIARKKDWDPKKYGGFDSPTVAYSVLVVAKVEKGKSKKLKSVKELLGITIMERSSFEKNPIDFLEAKGYKEVKKDLIIKLPKYSLFELENGRKRMLASAGELQKGNELALPSKYVNFLYLASHYEKLKGSPEDNEQKQLFVEQHKHYLDEIIEQISEFSKRVILADANLDKVLSAYNKHRDKPIREQAENIIHLFTLTNLGAPAAFKYFDTTIDRKRYTSTKEVLDATLIHQSITGLYETRIDLSQLGGDGGGGGGSGGGGSGGGGSGGIPWLMKKPLQLTTLVPLQEYEERLLKQTMLTGSYKEKLQSLFLKYDALWQHWENQVGHRRIKPHHIATGTVNPRPQKQYPINPKAKASIQTVINDLLKQGVLIQQNSIMNTPVYPVPKPDGKWRMVLDYREVNKTIPLIAAQNQHSAGILSSIFRGKYKTTLDLSNGFWAHSITPESYWLTAFTWLGQQYCWTRLPQGFLNSPALFNADVVDLLKEVPNVQVYVDDIYISHDDPREHLEQLEKVFSLLLNAGYVVSLKKSEIAQHEVEFLGFNITKEGRGLTETFKQKLLNITPPRDLKQLQSILGKLNFARNFIPNFSELVKPLYNIIATAPGKYITWTTDNSQQLQNIISMLNSAENLEERNPEVRLIMKVNTSPSAGYIRFYNEFAKRPIMYLNYVYTKAEVKFTNTEKLLTTIHKGLIKALDLGMGQEILVYSPIVSMTKIQKTPLPERKALPIRWITWMSYLEDPRIQFHYDKTLPELQQVPTVTDDIIAKIKHPSEFSMVFYTDGSAIKHPNVNKSHNAGMGIAQVQFKPEFTVINTWSIPLGDHTAQLAEVAAVEFACKKALKIDGPVLIVTDSFYVAESVNKELPYWQSNGFFNNKKKPLKHVSKWKSIADCIQLKPDIIIIHEKGHQPTASTFHTEGNNLADKLATQGSYVVNAGKRTADGSEFEKRTADGSEFESPKKKAKVE

SEQ ID NO: 6140 - protein, 2098 aa, synthetic construct
MPAAKRVKLDGGDKKYSIGLDIGTNSVGWAVITDEYKVPSKKFKVLGNTDRHSIKKNLIGALLFDSGETAEATRLKRTARRRYTRRKNRICYLQEIFSNEMAKVDDSFFHRLEESFLVEEDKKHERHPIFGNIVDEVAYHEKYPTIYHLRKKLVDSTDKADLRLIYLALAHMIKFRGHFLIEGDLNPDNSDVDKLFIQLVQTYNQLFEENPINASGVDAKAILSARLSKSRRLENLIAQLPGEKKNGLFGNLIALSLGLTPNFKSNFDLAEDAKLQLSKDTYDDDLDNLLAQIGDQYADLFLAAKNLSDAILLSDILRVNTEITKAPLSASMIKRYDEHHQDLTLLKALVRQQLPEKYKEIFFDQSKNGYAGYIDGGASQEEFYKFIKPILEKMDGTEELLVKLNREDLLRKQRTFDNGSIPHQIHLGELHAILRRQEDFYPFLKDNREKIEKILTFRIPYYVGPLARGNSRFAWMTRKSEETITPWNFEEVVDKGASAQSFIERMTNFDKNLPNEKVLPKHSLLYEYFTVYNELTKVKYVTEGMRKPAFLSGEQKKAIVDLLFKTNRKVTVKQLKEDYFKKIECFDSVEISGVEDRFNASLGTYHDLLKIIKDKDFLDNEENEDILEDIVLTLTLFEDREMIEERLKTYAHLFDDKVMKQLKRRRYTGWGRLSRKLINGIRDKQSGKTILDFLKSDGFANRNFMQLIHDDSLTFKEDIQKAQVSGQGDSLHEHIANLAGSPAIKKGILQTVKVVDELVKVMGRHKPENIVIEMARENQTTQKGQKNSRERMKRIEEGIKELGSQILKEHPVENTQLQNEKLYLYYLQNGRDMYVDQELDINRLSDYDVDHIVPQSFLKDDSIDNKVLTRSDKARGKSDNVPSEEVVKKMKNYWRQLLNAKLITQRKFDNLTKAERGGLSELDKAGFIKRQLVETRQITKHVAQILDSRMNTKYDENDKLIREVKVITLKSKLVSDFRKDFQFYKVREINNYHHAHDAYLNAVVGTALIKKYPKLESEFVYGDYKVYDVRKMIAKSEQEIGKATAKYFFYSNIMNFFKTEITLANGEIRKRPLIETNGETGEIVWDKGRDFATVRKVLSMPQVNIVKKTEVQTGGFSKESILPKRNSDKLIARKKDWDPKKYGGFDSPTVAYSVLVVAKVEKGKSKKLKSVKELLGITIMERSSFEKNPIDFLEAKGYKEVKKDLIIKLPKYSLFELENGRKRMLASAGELQKGNELALPSKYVNFLYLASHYEKLKGSPEDNEQKQLFVEQHKHYLDEIIEQISEFSKRVILADANLDKVLSAYNKHRDKPIREQAENIIHLFTLTNLGAPAAFKYFDTTIDRKRYTSTKEVLDATLIHQSITGLYETRIDLSQLGGDGGGGGGSGGGGSGGGGSGGVLNLEEEYRLHEKPVPSSIDPSWLQLFPTVWAERAGMGLANQVPPVVVELRSGASPVAVRQYPMSKEAREGIRPHIQRFLDLGVLVPCQSPWNTPLLPVKKPGTNDYRPVQDLREINKRVQDIHPTVPNPYNLLSSLPPSHTWYSVLDLKDAFFCLKLHPNSQPLFAFEWRDPEKGNTGQLTWTRLPQGFKNSPTLFNEALHRDLAPFRALNPQVVLLQYVDDLLVAAPTYRDCKEGTQKLLQELSKLGYRVSAKKAQLCQKEVTYLGYLLKEGKRWLTPARKATVMKIPPPTTPRQVREFLGTAGFCRLWIPGFASLAAPLYPLTKPSIPFIWTEEHQKAFDRIKEALLSAPALALPDLTKPFTLYVDERAGVARGVLTQTLGPWRRPVAYLSKKLDPVASGWPTCLKAVAAVALLLKDADKLTLGQNVTVIASHSLESIVRQPPDRWMTNARMTHYQSLLLNERVSFAPPAVLNPATLLPVESEATPVHRCSEILAEETGTRRDLKDQPLPGVPAWYTDGSSFIAEGKRRAGAAIVDGKRTVWASSLPEGTSAQKAELVALTQALRLAEGKDINIYTDSRYAFATAHIHGAIYKQRGWLTSAGKDIKNKEEILALLEAIHLPKRVAIIHCPGHQKGNDPVATGNRRADEAAKQAALSTRVLAETTKPAGKRTADGSEFEKRTADGSEFESPKKKAKVE

SEQ ID NO: 6141 - protein, 2098 aa, synthetic construct
MPAAKRVKLDGGDKKYSIGLDIGTNSVGWAVITDEYKVPSKKFKVLGNTDRHSIKKNLIGALLFDSGETAEATRLKRTARRRYTRRKNRICYLQEIFSNEMAKVDDSFFHRLEESFLVEEDKKHERHPIFGNIVDEVAYHEKYPTIYHLRKKLVDSTDKADLRLIYLALAHMIKFRGHFLIEGDLNPDNSDVDKLFIQLVQTYNQLFEENPINASGVDAKAILSARLSKSRRLENLIAQLPGEKKNGLFGNLIALSLGLTPNFKSNFDLAEDAKLQLSKDTYDDDLDNLLAQIGDQYADLFLAAKNLSDAILLSDILRVNTEITKAPLSASMIKRYDEHHQDLTLLKALVRQQLPEKYKEIFFDQSKNGYAGYIDGGASQEEFYKFIKPILEKMDGTEELLVKLNREDLLRKQRTFDNGSIPHQIHLGELHAILRRQEDFYPFLKDNREKIEKILTFRIPYYVGPLARGNSRFAWMTRKSEETITPWNFEEVVDKGASAQSFIERMTNFDKNLPNEKVLPKHSLLYEYFTVYNELTKVKYVTEGMRKPAFLSGEQKKAIVDLLFKTNRKVTVKQLKEDYFKKIECFDSVEISGVEDRFNASLGTYHDLLKIIKDKDFLDNEENEDILEDIVLTLTLFEDREMIEERLKTYAHLFDDKVMKQLKRRRYTGWGRLSRKLINGIRDKQSGKTILDFLKSDGFANRNFMQLIHDDSLTFKEDIQKAQVSGQGDSLHEHIANLAGSPAIKKGILQTVKVVDELVKVMGRHKPENIVIEMARENQTTQKGQKNSRERMKRIEEGIKELGSQILKEHPVENTQLQNEKLYLYYLQNGRDMYVDQELDINRLSDYDVDHIVPQSFLKDDSIDNKVLTRSDKARGKSDNVPSEEVVKKMKNYWRQLLNAKLITQRKFDNLTKAERGGLSELDKAGFIKRQLVETRQITKHVAQILDSRMNTKYDENDKLIREVKVITLKSKLVSDFRKDFQFYKVREINNYHHAHDAYLNAVVGTALIKKYPKLESEFVYGDYKVYDVRKMIAKSEQEIGKATAKYFFYSNIMNFFKTEITLANGEIRKRPLIETNGETGEIVWDKGRDFATVRKVLSMPQVNIVKKTEVQTGGFSKESILPKRNSDKLIARKKDWDPKKYGGFDSPTVAYSVLVVAKVEKGKSKKLKSVKELLGITIMERSSFEKNPIDFLEAKGYKEVKKDLIIKLPKYSLFELENGRKRMLASAGELQKGNELALPSKYVNFLYLASHYEKLKGSPEDNEQKQLFVEQHKHYLDEIIEQISEFSKRVILADANLDKVLSAYNKHRDKPIREQAENIIHLFTLTNLGAPAAFKYFDTTIDRKRYTSTKEVLDATLIHQSITGLYETRIDLSQLGGDGGGGGGSGGGGSGGGGSGGVLNLEEEYRLHEKPVPSSIDPSWLQLFPTVWAERAGMGLANQVPPVVVELRSGASPVAVRQYPMSKEAREGIRPHIQRFLDLGVLVPCQSPWNTPLLPVKKPGTNDYRPVQDLREINKRVQDIHPTVPNPYNLLSSLPPSHTWYSVLDLKDAFFCLKLHPNSQPLFAFEWRDPEKGNTGQLTWTRLPQGFKNSPTLFNEALHRDLAPFRALNPQVVLLQYVDDLLVAAPTYRDCKEGTQKLLQELSKLGYRVSAKKAQLCQKEVTYLGYLLKEGKRWLTPARKATVMKIPPPTTPRQVREFLGKAGFCRLFIPGFASLAAPLYPLTKPSIPFIWTEEHQKAFDRIKEALLSAPALALPDLTKPFTLYVDERAGVARGVLTQTLGPWRRPVAYLSKKLDPVASGWPTCLKAVAAVALLLKDADKLTLGQNVTVIASHSLESIVRQPPDRWMTNARMTHYQSLLLNERVSFAPPAVLNPATLLPVESEATPVHRCSEILAEETGTRRDLKDQPLPGVPAWYTDGSSFIAEGKRRAGAAIVDGKRTVWASSLPEGTSAQKAELVALTQALRLAEGKDINIYTDSRYAFATAHIHGAIYKQRGWLTSAGKDIKNKEEILALLEAIHLPKRVAIIHCPGHQKGNDPVATGNRRADEAAKQAALSTRVLAETTKPAGKRTADGSEFEKRTADGSEFESPKKKAKVE

SEQ ID NO: 6142 - protein, 2100 aa, synthetic construct
MPAAKRVKLDGGDKKYSIGLDIGTNSVGWAVITDEYKVPSKKFKVLGNTDRHSIKKNLIGALLFDSGETAEATRLKRTARRRYTRRKNRICYLQEIFSNEMAKVDDSFFHRLEESFLVEEDKKHERHPIFGNIVDEVAYHEKYPTIYHLRKKLVDSTDKADLRLIYLALAHMIKFRGHFLIEGDLNPDNSDVDKLFIQLVQTYNQLFEENPINASGVDAKAILSARLSKSRRLENLIAQLPGEKKNGLFGNLIALSLGLTPNFKSNFDLAEDAKLQLSKDTYDDDLDNLLAQIGDQYADLFLAAKNLSDAILLSDILRVNTEITKAPLSASMIKRYDEHHQDLTLLKALVRQQLPEKYKEIFFDQSKNGYAGYIDGGASQEEFYKFIKPILEKMDGTEELLVKLNREDLLRKQRTFDNGSIPHQIHLGELHAILRRQEDFYPFLKDNREKIEKILTFRIPYYVGPLARGNSRFAWMTRKSEETITPWNFEEVVDKGASAQSFIERMTNFDKNLPNEKVLPKHSLLYEYFTVYNELTKVKYVTEGMRKPAFLSGEQKKAIVDLLFKTNRKVTVKQLKEDYFKKIECFDSVEISGVEDRFNASLGTYHDLLKIIKDKDFLDNEENEDILEDIVLTLTLFEDREMIEERLKTYAHLFDDKVMKQLKRRRYTGWGRLSRKLINGIRDKQSGKTILDFLKSDGFANRNFMQLIHDDSLTFKEDIQKAQVSGQGDSLHEHIANLAGSPAIKKGILQTVKVVDELVKVMGRHKPENIVIEMARENQTTQKGQKNSRERMKRIEEGIKELGSQILKEHPVENTQLQNEKLYLYYLQNGRDMYVDQELDINRLSDYDVDHIVPQSFLKDDSIDNKVLTRSDKARGKSDNVPSEEVVKKMKNYWRQLLNAKLITQRKFDNLTKAERGGLSELDKAGFIKRQLVETRQITKHVAQILDSRMNTKYDENDKLIREVKVITLKSKLVSDFRKDFQFYKVREINNYHHAHDAYLNAVVGTALIKKYPKLESEFVYGDYKVYDVRKMIAKSEQEIGKATAKYFFYSNIMNFFKTEITLANGEIRKRPLIETNGETGEIVWDKGRDFATVRKVLSMPQVNIVKKTEVQTGGFSKESILPKRNSDKLIARKKDWDPKKYGGFDSPTVAYSVLVVAKVEKGKSKKLKSVKELLGITIMERSSFEKNPIDFLEAKGYKEVKKDLIIKLPKYSLFELENGRKRMLASAGELQKGNELALPSKYVNFLYLASHYEKLKGSPEDNEQKQLFVEQHKHYLDEIIEQISEFSKRVILADANLDKVLSAYNKHRDKPIREQAENIIHLFTLTNLGAPAAFKYFDTTIDRKRYTSTKEVLDATLIHQSITGLYETRIDLSQLGGDGGGGGGSGGGGSGGGGSGGTLNIEDEYRLHETSKEPDVPLGSTWLSDFPQAWAETGGMGLAVRQAPLIIPLKATSTPVSIKQYPMSQEARLGIKPHIQRLLDQGILVPCQSPWNTPLLPVKKPGTNDYRPVQDLREVNKRVEDIHPTVPNPYNLLSGLPPSHQWYTVLDLKDAFFCLRLHPTSQPLFAFEWRDPEMGISGQLTWTRLPQGFKNSPTLFNEALHRDLADFRIQHPDLILLQYVDDLLLAATSEQDCQRGTRALLQTLGNLGYRASAKKAQICQKQVKYLGYLLKEGQRWLTEARKETVMGQPTPKTPRQLREFLGTAGFCRLWIPGFAEMAAPLYPLTKPGTLFNWGPDQQKAYQEIKQALLTAPALGLPDLTKPFELFVDEKQGYAKGVLTQKLGPWRRPVAYLSKKLDPVAAGWPPCLRMVAAIAVLTKDAGKLTMGQPLVILAPHAVEALVKQPPDRWLSNARMTHYQAMLLDTDRVQFGPVVALNPATLLPLPEKEAPHDCLEILAETHGTRPDLTDQPIPDADYTWYTDGSSFLQEGQRRAGAAVTTETEVIWARALPAGTSAQRAELIALTQALKMAEGKKLNVYTDSRYAFATAHVHGEIYRRRGWLTSEGREIKNKNEILALLKALFLPKRLSIIHCPGHQKGNSAEARGNRMADQAAREAAMKAVLETSTLLAGKRTADGSEFEKRTADGSEFESPKKKAKVE

SEQ ID NO: 6143 - protein, 2107 aa, synthetic construct
MPAAKRVKLDGGDKKYSIGLDIGTNSVGWAVITDEYKVPSKKFKVLGNTDRHSIKKNLIGALLFDSGETAEATRLKRTARRRYTRRKNRICYLQEIFSNEMAKVDDSFFHRLEESFLVEEDKKHERHPIFGNIVDEVAYHEKYPTIYHLRKKLVDSTDKADLRLIYLALAHMIKFRGHFLIEGDLNPDNSDVDKLFIQLVQTYNQLFEENPINASGVDAKAILSARLSKSRRLENLIAQLPGEKKNGLFGNLIALSLGLTPNFKSNFDLAEDAKLQLSKDTYDDDLDNLLAQIGDQYADLFLAAKNLSDAILLSDILRVNTEITKAPLSASMIKRYDEHHQDLTLLKALVRQQLPEKYKEIFFDQSKNGYAGYIDGGASQEEFYKFIKPILEKMDGTEELLVKLNREDLLRKQRTFDNGSIPHQIHLGELHAILRRQEDFYPFLKDNREKIEKILTFRIPYYVGPLARGNSRFAWMTRKSEETITPWNFEEVVDKGASAQSFIERMTNFDKNLPNEKVLPKHSLLYEYFTVYNELTKVKYVTEGMRKPAFLSGEQKKAIVDLLFKTNRKVTVKQLKEDYFKKIECFDSVEISGVEDRFNASLGTYHDLLKIIKDKDFLDNEENEDILEDIVLTLTLFEDREMIEERLKTYAHLFDDKVMKQLKRRRYTGWGRLSRKLINGIRDKQSGKTILDFLKSDGFANRNFMQLIHDDSLTFKEDIQKAQVSGQGDSLHEHIANLAGSPAIKKGILQTVKVVDELVKVMGRHKPENIVIEMARENQTTQKGQKNSRERMKRIEEGIKELGSQILKEHPVENTQLQNEKLYLYYLQNGRDMYVDQELDINRLSDYDVDHIVPQSFLKDDSIDNKVLTRSDKARGKSDNVPSEEVVKKMKNYWRQLLNAKLITQRKFDNLTKAERGGLSELDKAGFIKRQLVETRQITKHVAQILDSRMNTKYDENDKLIREVKVITLKSKLVSDFRKDFQFYKVREINNYHHAHDAYLNAVVGTALIKKYPKLESEFVYGDYKVYDVRKMIAKSEQEIGKATAKYFFYSNIMNFFKTEITLANGEIRKRPLIETNGETGEIVWDKGRDFATVRKVLSMPQVNIVKKTEVQTGGFSKESILPKRNSDKLIARKKDWDPKKYGGFDSPTVAYSVLVVAKVEKGKSKKLKSVKELLGITIMERSSFEKNPIDFLEAKGYKEVKKDLIIKLPKYSLFELENGRKRMLASAGELQKGNELALPSKYVNFLYLASHYEKLKGSPEDNEQKQLFVEQHKHYLDEIIEQISEFSKRVILADANLDKVLSAYNKHRDKPIREQAENIIHLFTLTNLGAPAAFKYFDTTIDRKRYTSTKEVLDATLIHQSITGLYETRIDLSQLGGDGGGGGGSGGGGSGGGGSGGGGSGGTAPLEEEYRLFLEAPIQNVTLLEQWKREIPKVWAEINPPGLASTQAPIHVQLLSTALPVRVRQYPITLEAKRSLRETIRKFRAAGILRPVHSPWNTPLLPVRKSGTSEYRMVQDLREVNKRVETIHPTVPNPYTLLSLLPPDRIWYSVLDLKDAFFCIPLAPESQLIFAFEWADAEEGESGQLTWTRLPQGFKNSPTLFDEALNRDLQGFRLDHPSVSLLQYVDDLLIAADTQAACLSATRDLLMTLAELGYRVSGKKAQLCQEEVTYLGFKIHKGSRSLSNSRTQAILQIPVPKTKRQVREFLGTIGYCRLWIPGFAELAQPLYAATRGGNDPLVWGEKEEEAFQSLKLALTQPPALALPSLDKPFQLFVEETSGAAKGVLTQALGPWKRPVAYLSKRLDPVAAGWPRCLRAIAAAALLTREASKLTFGQDIEITSSHNLESLLRSPPDKWLTNARITQYQVLLLDPPRVRFKQTAALNPATLLPETDDTLPIHHCLDTLDSLTSTRPDLTDQPLAQAEATLFTDGSSYIRDGKRYAGAAVVTLDSVIWAEPLPIGTSAQKAELIALTKALEWSKDKSVNIYTDSRYAFATLHVHGMIYRERGLLTAGGKAIKNAPEILALLTAVWLPKRVAVMHCKGHQKDDAPTSTGNRRADEVAREVAIRPLSTQATISAGKRTADGSEFEKRTADGSEFESPKKKAKVE

SEQ ID NO: 6144 - protein, 2107 aa, synthetic construct
MPAAKRVKLDGGDKKYSIGLDIGTNSVGWAVITDEYKVPSKKFKVLGNTDRHSIKKNLIGALLFDSGETAEATRLKRTARRRYTRRKNRICYLQEIFSNEMAKVDDSFFHRLEESFLVEEDKKHERHPIFGNIVDEVAYHEKYPTIYHLRKKLVDSTDKADLRLIYLALAHMIKFRGHFLIEGDLNPDNSDVDKLFIQLVQTYNQLFEENPINASGVDAKAILSARLSKSRRLENLIAQLPGEKKNGLFGNLIALSLGLTPNFKSNFDLAEDAKLQLSKDTYDDDLDNLLAQIGDQYADLFLAAKNLSDAILLSDILRVNTEITKAPLSASMIKRYDEHHQDLTLLKALVRQQLPEKYKEIFFDQSKNGYAGYIDGGASQEEFYKFIKPILEKMDGTEELLVKLNREDLLRKQRTFDNGSIPHQIHLGELHAILRRQEDFYPFLKDNREKIEKILTFRIPYYVGPLARGNSRFAWMTRKSEETITPWNFEEVVDKGASAQSFIERMTNFDKNLPNEKVLPKHSLLYEYFTVYNELTKVKYVTEGMRKPAFLSGEQKKAIVDLLFKTNRKVTVKQLKEDYFKKIECFDSVEISGVEDRFNASLGTYHDLLKIIKDKDFLDNEENEDILEDIVLTLTLFEDREMIEERLKTYAHLFDDKVMKQLKRRRYTGWGRLSRKLINGIRDKQSGKTILDFLKSDGFANRNFMQLIHDDSLTFKEDIQKAQVSGQGDSLHEHIANLAGSPAIKKGILQTVKVVDELVKVMGRHKPENIVIEMARENQTTQKGQKNSRERMKRIEEGIKELGSQILKEHPVENTQLQNEKLYLYYLQNGRDMYVDQELDINRLSDYDVDHIVPQSFLKDDSIDNKVLTRSDKARGKSDNVPSEEVVKKMKNYWRQLLNAKLITQRKFDNLTKAERGGLSELDKAGFIKRQLVETRQITKHVAQILDSRMNTKYDENDKLIREVKVITLKSKLVSDFRKDFQFYKVREINNYHHAHDAYLNAVVGTALIKKYPKLESEFVYGDYKVYDVRKMIAKSEQEIGKATAKYFFYSNIMNFFKTEITLANGEIRKRPLIETNGETGEIVWDKGRDFATVRKVLSMPQVNIVKKTEVQTGGFSKESILPKRNSDKLIARKKDWDPKKYGGFDSPTVAYSVLVVAKVEKGKSKKLKSVKELLGITIMERSSFEKNPIDFLEAKGYKEVKKDLIIKLPKYSLFELENGRKRMLASAGELQKGNELALPSKYVNFLYLASHYEKLKGSPEDNEQKQLFVEQHKHYLDEIIEQISEFSKRVILADANLDKVLSAYNKHRDKPIREQAENIIHLFTLTNLGAPAAFKYFDTTIDRKRYTSTKEVLDATLIHQSITGLYETRIDLSQLGGDGGGGGGSGGGGSGGGGSGGGGSGGTAPLEEEYRLFLEAPIQNVTLLEQWKREIPKVWAEINPPGLASTQAPIHVQLLSTALPVRVRQYPITLEAKRSLRETIRKFRAAGILRPVHSPWNTPLLPVRKSGTSEYRMVQDLREVNKRVETIHPTVPNPYTLLSLLPPDRIWYSVLDLKDAFFCIPLAPESQLIFAFEWADAEEGESGQLTWTRLPQGFKNSPTLFNEALNRDLQGFRLDHPSVSLLQYVDDLLIAADTQAACLSATRDLLMTLAELGYRVSGKKAQLCQEEVTYLGFKIHKGSRSLSNSRTQAILQIPVPKTKRQVREFLGTIGYCRLWIPGFAELAQPLYAATRPGNDPLVWGEKEEEAFQSLKLALTQPPALALPSLDKPFQLFVEETSGAAKGVLTQALGPWKRPVAYLSKRLDPVAAGWPRCLRAIAAAALLTREASKLTFGQDIEITSSHNLESLLRSPPDKWLTNARITQYQVLLLDPPRVRFKQTAALNPATLLPETDDTLPIHHCLDTLDSLTSTRPDLTDQPLAQAEATLFTDGSSYIRDGKRYAGAAVVTLDSVIWAEPLPIGTSAQKAELIALTKALEWSKDKSVNIYTDSRYAFATLHVHGMIYRERGWLTAGGKAIKNAPEILALLTAVWLPKRVAVMHCKGHQKDDAPTSTGNRRADEVAREVAIRPLSTQATISAGKRTADGSEFEKRTADGSEFESPKKKAKVE

SEQ ID NO: 6145 - protein, 2096 aa, synthetic construct
MPAAKRVKLDGGDKKYSIGLDIGTNSVGWAVITDEYKVPSKKFKVLGNTDRHSIKKNLIGALLFDSGETAEATRLKRTARRRYTRRKNRICYLQEIFSNEMAKVDDSFFHRLEESFLVEEDKKHERHPIFGNIVDEVAYHEKYPTIYHLRKKLVDSTDKADLRLIYLALAHMIKFRGHFLIEGDLNPDNSDVDKLFIQLVQTYNQLFEENPINASGVDAKAILSARLSKSRRLENLIAQLPGEKKNGLFGNLIALSLGLTPNFKSNFDLAEDAKLQLSKDTYDDDLDNLLAQIGDQYADLFLAAKNLSDAILLSDILRVNTEITKAPLSASMIKRYDEHHQDLTLLKALVRQQLPEKYKEIFFDQSKNGYAGYIDGGASQEEFYKFIKPILEKMDGTEELLVKLNREDLLRKQRTFDNGSIPHQIHLGELHAILRRQEDFYPFLKDNREKIEKILTFRIPYYVGPLARGNSRFAWMTRKSEETITPWNFEEVVDKGASAQSFIERMTNFDKNLPNEKVLPKHSLLYEYFTVYNELTKVKYVTEGMRKPAFLSGEQKKAIVDLLFKTNRKVTVKQLKEDYFKKIECFDSVEISGVEDRFNASLGTYHDLLKIIKDKDFLDNEENEDILEDIVLTLTLFEDREMIEERLKTYAHLFDDKVMKQLKRRRYTGWGRLSRKLINGIRDKQSGKTILDFLKSDGFANRNFMQLIHDDSLTFKEDIQKAQVSGQGDSLHEHIANLAGSPAIKKGILQTVKVVDELVKVMGRHKPENIVIEMARENQTTQKGQKNSRERMKRIEEGIKELGSQILKEHPVENTQLQNEKLYLYYLQNGRDMYVDQELDINRLSDYDVDHIVPQSFLKDDSIDNKVLTRSDKARGKSDNVPSEEVVKKMKNYWRQLLNAKLITQRKFDNLTKAERGGLSELDKAGFIKRQLVETRQITKHVAQILDSRMNTKYDENDKLIREVKVITLKSKLVSDFRKDFQFYKVREINNYHHAHDAYLNAVVGTALIKKYPKLESEFVYGDYKVYDVRKMIAKSEQEIGKATAKYFFYSNIMNFFKTEITLANGEIRKRPLIETNGETGEIVWDKGRDFATVRKVLSMPQVNIVKKTEVQTGGFSKESILPKRNSDKLIARKKDWDPKKYGGFDSPTVAYSVLVVAKVEKGKSKKLKSVKELLGITIMERSSFEKNPIDFLEAKGYKEVKKDLIIKLPKYSLFELENGRKRMLASAGELQKGNELALPSKYVNFLYLASHYEKLKGSPEDNEQKQLFVEQHKHYLDEIIEQISEFSKRVILADANLDKVLSAYNKHRDKPIREQAENIIHLFTLTNLGAPAAFKYFDTTIDRKRYTSTKEVLDATLIHQSITGLYETRIDLSQLGGDGGGGGGSGGGGSGGGGSGGGGSGGVPWILKKPLELTIKLDLEEQQGTLLNNSILSKKGKEELKQLFEKYSALWQSWENQVGHRRIRPHKIATGTVKPTPQKQYHINPKAKPDIQIVINDLLKQGVLIQKESTMNTPVYPVPKPNGRWRMVLDYRAVNKVTPLIAVQNQHSYGILGSLFKGRYKTTIDLSNGFWAHPIVPEDYWITAFTWQGKQYCWTVLPQGFLNSPGLFNGDVVDLLQGIPNVEVYVDDVYISHDSEKEHLEYLDILFNRLKEAGYIISLKKSNIANSIVDFLGFQITNEGRGLTDTFKEKLENITAPTTLKQLQSILGLLNFARNFIPDFTELIAPLYALIPKSPKNYVPWQIEHSTTLETLITKLNGAEYLQGRKGDKTLIMKVNASYTTGYIRYYNEGEKKPISYVSIVFSKTELKFTELEKLLTTVHKGLLKALDLSMGQNIHVYSPIVSMQNIQKTPQTAKKALASRWLSWLSYLEDPRIRFFYDPQMPALKDLPAVDTGKDNKKHPSNFQHIFYTDGSAITSPTKEGHLNAGMGIVYFINKDGNLQKQQEWSISLGNHTAQFAEIAAFEFALKKCLPLGGNILVVTDSNYVAKAYNEELDVWASNGFVNNRKKPLKHISKWKSVADLKRLRPDVVVTHEPGHQKLDSSPHAYGNNLADQLATQASFKVHAGKRTADGSEFEKRTADGSEFESPKKKAKVE

SEQ ID NO: 6146 - protein, 2104 aa, synthetic construct
MPAAKRVKLDGGDKKYSIGLDIGTNSVGWAVITDEYKVPSKKFKVLGNTDRHSIKKNLIGALLFDSGETAEATRLKRTARRRYTRRKNRICYLQEIFSNEMAKVDDSFFHRLEESFLVEEDKKHERHPIFGNIVDEVAYHEKYPTIYHLRKKLVDSTDKADLRLIYLALAHMIKFRGHFLIEGDLNPDNSDVDKLFIQLVQTYNQLFEENPINASGVDAKAILSARLSKSRRLENLIAQLPGEKKNGLFGNLIALSLGLTPNFKSNFDLAEDAKLQLSKDTYDDDLDNLLAQIGDQYADLFLAAKNLSDAILLSDILRVNTEITKAPLSASMIKRYDEHHQDLTLLKALVRQQLPEKYKEIFFDQSKNGYAGYIDGGASQEEFYKFIKPILEKMDGTEELLVKLNREDLLRKQRTFDNGSIPHQIHLGELHAILRRQEDFYPFLKDNREKIEKILTFRIPYYVGPLARGNSRFAWMTRKSEETITPWNFEEVVDKGASAQSFIERMTNFDKNLPNEKVLPKHSLLYEYFTVYNELTKVKYVTEGMRKPAFLSGEQKKAIVDLLFKTNRKVTVKQLKEDYFKKIECFDSVEISGVEDRFNASLGTYHDLLKIIKDKDFLDNEENEDILEDIVLTLTLFEDREMIEERLKTYAHLFDDKVMKQLKRRRYTGWGRLSRKLINGIRDKQSGKTILDFLKSDGFANRNFMQLIHDDSLTFKEDIQKAQVSGQGDSLHEHIANLAGSPAIKKGILQTVKVVDELVKVMGRHKPENIVIEMARENQTTQKGQKNSRERMKRIEEGIKELGSQILKEHPVENTQLQNEKLYLYYLQNGRDMYVDQELDINRLSDYDVDHIVPQSFLKDDSIDNKVLTRSDKARGKSDNVPSEEVVKKMKNYWRQLLNAKLITQRKFDNLTKAERGGLSELDKAGFIKRQLVETRQITKHVAQILDSRMNTKYDENDKLIREVKVITLKSKLVSDFRKDFQFYKVREINNYHHAHDAYLNAVVGTALIKKYPKLESEFVYGDYKVYDVRKMIAKSEQEIGKATAKYFFYSNIMNFFKTEITLANGEIRKRPLIETNGETGEIVWDKGRDFATVRKVLSMPQVNIVKKTEVQTGGFSKESILPKRNSDKLIARKKDWDPKKYGGFDSPTVAYSVLVVAKVEKGKSKKLKSVKELLGITIMERSSFEKNPIDFLEAKGYKEVKKDLIIKLPKYSLFELENGRKRMLASAGELQKGNELALPSKYVNFLYLASHYEKLKGSPEDNEQKQLFVEQHKHYLDEIIEQISEFSKRVILADANLDKVLSAYNKHRDKPIREQAENIIHLFTLTNLGAPAAFKYFDTTIDRKRYTSTKEVLDATLIHQSITGLYETRIDLSQLGGDGGGGGGSGGGGSGGGGSGGGGSGGTLQLEEEYRLFEPESTQKQEMDIWLKNFPQAWAETGGMGTAHCQAPVLIQLKATATPISIRQYPMPHEAYQGIKPHIRRMLDQGILKPCQSPWNTPLLPVKKPGTEDYRPVQDLREVNKRVEDIHPTVPNPYNLLSTLPPSHPWYTVLDLKDAFFCLRLHSESQLLFAFEWRDPEIGLSGQLTWTRLPQGFKNSPTLFDEALHSDLADFRVRYPALVLLQYVDDLLLAAATRTECLEGTKALLETLGNKGYRASAKKAQICLQEVTYLGYSLKDGQRWLTKARKEAILSIPVPKNSRQVREFLGTAGYCRLWIPGFAELAAPLYPLTRPGTLFQWGTEQQLAFEDIKKALLSSPALGLPDITKPFELFIDENSGFAKGVLVQKLGPWKRPVAYLSKKLDTVASGWPPCLRMVAAIAILVKDAGKLTLGQPLTILTSHPVEALVRQPPNKWLSNARMTHYQAMLLDAERVHFGPTVSLNPATLLPLPSGGNHHDCLQILAETHGTRPDLTDQPLPDADLTWYTDGSSFIRNGEREAGAAVTTESEVIWAAPLPPGTSAQRAELIALTQALKMAEGKKLTVYTDSRYAFATTHVHGEIYRRRGLLTSEGKEIKNKNEILALLEALFLPKRLSIIHCPGHQKGDSPQAKGNRLADDTAKKAATETHSSLTVLPAGKRTADGSEFEKRTADGSEFESPKKKAKVE

SEQ ID NO: 6147 - protein, 2104 aa, synthetic construct
MPAAKRVKLDGGDKKYSIGLDIGTNSVGWAVITDEYKVPSKKFKVLGNTDRHSIKKNLIGALLFDSGETAEATRLKRTARRRYTRRKNRICYLQEIFSNEMAKVDDSFFHRLEESFLVEEDKKHERHPIFGNIVDEVAYHEKYPTIYHLRKKLVDSTDKADLRLIYLALAHMIKFRGHFLIEGDLNPDNSDVDKLFIQLVQTYNQLFEENPINASGVDAKAILSARLSKSRRLENLIAQLPGEKKNGLFGNLIALSLGLTPNFKSNFDLAEDAKLQLSKDTYDDDLDNLLAQIGDQYADLFLAAKNLSDAILLSDILRVNTEITKAPLSASMIKRYDEHHQDLTLLKALVRQQLPEKYKEIFFDQSKNGYAGYIDGGASQEEFYKFIKPILEKMDGTEELLVKLNREDLLRKQRTFDNGSIPHQIHLGELHAILRRQEDFYPFLKDNREKIEKILTFRIPYYVGPLARGNSRFAWMTRKSEETITPWNFEEVVDKGASAQSFIERMTNFDKNLPNEKVLPKHSLLYEYFTVYNELTKVKYVTEGMRKPAFLSGEQKKAIVDLLFKTNRKVTVKQLKEDYFKKIECFDSVEISGVEDRFNASLGTYHDLLKIIKDKDFLDNEENEDILEDIVLTLTLFEDREMIEERLKTYAHLFDDKVMKQLKRRRYTGWGRLSRKLINGIRDKQSGKTILDFLKSDGFANRNFMQLIHDDSLTFKEDIQKAQVSGQGDSLHEHIANLAGSPAIKKGILQTVKVVDELVKVMGRHKPENIVIEMARENQTTQKGQKNSRERMKRIEEGIKELGSQILKEHPVENTQLQNEKLYLYYLQNGRDMYVDQELDINRLSDYDVDHIVPQSFLKDDSIDNKVLTRSDKARGKSDNVPSEEVVKKMKNYWRQLLNAKLITQRKFDNLTKAERGGLSELDKAGFIKRQLVETRQITKHVAQILDSRMNTKYDENDKLIREVKVITLKSKLVSDFRKDFQFYKVREINNYHHAHDAYLNAVVGTALIKKYPKLESEFVYGDYKVYDVRKMIAKSEQEIGKATAKYFFYSNIMNFFKTEITLANGEIRKRPLIETNGETGEIVWDKGRDFATVRKVLSMPQVNIVKKTEVQTGGFSKESILPKRNSDKLIARKKDWDPKKYGGFDSPTVAYSVLVVAKVEKGKSKKLKSVKELLGITIMERSSFEKNPIDFLEAKGYKEVKKDLIIKLPKYSLFELENGRKRMLASAGELQKGNELALPSKYVNFLYLASHYEKLKGSPEDNEQKQLFVEQHKHYLDEIIEQISEFSKRVILADANLDKVLSAYNKHRDKPIREQAENIIHLFTLTNLGAPAAFKYFDTTIDRKRYTSTKEVLDATLIHQSITGLYETRIDLSQLGGDGGGGGGSGGGGSGGGGSGGGGSGGTLQLEEEYRLFEPESTQKQEMDIWLKNFPQAWAETGGMGTAHCQAPVLIQLKATATPISIRQYPMPHEAYQGIKPHIRRMLDQGILKPCQSPWNTPLLPVKKPGTEDYRPVQDLREVNKRVEDIHPTVPNPYNLLSTLPPSHPWYTVLDLKDAFFCLRLHSESQLLFAFEWRDPEIGLSGQLTWTRLPQGFKNSPTLFNEALHSDLADFRVRYPALVLLQYVDDLLLAAATRTECLEGTKALLETLGNKGYRASAKKAQICLQEVTYLGYSLKDGQRWLTKARKEAILSIPVPKNSRQVREFLGTAGYCRLWIPGFAELAAPLYPLTRPGTLFQWGTEQQLAFEDIKKALLSSPALGLPDITKPFELFIDENSGFAKGVLVQKLGPWKRPVAYLSKKLDTVASGWPPCLRMVAAIAILVKDAGKLTLGQPLTILTSHPVEALVRQPPNKWLSNARMTHYQAMLLDAERVHFGPTVSLNPATLLPLPSGGNHHDCLQILAETHGTRPDLTDQPLPDADLTWYTDGSSFIRNGEREAGAAVTTESEVIWAAPLPPGTSAQRAELIALTQALKMAEGKKLTVYTDSRYAFATTHVHGEIYRRRGWLTSEGKEIKNKNEILALLEALFLPKRLSIIHCPGHQKGDSPQAKGNRLADDTAKKAATETHSSLTVLPAGKRTADGSEFEKRTADGSEFESPKKKAKVE

SEQ ID NO: 6148 - protein, 2104 aa, synthetic construct
MPAAKRVKLDGGDKKYSIGLDIGTNSVGWAVITDEYKVPSKKFKVLGNTDRHSIKKNLIGALLFDSGETAEATRLKRTARRRYTRRKNRICYLQEIFSNEMAKVDDSFFHRLEESFLVEEDKKHERHPIFGNIVDEVAYHEKYPTIYHLRKKLVDSTDKADLRLIYLALAHMIKFRGHFLIEGDLNPDNSDVDKLFIQLVQTYNQLFEENPINASGVDAKAILSARLSKSRRLENLIAQLPGEKKNGLFGNLIALSLGLTPNFKSNFDLAEDAKLQLSKDTYDDDLDNLLAQIGDQYADLFLAAKNLSDAILLSDILRVNTEITKAPLSASMIKRYDEHHQDLTLLKALVRQQLPEKYKEIFFDQSKNGYAGYIDGGASQEEFYKFIKPILEKMDGTEELLVKLNREDLLRKQRTFDNGSIPHQIHLGELHAILRRQEDFYPFLKDNREKIEKILTFRIPYYVGPLARGNSRFAWMTRKSEETITPWNFEEVVDKGASAQSFIERMTNFDKNLPNEKVLPKHSLLYEYFTVYNELTKVKYVTEGMRKPAFLSGEQKKAIVDLLFKTNRKVTVKQLKEDYFKKIECFDSVEISGVEDRFNASLGTYHDLLKIIKDKDFLDNEENEDILEDIVLTLTLFEDREMIEERLKTYAHLFDDKVMKQLKRRRYTGWGRLSRKLINGIRDKQSGKTILDFLKSDGFANRNFMQLIHDDSLTFKEDIQKAQVSGQGDSLHEHIANLAGSPAIKKGILQTVKVVDELVKVMGRHKPENIVIEMARENQTTQKGQKNSRERMKRIEEGIKELGSQILKEHPVENTQLQNEKLYLYYLQNGRDMYVDQELDINRLSDYDVDHIVPQSFLKDDSIDNKVLTRSDKARGKSDNVPSEEVVKKMKNYWRQLLNAKLITQRKFDNLTKAERGGLSELDKAGFIKRQLVETRQITKHVAQILDSRMNTKYDENDKLIREVKVITLKSKLVSDFRKDFQFYKVREINNYHHAHDAYLNAVVGTALIKKYPKLESEFVYGDYKVYDVRKMIAKSEQEIGKATAKYFFYSNIMNFFKTEITLANGEIRKRPLIETNGETGEIVWDKGRDFATVRKVLSMPQVNIVKKTEVQTGGFSKESILPKRNSDKLIARKKDWDPKKYGGFDSPTVAYSVLVVAKVEKGKSKKLKSVKELLGITIMERSSFEKNPIDFLEAKGYKEVKKDLIIKLPKYSLFELENGRKRMLASAGELQKGNELALPSKYVNFLYLASHYEKLKGSPEDNEQKQLFVEQHKHYLDEIIEQISEFSKRVILADANLDKVLSAYNKHRDKPIREQAENIIHLFTLTNLGAPAAFKYFDTTIDRKRYTSTKEVLDATLIHQSITGLYETRIDLSQLGGDGGGGGGSGGGGSGGGGSGGGGSGGTLQLEEEYRLFEPESTQKQEMDIWLKNFPQAWAETGGMGTAHCQAPVLIQLKATATPISIRQYPMPHEAYQGIKPHIRRMLDQGILKPCQSPWNTPLLPVKKPGTEDYRPVQDLREVNKRVEDIHPTVPNPYNLLSTLPPSHPWYTVLDLKDAFFCLRLHSESQLLFAFEWRDPEIGLSGQLTWTRLPQGFKNSPTLFNEALHSDLADFRVRYPALVLLQYVDDLLLAAATRTECLEGTKALLETLGNKGYRASAKKAQICLQEVTYLGYSLKDGQRWLTKARKEAILSIPVPKNSRQVREFLGKAGYCRLFIPGFAELAAPLYPLTRPGTLFQWGTEQQLAFEDIKKALLSSPALGLPDITKPFELFIDENSGFAKGVLVQKLGPWKRPVAYLSKKLDTVASGWPPCLRMVAAIAILVKDAGKLTLGQPLTILTSHPVEALVRQPPNKWLSNARMTHYQAMLLDAERVHFGPTVSLNPATLLPLPSGGNHHDCLQILAETHGTRPDLTDQPLPDADLTWYTDGSSFIRNGEREAGAAVTTESEVIWAAPLPPGTSAQRAELIALTQALKMAEGKKLTVYTDSRYAFATTHVHGEIYRRRGWLTSEGKEIKNKNEILALLEALFLPKRLSIIHCPGHQKGDSPQAKGNRLADDTAKKAATETHSSLTVLPAGKRTADGSEFEKRTADGSEFESPKKKAKVE

SEQ ID NO: 6149 - protein, 2185 aa, synthetic construct
MPAAKRVKLDGGDKKYSIGLDIGTNSVGWAVITDEYKVPSKKFKVLGNTDRHSIKKNLIGALLFDSGETAEATRLKRTARRRYTRRKNRICYLQEIFSNEMAKVDDSFFHRLEESFLVEEDKKHERHPIFGNIVDEVAYHEKYPTIYHLRKKLVDSTDKADLRLIYLALAHMIKFRGHFLIEGDLNPDNSDVDKLFIQLVQTYNQLFEENPINASGVDAKAILSARLSKSRRLENLIAQLPGEKKNGLFGNLIALSLGLTPNFKSNFDLAEDAKLQLSKDTYDDDLDNLLAQIGDQYADLFLAAKNLSDAILLSDILRVNTEITKAPLSASMIKRYDEHHQDLTLLKALVRQQLPEKYKEIFFDQSKNGYAGYIDGGASQEEFYKFIKPILEKMDGTEELLVKLNREDLLRKQRTFDNGSIPHQIHLGELHAILRRQEDFYPFLKDNREKIEKILTFRIPYYVGPLARGNSRFAWMTRKSEETITPWNFEEVVDKGASAQSFIERMTNFDKNLPNEKVLPKHSLLYEYFTVYNELTKVKYVTEGMRKPAFLSGEQKKAIVDLLFKTNRKVTVKQLKEDYFKKIECFDSVEISGVEDRFNASLGTYHDLLKIIKDKDFLDNEENEDILEDIVLTLTLFEDREMIEERLKTYAHLFDDKVMKQLKRRRYTGWGRLSRKLINGIRDKQSGKTILDFLKSDGFANRNFMQLIHDDSLTFKEDIQKAQVSGQGDSLHEHIANLAGSPAIKKGILQTVKVVDELVKVMGRHKPENIVIEMARENQTTQKGQKNSRERMKRIEEGIKELGSQILKEHPVENTQLQNEKLYLYYLQNGRDMYVDQELDINRLSDYDVDHIVPQSFLKDDSIDNKVLTRSDKARGKSDNVPSEEVVKKMKNYWRQLLNAKLITQRKFDNLTKAERGGLSELDKAGFIKRQLVETRQITKHVAQILDSRMNTKYDENDKLIREVKVITLKSKLVSDFRKDFQFYKVREINNYHHAHDAYLNAVVGTALIKKYPKLESEFVYGDYKVYDVRKMIAKSEQEIGKATAKYFFYSNIMNFFKTEITLANGEIRKRPLIETNGETGEIVWDKGRDFATVRKVLSMPQVNIVKKTEVQTGGFSKESILPKRNSDKLIARKKDWDPKKYGGFDSPTVAYSVLVVAKVEKGKSKKLKSVKELLGITIMERSSFEKNPIDFLEAKGYKEVKKDLIIKLPKYSLFELENGRKRMLASAGELQKGNELALPSKYVNFLYLASHYEKLKGSPEDNEQKQLFVEQHKHYLDEIIEQISEFSKRVILADANLDKVLSAYNKHRDKPIREQAENIIHLFTLTNLGAPAAFKYFDTTIDRKRYTSTKEVLDATLIHQSITGLYETRIDLSQLGGDGGGGGGSGGGGSGGGGSGGGGSGGMNPLQLLQPLPAEIKGTKLLAHWNSGATITCIPESFLEDEQPIKKTLIKTIHGEKQQNVYYVTFKVKGRKVEAEVIASPYEYILLSPTDVPWLTQQPLQLTILVPLQEYQEKILSKTALPEDQKQQLKTLFVKYDNLWQHWENQVGHRKIRPHNIATGDYPPRPQKQYPINPKAKPSIQIVIDDLLKQGVLTPQNSTMNTPVYPVPKPDGRWRMVLDYREVNKTIPLTAAQNQHSAGILATIVRQKYKTTLDLANGFWAHPITPESYWLTAFTWQGKQYCWTRLPQGFLNSPALFNADVVDLLKEIPNVQVYVDDIYLSHDDPKEHVQQLEKVFQILLQAGYVVSLKKSEIGQKTVEFLGFNITKEGRGLTDTFKTKLLNITPPKDLKQLQSILGLLNFARNFIPNFAELVQPLYNLIAPAKGKYIEWSEENTKQLNMVIEALNTASNLEERLPEQRLVIKVNTSPSAGYVRYYNETGKKPIMYLNYVFSKAELKFSMLEKLLTTMHKALIKAMDLAMGQEILVYSPIVSMTKIQKTPLPERKALPIRWITWMTYLEDPRIQFHYDKTLPELKHIPDVYTSSQSPVKHPSQYEGVFYTDGSAIKSPDPTKSNNAGMGIVHATYKPEYQVLNQWSIPLGNHTAQMAEIAAVEFACKKALKIPGPVLVITDSFYVAESANKELPYWKSNGFVNNKKKPLKHISKWKSIAECLSMKPDITIQHEKGISLQIPVFILKGNALADKLATQGSYVVNAGKRTADGSEFEKRTADGSEFESPKKKAKVE

SEQ ID NO: 6150 - protein, 2185 aa, synthetic construct
MPAAKRVKLDGGDKKYSIGLDIGTNSVGWAVITDEYKVPSKKFKVLGNTDRHSIKKNLIGALLFDSGETAEATRLKRTARRRYTRRKNRICYLQEIFSNEMAKVDDSFFHRLEESFLVEEDKKHERHPIFGNIVDEVAYHEKYPTIYHLRKKLVDSTDKADLRLIYLALAHMIKFRGHFLIEGDLNPDNSDVDKLFIQLVQTYNQLFEENPINASGVDAKAILSARLSKSRRLENLIAQLPGEKKNGLFGNLIALSLGLTPNFKSNFDLAEDAKLQLSKDTYDDDLDNLLAQIGDQYADLFLAAKNLSDAILLSDILRVNTEITKAPLSASMIKRYDEHHQDLTLLKALVRQQLPEKYKEIFFDQSKNGYAGYIDGGASQEEFYKFIKPILEKMDGTEELLVKLNREDLLRKQRTFDNGSIPHQIHLGELHAILRRQEDFYPFLKDNREKIEKILTFRIPYYVGPLARGNSRFAWMTRKSEETITPWNFEEVVDKGASAQSFIERMTNFDKNLPNEKVLPKHSLLYEYFTVYNELTKVKYVTEGMRKPAFLSGEQKKAIVDLLFKTNRKVTVKQLKEDYFKKIECFDSVEISGVEDRFNASLGTYHDLLKIIKDKDFLDNEENEDILEDIVLTLTLFEDREMIEERLKTYAHLFDDKVMKQLKRRRYTGWGRLSRKLINGIRDKQSGKTILDFLKSDGFANRNFMQLIHDDSLTFKEDIQKAQVSGQGDSLHEHIANLAGSPAIKKGILQTVKVVDELVKVMGRHKPENIVIEMARENQTTQKGQKNSRERMKRIEEGIKELGSQILKEHPVENTQLQNEKLYLYYLQNGRDMYVDQELDINRLSDYDVDHIVPQSFLKDDSIDNKVLTRSDKARGKSDNVPSEEVVKKMKNYWRQLLNAKLITQRKFDNLTKAERGGLSELDKAGFIKRQLVETRQITKHVAQILDSRMNTKYDENDKLIREVKVITLKSKLVSDFRKDFQFYKVREINNYHHAHDAYLNAVVGTALIKKYPKLESEFVYGDYKVYDVRKMIAKSEQEIGKATAKYFFYSNIMNFFKTEITLANGEIRKRPLIETNGETGEIVWDKGRDFATVRKVLSMPQVNIVKKTEVQTGGFSKESILPKRNSDKLIARKKDWDPKKYGGFDSPTVAYSVLVVAKVEKGKSKKLKSVKELLGITIMERSSFEKNPIDFLEAKGYKEVKKDLIIKLPKYSLFELENGRKRMLASAGELQKGNELALPSKYVNFLYLASHYEKLKGSPEDNEQKQLFVEQHKHYLDEIIEQISEFSKRVILADANLDKVLSAYNKHRDKPIREQAENIIHLFTLTNLGAPAAFKYFDTTIDRKRYTSTKEVLDATLIHQSITGLYETRIDLSQLGGDGGGGGGSGGGGSGGGGSGGGGSGGMNPLQLLQPLPAEIKGTKLLAHWNSGATITCIPESFLEDEQPIKKTLIKTIHGEKQQNVYYVTFKVKGRKVEAEVIASPYEYILLSPTDVPWLTQQPLQLTILVPLQEYQEKILSKTALPEDQKQQLKTLFVKYDNLWQHWENQVGHRKIRPHNIATGDYPPRPQKQYPINPKAKPSIQIVIDDLLKQGVLTPQNSTMNTPVYPVPKPDGRWRMVLDYREVNKTIPLTAAQNQHSAGILATIVRQKYKTTLDLANGFWAHPITPESYWLTAFTWQGKQYCWTRLPQGFLNSPALFNADVVDLLKEIPNVQVYVDDIYLSHDDPKEHVQQLEKVFQILLQAGYVVSLKKSEIGQKTVEFLGFNITKEGRGLTDTFKTKLLNITPPKDLKQLQSILGKLNFARNFIPNFAELVQPLYNLIAPAKGKYIEWSEENTKQLNMVIEALNTASNLEERLPEQRLVIKVNTSPSAGYVRYYNETGKKPIMYLNYVFSKAELKFSMLEKLLTTMHKALIKAMDLAMGQEILVYSPIVSMTKIQKTPLPERKALPIRWITWMTYLEDPRIQFHYDKTLPELKHIPDVYTSSQSPVKHPSQYEGVFYTDGSAIKSPDPTKSNNAGMGIVHATYKPEYQVLNQWSIPLGNHTAQMAEIAAVEFACKKALKIPGPVLVITDSFYVAESANKELPYWKSNGFVNNKKKPLKHISKWKSIAECLSMKPDITIQHEKGISLQIPVFILKGNALADKLATQGSYVVNAGKRTADGSEFEKRTADGSEFESPKKKAKVE

SEQ ID NO: 6151 - protein, 2136 aa, synthetic construct
MPAAKRVKLDGGDKKYSIGLDIGTNSVGWAVITDEYKVPSKKFKVLGNTDRHSIKKNLIGALLFDSGETAEATRLKRTARRRYTRRKNRICYLQEIFSNEMAKVDDSFFHRLEESFLVEEDKKHERHPIFGNIVDEVAYHEKYPTIYHLRKKLVDSTDKADLRLIYLALAHMIKFRGHFLIEGDLNPDNSDVDKLFIQLVQTYNQLFEENPINASGVDAKAILSARLSKSRRLENLIAQLPGEKKNGLFGNLIALSLGLTPNFKSNFDLAEDAKLQLSKDTYDDDLDNLLAQIGDQYADLFLAAKNLSDAILLSDILRVNTEITKAPLSASMIKRYDEHHQDLTLLKALVRQQLPEKYKEIFFDQSKNGYAGYIDGGASQEEFYKFIKPILEKMDGTEELLVKLNREDLLRKQRTFDNGSIPHQIHLGELHAILRRQEDFYPFLKDNREKIEKILTFRIPYYVGPLARGNSRFAWMTRKSEETITPWNFEEVVDKGASAQSFIERMTNFDKNLPNEKVLPKHSLLYEYFTVYNELTKVKYVTEGMRKPAFLSGEQKKAIVDLLFKTNRKVTVKQLKEDYFKKIECFDSVEISGVEDRFNASLGTYHDLLKIIKDKDFLDNEENEDILEDIVLTLTLFEDREMIEERLKTYAHLFDDKVMKQLKRRRYTGWGRLSRKLINGIRDKQSGKTILDFLKSDGFANRNFMQLIHDDSLTFKEDIQKAQVSGQGDSLHEHIANLAGSPAIKKGILQTVKVVDELVKVMGRHKPENIVIEMARENQTTQKGQKNSRERMKRIEEGIKELGSQILKEHPVENTQLQNEKLYLYYLQNGRDMYVDQELDINRLSDYDVDHIVPQSFLKDDSIDNKVLTRSDKARGKSDNVPSEEVVKKMKNYWRQLLNAKLITQRKFDNLTKAERGGLSELDKAGFIKRQLVETRQITKHVAQILDSRMNTKYDENDKLIREVKVITLKSKLVSDFRKDFQFYKVREINNYHHAHDAYLNAVVGTALIKKYPKLESEFVYGDYKVYDVRKMIAKSEQEIGKATAKYFFYSNIMNFFKTEITLANGEIRKRPLIETNGETGEIVWDKGRDFATVRKVLSMPQVNIVKKTEVQTGGFSKESILPKRNSDKLIARKKDWDPKKYGGFDSPTVAYSVLVVAKVEKGKSKKLKSVKELLGITIMERSSFEKNPIDFLEAKGYKEVKKDLIIKLPKYSLFELENGRKRMLASAGELQKGNELALPSKYVNFLYLASHYEKLKGSPEDNEQKQLFVEQHKHYLDEIIEQISEFSKRVILADANLDKVLSAYNKHRDKPIREQAENIIHLFTLTNLGAPAAFKYFDTTIDRKRYTSTKEVLDATLIHQSITGLYETRIDLSQLGGDGGGGGGSGGGGSGGGGSGGGGSGGLLGRDLLTKLKAQIQFSTEGPQVTWEDRPAMCLVLNLEEEYRLHEKPVPPSIDPSWLQLFPMVWAEKAGMGLANQVPPVVVELKSDASPVAVRQYPMSKEAREGIRPHIQRFLDLGILVPCQSPWNTPLLPVKKPGTNDYRPVQDLREVNKRVQDIHPTVPNPYNLLSSLPPSHTWYSVLDLKDAFFCLKLHPNSQPLFAFEWRDPEKGNTGQLTWTRLPQGFKNSPTLFNEALHRDLASFRALNPQVVMLQYVDDLLVAAPTYRDCKEGTRRLLQELSKLGYRVSAKKAQLCREEVTYLGYLLKGGKRWLTPARKATVMKIPTPTTPRQVREFLGTAGFCRLWIPGFASLAAPLYPLTRPKVPFTWTEAHQEAFGRIKEALLSAPALALPDLTKPFALYVDEKEGVARGVLTQTLGPWRRPVAYLSKKLDPVASGWPTCLKAIAAVALLLKDADKLTLGQNVLVIAPHNLESIVRQPPDRWMTNARMTHYQSLLLNERVSFAPPAILNPATLLPVESDDTPIHICSEILAEETGTRPDLRDQPLPGVPAWYTDGSSFIMDGRRQAGAAIVDNKRTVWASNLPEGTSAQKAELIALTQALRLAEGKSINIYTDSRYAFATAHVHGAIYKQRGWLTSAGKDIKNKEEILALLEAIHLPKRVAIIHCPGHQRGTDPVATGNRKADEAAKQAAQSTRILTETTKNAGKRTADGSEFEKRTADGSEFESPKKKAKVE

SEQ ID NO: 6152 - protein, 2136 aa, synthetic construct
MPAAKRVKLDGGDKKYSIGLDIGTNSVGWAVITDEYKVPSKKFKVLGNTDRHSIKKNLIGALLFDSGETAEATRLKRTARRRYTRRKNRICYLQEIFSNEMAKVDDSFFHRLEESFLVEEDKKHERHPIFGNIVDEVAYHEKYPTIYHLRKKLVDSTDKADLRLIYLALAHMIKFRGHFLIEGDLNPDNSDVDKLFIQLVQTYNQLFEENPINASGVDAKAILSARLSKSRRLENLIAQLPGEKKNGLFGNLIALSLGLTPNFKSNFDLAEDAKLQLSKDTYDDDLDNLLAQIGDQYADLFLAAKNLSDAILLSDILRVNTEITKAPLSASMIKRYDEHHQDLTLLKALVRQQLPEKYKEIFFDQSKNGYAGYIDGGASQEEFYKFIKPILEKMDGTEELLVKLNREDLLRKQRTFDNGSIPHQIHLGELHAILRRQEDFYPFLKDNREKIEKILTFRIPYYVGPLARGNSRFAWMTRKSEETITPWNFEEVVDKGASAQSFIERMTNFDKNLPNEKVLPKHSLLYEYFTVYNELTKVKYVTEGMRKPAFLSGEQKKAIVDLLFKTNRKVTVKQLKEDYFKKIECFDSVEISGVEDRFNASLGTYHDLLKIIKDKDFLDNEENEDILEDIVLTLTLFEDREMIEERLKTYAHLFDDKVMKQLKRRRYTGWGRLSRKLINGIRDKQSGKTILDFLKSDGFANRNFMQLIHDDSLTFKEDIQKAQVSGQGDSLHEHIANLAGSPAIKKGILQTVKVVDELVKVMGRHKPENIVIEMARENQTTQKGQKNSRERMKRIEEGIKELGSQILKEHPVENTQLQNEKLYLYYLQNGRDMYVDQELDINRLSDYDVDHIVPQSFLKDDSIDNKVLTRSDKARGKSDNVPSEEVVKKMKNYWRQLLNAKLITQRKFDNLTKAERGGLSELDKAGFIKRQLVETRQITKHVAQILDSRMNTKYDENDKLIREVKVITLKSKLVSDFRKDFQFYKVREINNYHHAHDAYLNAVVGTALIKKYPKLESEFVYGDYKVYDVRKMIAKSEQEIGKATAKYFFYSNIMNFFKTEITLANGEIRKRPLIETNGETGEIVWDKGRDFATVRKVLSMPQVNIVKKTEVQTGGFSKESILPKRNSDKLIARKKDWDPKKYGGFDSPTVAYSVLVVAKVEKGKSKKLKSVKELLGITIMERSSFEKNPIDFLEAKGYKEVKKDLIIKLPKYSLFELENGRKRMLASAGELQKGNELALPSKYVNFLYLASHYEKLKGSPEDNEQKQLFVEQHKHYLDEIIEQISEFSKRVILADANLDKVLSAYNKHRDKPIREQAENIIHLFTLTNLGAPAAFKYFDTTIDRKRYTSTKEVLDATLIHQSITGLYETRIDLSQLGGDGGGGGGSGGGGSGGGGSGGGGSGGLLGRDLLTKLKAQIQFSTEGPQVTWEDRPAMCLVLNLEEEYRLHEKPVPPSIDPSWLQLFPMVWAEKAGMGLANQVPPVVVELKSDASPVAVRQYPMSKEAREGIRPHIQRFLDLGILVPCQSPWNTPLLPVKKPGTNDYRPVQDLREVNKRVQDIHPTVPNPYNLLSSLPPSHTWYSVLDLKDAFFCLKLHPNSQPLFAFEWRDPEKGNTGQLTWTRLPQGFKNSPTLFNEALHRDLASFRALNPQVVMLQYVDDLLVAAPTYRDCKEGTRRLLQELSKLGYRVSAKKAQLCREEVTYLGYLLKGGKRWLTPARKATVMKIPTPTTPRQVREFLGKAGFCRLFIPGFASLAAPLYPLTRPKVPFTWTEAHQEAFGRIKEALLSAPALALPDLTKPFALYVDEKEGVARGVLTQTLGPWRRPVAYLSKKLDPVASGWPTCLKAIAAVALLLKDADKLTLGQNVLVIAPHNLESIVRQPPDRWMTNARMTHYQSLLLNERVSFAPPAILNPATLLPVESDDTPIHICSEILAEETGTRPDLRDQPLPGVPAWYTDGSSFIMDGRRQAGAAIVDNKRTVWASNLPEGTSAQKAELIALTQALRLAEGKSINIYTDSRYAFATAHVHGAIYKQRGWLTSAGKDIKNKEEILALLEAIHLPKRVAIIHCPGHQRGTDPVATGNRKADEAAKQAAQSTRILTETTKNAGKRTADGSEFEKRTADGSEFESPKKKAKVE

SEQ ID NO: 6153 - protein, 2227 aa, synthetic construct
MPAAKRVKLDGGDKKYSIGLDIGTNSVGWAVITDEYKVPSKKFKVLGNTDRHSIKKNLIGALLFDSGETAEATRLKRTARRRYTRRKNRICYLQEIFSNEMAKVDDSFFHRLEESFLVEEDKKHERHPIFGNIVDEVAYHEKYPTIYHLRKKLVDSTDKADLRLIYLALAHMIKFRGHFLIEGDLNPDNSDVDKLFIQLVQTYNQLFEENPINASGVDAKAILSARLSKSRRLENLIAQLPGEKKNGLFGNLIALSLGLTPNFKSNFDLAEDAKLQLSKDTYDDDLDNLLAQIGDQYADLFLAAKNLSDAILLSDILRVNTEITKAPLSASMIKRYDEHHQDLTLLKALVRQQLPEKYKEIFFDQSKNGYAGYIDGGASQEEFYKFIKPILEKMDGTEELLVKLNREDLLRKQRTFDNGSIPHQIHLGELHAILRRQEDFYPFLKDNREKIEKILTFRIPYYVGPLARGNSRFAWMTRKSEETITPWNFEEVVDKGASAQSFIERMTNFDKNLPNEKVLPKHSLLYEYFTVYNELTKVKYVTEGMRKPAFLSGEQKKAIVDLLFKTNRKVTVKQLKEDYFKKIECFDSVEISGVEDRFNASLGTYHDLLKIIKDKDFLDNEENEDILEDIVLTLTLFEDREMIEERLKTYAHLFDDKVMKQLKRRRYTGWGRLSRKLINGIRDKQSGKTILDFLKSDGFANRNFMQLIHDDSLTFKEDIQKAQVSGQGDSLHEHIANLAGSPAIKKGILQTVKVVDELVKVMGRHKPENIVIEMARENQTTQKGQKNSRERMKRIEEGIKELGSQILKEHPVENTQLQNEKLYLYYLQNGRDMYVDQELDINRLSDYDVDHIVPQSFLKDDSIDNKVLTRSDKARGKSDNVPSEEVVKKMKNYWRQLLNAKLITQRKFDNLTKAERGGLSELDKAGFIKRQLVETRQITKHVAQILDSRMNTKYDENDKLIREVKVITLKSKLVSDFRKDFQFYKVREINNYHHAHDAYLNAVVGTALIKKYPKLESEFVYGDYKVYDVRKMIAKSEQEIGKATAKYFFYSNIMNFFKTEITLANGEIRKRPLIETNGETGEIVWDKGRDFATVRKVLSMPQVNIVKKTEVQTGGFSKESILPKRNSDKLIARKKDWDPKKYGGFDSPTVAYSVLVVAKVEKGKSKKLKSVKELLGITIMERSSFEKNPIDFLEAKGYKEVKKDLIIKLPKYSLFELENGRKRMLASAGELQKGNELALPSKYVNFLYLASHYEKLKGSPEDNEQKQLFVEQHKHYLDEIIEQISEFSKRVILADANLDKVLSAYNKHRDKPIREQAENIIHLFTLTNLGAPAAFKYFDTTIDRKRYTSTKEVLDATLIHQSITGLYETRIDLSQLGGDGGGGGGSGGGGSGGGGSGGGGSGGTLGDQGSRGSDPLPEPRVTLTVEGIPTEFLVNTGAEHSVLTKPMGKMGSKRTVVAGATGSKVYPWTTKRLLKIGQKQVTHSFLVIPECPAPLLGRDLLTKLKAQIQFSTEGPQVTWEDRPAMCLVLNLEEEYRLHEKPVPPSIDPSWLQLFPMVWAEKAGMGLANQVPPVVVELKSDASPVAVRQYPMSKEAREGIRPHIQRFLDLGILVPCQSPWNTPLLPVKKPGTNDYRPVQDLREVNKRVQDIHPTVPNPYNLLSSLPPSHTWYSVLDLKDAFFCLKLHPNSQPLFAFEWRDPEKGNTGQLTWTRLPQGFKNSPTLFNEALHRDLASFRALNPQVVMLQYVDDLLVAAPTYRDCKEGTRRLLQELSKLGYRVSAKKAQLCREEVTYLGYLLKGGKRWLTPARKATVMKIPTPTTPRQVREFLGTAGFCRLWIPGFASLAAPLYPLTRPKVPFTWTEAHQEAFGRIKEALLSAPALALPDLTKPFALYVDEKEGVARGVLTQTLGPWRRPVAYLSKKLDPVASGWPTCLKAIAAVALLLKDADKLTLGQNVLVIAPHNLESIVRQPPDRWMTNARMTHYQSLLLNERVSFAPPAILNPATLLPVESDDTPIHICSEILAEETGTRPDLRDQPLPGVPAWYTDGSSFIMDGRRQAGAAIVDNKRTVWASNLPEGTSAQKAELIALTQALRLAEGKSINIYTDSRYAFATAHVHGAIYKQRGWLTSAGKDIKNKEEILALLEAIHLPKRVAIIHCPGHQRGTDPVATGNRKADEAAKQAAQSTRILTETTKNAGKRTADGSEFEKRTADGSEFESPKKKAKVE

SEQ ID NO: 6154 - protein, 2105 aa, synthetic construct
MPAAKRVKLDGGDKKYSIGLDIGTNSVGWAVITDEYKVPSKKFKVLGNTDRHSIKKNLIGALLFDSGETAEATRLKRTARRRYTRRKNRICYLQEIFSNEMAKVDDSFFHRLEESFLVEEDKKHERHPIFGNIVDEVAYHEKYPTIYHLRKKLVDSTDKADLRLIYLALAHMIKFRGHFLIEGDLNPDNSDVDKLFIQLVQTYNQLFEENPINASGVDAKAILSARLSKSRRLENLIAQLPGEKKNGLFGNLIALSLGLTPNFKSNFDLAEDAKLQLSKDTYDDDLDNLLAQIGDQYADLFLAAKNLSDAILLSDILRVNTEITKAPLSASMIKRYDEHHQDLTLLKALVRQQLPEKYKEIFFDQSKNGYAGYIDGGASQEEFYKFIKPILEKMDGTEELLVKLNREDLLRKQRTFDNGSIPHQIHLGELHAILRRQEDFYPFLKDNREKIEKILTFRIPYYVGPLARGNSRFAWMTRKSEETITPWNFEEVVDKGASAQSFIERMTNFDKNLPNEKVLPKHSLLYEYFTVYNELTKVKYVTEGMRKPAFLSGEQKKAIVDLLFKTNRKVTVKQLKEDYFKKIECFDSVEISGVEDRFNASLGTYHDLLKIIKDKDFLDNEENEDILEDIVLTLTLFEDREMIEERLKTYAHLFDDKVMKQLKRRRYTGWGRLSRKLINGIRDKQSGKTILDFLKSDGFANRNFMQLIHDDSLTFKEDIQKAQVSGQGDSLHEHIANLAGSPAIKKGILQTVKVVDELVKVMGRHKPENIVIEMARENQTTQKGQKNSRERMKRIEEGIKELGSQILKEHPVENTQLQNEKLYLYYLQNGRDMYVDQELDINRLSDYDVDHIVPQSFLKDDSIDNKVLTRSDKARGKSDNVPSEEVVKKMKNYWRQLLNAKLITQRKFDNLTKAERGGLSELDKAGFIKRQLVETRQITKHVAQILDSRMNTKYDENDKLIREVKVITLKSKLVSDFRKDFQFYKVREINNYHHAHDAYLNAVVGTALIKKYPKLESEFVYGDYKVYDVRKMIAKSEQEIGKATAKYFFYSNIMNFFKTEITLANGEIRKRPLIETNGETGEIVWDKGRDFATVRKVLSMPQVNIVKKTEVQTGGFSKESILPKRNSDKLIARKKDWDPKKYGGFDSPTVAYSVLVVAKVEKGKSKKLKSVKELLGITIMERSSFEKNPIDFLEAKGYKEVKKDLIIKLPKYSLFELENGRKRMLASAGELQKGNELALPSKYVNFLYLASHYEKLKGSPEDNEQKQLFVEQHKHYLDEIIEQISEFSKRVILADANLDKVLSAYNKHRDKPIREQAENIIHLFTLTNLGAPAAFKYFDTTIDRKRYTSTKEVLDATLIHQSITGLYETRIDLSQLGGDGGGGGGSGGGGSGGGGSGGGGSGGTLNIEDEYRLHETSKEPDVSLGSTWLSDFPQAWAETGGMGLAVRQAPLIIPLKATSTPVSIKQYPMSQEARLGIKPHIQRLLDQGILVPCQSPWNTPLLPVKKPGTNDYRPVQDLREVNKRVEDIHPTVPNPYNLLSGLPPSHQWYTVLDLKDAFFCLRLHPTSQPLFAFEWRDPEMGISGQLTWTRLPQGFKNSPTLFNEALHRDLAGFRIQHPDLILLQYVDDLLLAATSELDCQQGTRALLQTLGDLGYRASAKKAQICQKQVKYLGYLLKEGQRWLTEARKETVMGQPIPKTPRQLREFLGTAGFCRLWIPGFAEMAAPLYPLTKPGTLFNWGPDQQKAFQEIKQALLTAPALGLPDLTKPFELFVDEKQGYAKGVLTQKLGPWRRPVAYLSKKLDPVAAGWPPCLRMVAAIAVLTKDAGKLTMGQPLVILAPHAVEALVKQPPDRWLSNARMTHYQALLLDTDRVQFGPVVALNPATLLPLPEEGLQHDCLDILAEAHGTRSDLMDQPLPDADHTWYTDGSSFLQEGQRKAGAAVTTETEVIWARALPAGTSAQRAELIALTQALKMAEGKKLNVYTDSRYAFATAHIHGEIYRRRGWLTSEGKEIKNKDEILALLKALFLPKRLSIIHCPGHQKGNSAEARGNRMADQAAREVATRETPETSTLLAGKRTADGSEFEKRTADGSEFESPKKKAKVE

SEQ ID NO: 6155 - protein, 2105 aa, synthetic construct
MPAAKRVKLDGGDKKYSIGLDIGTNSVGWAVITDEYKVPSKKFKVLGNTDRHSIKKNLIGALLFDSGETAEATRLKRTARRRYTRRKNRICYLQEIFSNEMAKVDDSFFHRLEESFLVEEDKKHERHPIFGNIVDEVAYHEKYPTIYHLRKKLVDSTDKADLRLIYLALAHMIKFRGHFLIEGDLNPDNSDVDKLFIQLVQTYNQLFEENPINASGVDAKAILSARLSKSRRLENLIAQLPGEKKNGLFGNLIALSLGLTPNFKSNFDLAEDAKLQLSKDTYDDDLDNLLAQIGDQYADLFLAAKNLSDAILLSDILRVNTEITKAPLSASMIKRYDEHHQDLTLLKALVRQQLPEKYKEIFFDQSKNGYAGYIDGGASQEEFYKFIKPILEKMDGTEELLVKLNREDLLRKQRTFDNGSIPHQIHLGELHAILRRQEDFYPFLKDNREKIEKILTFRIPYYVGPLARGNSRFAWMTRKSEETITPWNFEEVVDKGASAQSFIERMTNFDKNLPNEKVLPKHSLLYEYFTVYNELTKVKYVTEGMRKPAFLSGEQKKAIVDLLFKTNRKVTVKQLKEDYFKKIECFDSVEISGVEDRFNASLGTYHDLLKIIKDKDFLDNEENEDILEDIVLTLTLFEDREMIEERLKTYAHLFDDKVMKQLKRRRYTGWGRLSRKLINGIRDKQSGKTILDFLKSDGFANRNFMQLIHDDSLTFKEDIQKAQVSGQGDSLHEHIANLAGSPAIKKGILQTVKVVDELVKVMGRHKPENIVIEMARENQTTQKGQKNSRERMKRIEEGIKELGSQILKEHPVENTQLQNEKLYLYYLQNGRDMYVDQELDINRLSDYDVDHIVPQSFLKDDSIDNKVLTRSDKARGKSDNVPSEEVVKKMKNYWRQLLNAKLITQRKFDNLTKAERGGLSELDKAGFIKRQLVETRQITKHVAQILDSRMNTKYDENDKLIREVKVITLKSKLVSDFRKDFQFYKVREINNYHHAHDAYLNAVVGTALIKKYPKLESEFVYGDYKVYDVRKMIAKSEQEIGKATAKYFFYSNIMNFFKTEITLANGEIRKRPLIETNGETGEIVWDKGRDFATVRKVLSMPQVNIVKKTEVQTGGFSKESILPKRNSDKLIARKKDWDPKKYGGFDSPTVAYSVLVVAKVEKGKSKKLKSVKELLGITIMERSSFEKNPIDFLEAKGYKEVKKDLIIKLPKYSLFELENGRKRMLASAGELQKGNELALPSKYVNFLYLASHYEKLKGSPEDNEQKQLFVEQHKHYLDEIIEQISEFSKRVILADANLDKVLSAYNKHRDKPIREQAENIIHLFTLTNLGAPAAFKYFDTTIDRKRYTSTKEVLDATLIHQSITGLYETRIDLSQLGGDGGGGGGSGGGGSGGGGSGGGGSGGTLNIEDEYRLHETSKGPDVPLGSTWLSDFPQAWAETGGMGLAVRQAPLIIPLKATSTPVSIKQYPMSQEARLGIKPHIQRLLDQGILVPCQSPWNTPLLPVKKPGTNDYRPVQDLREVNKRVEDIHPTVPNPYNLLSGLPPSHQWYTVLDLKDAFFCLRLHPTSQSLFAFEWRDPEMGISGQLTWTRLPQGFKNSPTLFNEALHRDLADFRIQHPDLILLQYVDDLLLAATSELDCQQGTRALLQTLGDLGYRASAKKAQICQKQVKYLGYLLKEGQRWLTEARKETVMGQPTPKTPRQLREFLGKAGFCRLFIPGFAEMAAPLYPLTKPGTLFEWGPDQQKAYQEIKQALLTAPALGLPDLTKPFELFVDEKQGYAKGVLTQKLGPWRRPVAYLSKKLDPVAAGWPPCLRMVAAIAVLTKDAGKLTMGQPLVILAPHAVEALVKQPPDRWLSNARMTHYQALLLDTDRVQFGPIVALNPATLLPLPEEGLQHDCLDILAEAHGTRPDLTDQPLPDADHTWYTDGSSFLQEGQRKAGAAVTTETEVVWAKALPAGTSAQRAELIALTQALKMAEGKKLNVYTDSRYAFATAHIHGEIYRRRGWLTSEGKEIKNKDEILALLKALFLPKRLSIIHCPGHQKGNRAEARGNRMADQAAREVATRETPETSTLLAGKRTADGSEFEKRTADGSEFESPKKKAKVE

SEQ ID NO: 6156 - protein, 2105 aa, synthetic construct
MPAAKRVKLDGGDKKYSIGLDIGTNSVGWAVITDEYKVPSKKFKVLGNTDRHSIKKNLIGALLFDSGETAEATRLKRTARRRYTRRKNRICYLQEIFSNEMAKVDDSFFHRLEESFLVEEDKKHERHPIFGNIVDEVAYHEKYPTIYHLRKKLVDSTDKADLRLIYLALAHMIKFRGHFLIEGDLNPDNSDVDKLFIQLVQTYNQLFEENPINASGVDAKAILSARLSKSRRLENLIAQLPGEKKNGLFGNLIALSLGLTPNFKSNFDLAEDAKLQLSKDTYDDDLDNLLAQIGDQYADLFLAAKNLSDAILLSDILRVNTEITKAPLSASMIKRYDEHHQDLTLLKALVRQQLPEKYKEIFFDQSKNGYAGYIDGGASQEEFYKFIKPILEKMDGTEELLVKLNREDLLRKQRTFDNGSIPHQIHLGELHAILRRQEDFYPFLKDNREKIEKILTFRIPYYVGPLARGNSRFAWMTRKSEETITPWNFEEVVDKGASAQSFIERMTNFDKNLPNEKVLPKHSLLYEYFTVYNELTKVKYVTEGMRKPAFLSGEQKKAIVDLLFKTNRKVTVKQLKEDYFKKIECFDSVEISGVEDRFNASLGTYHDLLKIIKDKDFLDNEENEDILEDIVLTLTLFEDREMIEERLKTYAHLFDDKVMKQLKRRRYTGWGRLSRKLINGIRDKQSGKTILDFLKSDGFANRNFMQLIHDDSLTFKEDIQKAQVSGQGDSLHEHIANLAGSPAIKKGILQTVKVVDELVKVMGRHKPENIVIEMARENQTTQKGQKNSRERMKRIEEGIKELGSQILKEHPVENTQLQNEKLYLYYLQNGRDMYVDQELDINRLSDYDVDHIVPQSFLKDDSIDNKVLTRSDKARGKSDNVPSEEVVKKMKNYWRQLLNAKLITQRKFDNLTKAERGGLSELDKAGFIKRQLVETRQITKHVAQILDSRMNTKYDENDKLIREVKVITLKSKLVSDFRKDFQFYKVREINNYHHAHDAYLNAVVGTALIKKYPKLESEFVYGDYKVYDVRKMIAKSEQEIGKATAKYFFYSNIMNFFKTEITLANGEIRKRPLIETNGETGEIVWDKGRDFATVRKVLSMPQVNIVKKTEVQTGGFSKESILPKRNSDKLIARKKDWDPKKYGGFDSPTVAYSVLVVAKVEKGKSKKLKSVKELLGITIMERSSFEKNPIDFLEAKGYKEVKKDLIIKLPKYSLFELENGRKRMLASAGELQKGNELALPSKYVNFLYLASHYEKLKGSPEDNEQKQLFVEQHKHYLDEIIEQISEFSKRVILADANLDKVLSAYNKHRDKPIREQAENIIHLFTLTNLGAPAAFKYFDTTIDRKRYTSTKEVLDATLIHQSITGLYETRIDLSQLGGDGGGGGGSGGGGSGGGGSGGGGSGGTLNIEDEHRLHETSKEPDVSLGSTWLSDFPQAWAETGGMGLAVRQAPLIIPLKATSTPVSIKQYPMSQEARLGIKPHIQRLLDQGILVPCQSPWNTPLLPVKKPGTNDYRPVQDLREVNKRVEDIHPTVPNPYNLLSGLPPSHQWYTVLDLKDAFFCLRLHPTSQPLFAFEWRDPEMGISGQLTWTRLPQGFKNSPTLFDEALHRDLADFRIQHPDLILLQYVDDLLLAATSELDCQQGTRALLQTLGNLGYRASAKKAQICQKQVKYLGYLLKEGQRWLTEARKETVMGQPTPKTPRQLREFLGTAGFCRLWIPGFAEMAAPLYPLTKTGTLFNWGPDQQKAYQEIKQALLTAPALGLPDLTKPFELFVDEKQGYAKGVLTQKLGPWRRPVAYLSKKLDPVAAGWPPCLRMVAAIAVLTKDAGKLTMGQPLVILAPHAVEALVKQPPDRWLSNARMTHYQALLLDTDRVQFGPVVALNPATLLPLPEEGLQHNCLDILAEAHGTRPDLTDQPLPDADHTWYTDGSSLLQEGQRKAGAAVTTETEVIWAKALPAGTSAQRAELIALTQALKMAEGKKLNVYTDSRYAFATAHIHGEIYRRRGLLTSEGKEIKNKDEILALLKALFLPKRLSIIHCPGHQKGHSAEARGNRMADQAARKAAITETPDTSTLLAGKRTADGSEFEKRTADGSEFESPKKKAKVE

SEQ ID NO: 6157 - protein, 2033 aa, synthetic construct
MPAAKRVKLDGGDKKYSIGLDIGTNSVGWAVITDEYKVPSKKFKVLGNTDRHSIKKNLIGALLFDSGETAEATRLKRTARRRYTRRKNRICYLQEIFSNEMAKVDDSFFHRLEESFLVEEDKKHERHPIFGNIVDEVAYHEKYPTIYHLRKKLVDSTDKADLRLIYLALAHMIKFRGHFLIEGDLNPDNSDVDKLFIQLVQTYNQLFEENPINASGVDAKAILSARLSKSRRLENLIAQLPGEKKNGLFGNLIALSLGLTPNFKSNFDLAEDAKLQLSKDTYDDDLDNLLAQIGDQYADLFLAAKNLSDAILLSDILRVNTEITKAPLSASMIKRYDEHHQDLTLLKALVRQQLPEKYKEIFFDQSKNGYAGYIDGGASQEEFYKFIKPILEKMDGTEELLVKLNREDLLRKQRTFDNGSIPHQIHLGELHAILRRQEDFYPFLKDNREKIEKILTFRIPYYVGPLARGNSRFAWMTRKSEETITPWNFEEVVDKGASAQSFIERMTNFDKNLPNEKVLPKHSLLYEYFTVYNELTKVKYVTEGMRKPAFLSGEQKKAIVDLLFKTNRKVTVKQLKEDYFKKIECFDSVEISGVEDRFNASLGTYHDLLKIIKDKDFLDNEENEDILEDIVLTLTLFEDREMIEERLKTYAHLFDDKVMKQLKRRRYTGWGRLSRKLINGIRDKQSGKTILDFLKSDGFANRNFMQLIHDDSLTFKEDIQKAQVSGQGDSLHEHIANLAGSPAIKKGILQTVKVVDELVKVMGRHKPENIVIEMARENQTTQKGQKNSRERMKRIEEGIKELGSQILKEHPVENTQLQNEKLYLYYLQNGRDMYVDQELDINRLSDYDVDHIVPQSFLKDDSIDNKVLTRSDKARGKSDNVPSEEVVKKMKNYWRQLLNAKLITQRKFDNLTKAERGGLSELDKAGFIKRQLVETRQITKHVAQILDSRMNTKYDENDKLIREVKVITLKSKLVSDFRKDFQFYKVREINNYHHAHDAYLNAVVGTALIKKYPKLESEFVYGDYKVYDVRKMIAKSEQEIGKATAKYFFYSNIMNFFKTEITLANGEIRKRPLIETNGETGEIVWDKGRDFATVRKVLSMPQVNIVKKTEVQTGGFSKESILPKRNSDKLIARKKDWDPKKYGGFDSPTVAYSVLVVAKVEKGKSKKLKSVKELLGITIMERSSFEKNPIDFLEAKGYKEVKKDLIIKLPKYSLFELENGRKRMLASAGELQKGNELALPSKYVNFLYLASHYEKLKGSPEDNEQKQLFVEQHKHYLDEIIEQISEFSKRVILADANLDKVLSAYNKHRDKPIREQAENIIHLFTLTNLGAPAAFKYFDTTIDRKRYTSTKEVLDATLIHQSITGLYETRIDLSQLGGDGGGGGGSGGGGSGGGGSGGGGSGGGRDIMKDIKVRLMTDSPDDSQDLMIGAIESNLFADQISWKSDQPVWLNQWPLKQEKLQALQQLVTEQLQLGHLEESNSPWNTPVFVIKKKSGKWRLLQDLRAVNATMHDMGALQPGLPSPVAVPKGWEIIIIDLQDCFFNIKLHPEDCKRFAFSVPSPNFKRPYQRFQWKVLPQGMKNSPTLCQKFVDKAILTVRDKYQDSYIVHYMDDILLAHPSRSIVDEILTSMIQALNKHGLVVSTEKIQKYDNLKYLGTHIQGDSVSYQKLQIRTDKLRTLNDFQKLLGNINWIRPFLKLTTGELKPLFEILNGDSNPISTRKLTPEACKALQLMNERLSTARVKRLDLSQPWSLCILKTEYTPTACLWQDGVVEWIHLPHISPKVITPYDIFCTQLIIKGRHRSKELFSKDPDYIVVPYTKVQFDLLLQEKEDWPISLLGFLGEVHFHLPKDPLLTFTLQTAIIFPHMTSTTPLEKGIVIFTDGSANGRSVTYIQGREPIIKENTQNTAQQAEIVAVITAFEEVSQPFNLYTDSKYVTGLFPEIETATLSPRTKIYTELKHLQRLIHKRQEKFYIGHIRGHTGLPGPLAQGNAYADSLTRILTAGKRTADGSEFEKRTADGSEFESPKKKAKVE

SEQ ID NO: 6158 - protein, 2097 aa, synthetic construct
MPAAKRVKLDGGDKKYSIGLDIGTNSVGWAVITDEYKVPSKKFKVLGNTDRHSIKKNLIGALLFDSGETAEATRLKRTARRRYTRRKNRICYLQEIFSNEMAKVDDSFFHRLEESFLVEEDKKHERHPIFGNIVDEVAYHEKYPTIYHLRKKLVDSTDKADLRLIYLALAHMIKFRGHFLIEGDLNPDNSDVDKLFIQLVQTYNQLFEENPINASGVDAKAILSARLSKSRRLENLIAQLPGEKKNGLFGNLIALSLGLTPNFKSNFDLAEDAKLQLSKDTYDDDLDNLLAQIGDQYADLFLAAKNLSDAILLSDILRVNTEITKAPLSASMIKRYDEHHQDLTLLKALVRQQLPEKYKEIFFDQSKNGYAGYIDGGASQEEFYKFIKPILEKMDGTEELLVKLNREDLLRKQRTFDNGSIPHQIHLGELHAILRRQEDFYPFLKDNREKIEKILTFRIPYYVGPLARGNSRFAWMTRKSEETITPWNFEEVVDKGASAQSFIERMTNFDKNLPNEKVLPKHSLLYEYFTVYNELTKVKYVTEGMRKPAFLSGEQKKAIVDLLFKTNRKVTVKQLKEDYFKKIECFDSVEISGVEDRFNASLGTYHDLLKIIKDKDFLDNEENEDILEDIVLTLTLFEDREMIEERLKTYAHLFDDKVMKQLKRRRYTGWGRLSRKLINGIRDKQSGKTILDFLKSDGFANRNFMQLIHDDSLTFKEDIQKAQVSGQGDSLHEHIANLAGSPAIKKGILQTVKVVDELVKVMGRHKPENIVIEMARENQTTQKGQKNSRERMKRIEEGIKELGSQILKEHPVENTQLQNEKLYLYYLQNGRDMYVDQELDINRLSDYDVDHIVPQSFLKDDSIDNKVLTRSDKARGKSDNVPSEEVVKKMKNYWRQLLNAKLITQRKFDNLTKAERGGLSELDKAGFIKRQLVETRQITKHVAQILDSRMNTKYDENDKLIREVKVITLKSKLVSDFRKDFQFYKVREINNYHHAHDAYLNAVVGTALIKKYPKLESEFVYGDYKVYDVRKMIAKSEQEIGKATAKYFFYSNIMNFFKTEITLANGEIRKRPLIETNGETGEIVWDKGRDFATVRKVLSMPQVNIVKKTEVQTGGFSKESILPKRNSDKLIARKKDWDPKKYGGFDSPTVAYSVLVVAKVEKGKSKKLKSVKELLGITIMERSSFEKNPIDFLEAKGYKEVKKDLIIKLPKYSLFELENGRKRMLASAGELQKGNELALPSKYVNFLYLASHYEKLKGSPEDNEQKQLFVEQHKHYLDEIIEQISEFSKRVILADANLDKVLSAYNKHRDKPIREQAENIIHLFTLTNLGAPAAFKYFDTTIDRKRYTSTKEVLDATLIHQSITGLYETRIDLSQLGGDGGGGGGSGGGGSGGGGSGGGGSGGLDDEYRLYSPLVKPDQNIQFWLEQFPQAWAETAGMGLAKQVPPQVIQLKASATPVSVRQYPLSKEAQEGIRPHVQRLIQQGILVPVQSPWNTPLLPVRKPGTNDYRPVQDLREVNKRVQDIHPTVPNPYNLLCALPPQRSWYTVLDLKDAFFCLRLHPTSQPLFAFEWRDPGTGRTGQLTWTRLPQGFKNSPTIFNEALHRDLANFRIQHPQVTLLQYVDDLLLAGATKQDCLEGTKALLLELSDLGYRASAKKAQICRREVTYLGYSLRDGQRWLTEARKKTVVQIPAPTTAKQVREFLGKAGFCRLFIPGFATLAAPLYPLTKPKGEFSWAPEHQKAFDAIKKALLSAPALALPDVTKPFTLYVDERKGVARGVLTQTLGPWRRPVAYLSKKLDPVASGWPVCLKAIAAVAILVKDADKLTLGQNITVIAPHALENIVRQPPDRWMTNARMTHYQSLLLTERVTFAPPAALNPATLLPEETDEPVTHDCHQLLIEETGVRKDLTDIPLTGEVLTWFTDGSSYVVEGKRMAGAAVVDGTRTIWASSLPEGTSAQKAELMALTQALRLAEGKSINIYTDSRYAFATAHVHGAIYKQRGWLTSAGREIKNKEEILSLLEALHLPKRLAIIHCPGHQKAKDPISRGNQMADRVAKQAAQGVNLLPAGKRTADGSEFEKRTADGSEFESPKKKAKVE

SEQ ID NO: 6159 - protein, 2097 aa, synthetic construct; identical to SEQ ID NO: 6158

SEQ ID NO: 6160 - protein, 2096 aa, synthetic construct
MPAAKRVKLDGGDKKYSIGLDIGTNSVGWAVITDEYKVPSKKFKVLGNTDRHSIKKNLIGALLFDSGETAEATRLKRTARRRYTRRKNRICYLQEIFSNEMAKVDDSFFHRLEESFLVEEDKKHERHPIFGNIVDEVAYHEKYPTIYHLRKKLVDSTDKADLRLIYLALAHMIKFRGHFLIEGDLNPDNSDVDKLFIQLVQTYNQLFEENPINASGVDAKAILSARLSKSRRLENLIAQLPGEKKNGLFGNLIALSLGLTPNFKSNFDLAEDAKLQLSKDTYDDDLDNLLAQIGDQYADLFLAAKNLSDAILLSDILRVNTEITKAPLSASMIKRYDEHHQDLTLLKALVRQQLPEKYKEIFFDQSKNGYAGYIDGGASQEEFYKFIKPILEKMDGTEELLVKLNREDLLRKQRTFDNGSIPHQIHLGELHAILRRQEDFYPFLKDNREKIEKILTFRIPYYVGPLARGNSRFAWMTRKSEETITPWNFEEVVDKGASAQSFIERMTNFDKNLPNEKVLPKHSLLYEYFTVYNELTKVKYVTEGMRKPAFLSGEQKKAIVDLLFKTNRKVTVKQLKEDYFKKIECFDSVEISGVEDRFNASLGTYHDLLKIIKDKDFLDNEENEDILEDIVLTLTLFEDREMIEERLKTYAHLFDDKVMKQLKRRRYTGWGRLSRKLINGIRDKQSGKTILDFLKSDGFANRNFMQLIHDDSLTFKEDIQKAQVSGQGDSLHEHIANLAGSPAIKKGILQTVKVVDELVKVMGRHKPENIVIEMARENQTTQKGQKNSRERMKRIEEGIKELGSQILKEHPVENTQLQNEKLYLYYLQNGRDMYVDQELDINRLSDYDVDHIVPQSFLKDDSIDNKVLTRSDKARGKSDNVPSEEVVKKMKNYWRQLLNAKLITQRKFDNLTKAERGGLSELDKAGFIKRQLVETRQITKHVAQILDSRMNTKYDENDKLIREVKVITLKSKLVSDFRKDFQFYKVREINNYHHAHDAYLNAVVGTALIKKYPKLESEFVYGDYKVYDVRKMIAKSEQEIGKATAKYFFYSNIMNFFKTEITLANGEIRKRPLIETNGETGEIVWDKGRDFATVRKVLSMPQVNIVKKTEVQTGGFSKESILPKRNSDKLIARKKDWDPKKYGGFDSPTVAYSVLVVAKVEKGKSKKLKSVKELLGITIMERSSFEKNPIDFLEAKGYKEVKKDLIIKLPKYSLFELENGRKRMLASAGELQKGNELALPSKYVNFLYLASHYEKLKGSPEDNEQKQLFVEQHKHYLDEIIEQISEFSKRVILADANLDKVLSAYNKHRDKPIREQAENIIHLFTLTNLGAPAAFKYFDTTIDRKRYTSTKEVLDATLIHQSITGLYETRIDLSQLGGDGGGGGGSGGGGSGGGGSGGGGSGGVPWLMKKPLQLTVLVPLHEYQERLLQQTALPKEQKELLQKLFLKYDALWQHWENQVGHRRIKPHNIATGTLAPRPQKQYPINPKAKPSIQIVIDDLLKQGVLIQQNSTMNTPVYPVPKPDGKWRMVLDYREVNKTIPLIAAQNQHSAGILSSIYRGKYKTTLDLTNGFWAHPITPESYWLTAFTWQGKQYCWTRLPQGFLNSPALFTADVVDLLKEIPNVQAYVDDIYISHDDPQEHLEQLEKIFSILLNAGYVVSLKKSEIAQREVEFLGFNITKEGRGLTDTFKQKLLNITPPKDLKQLQSILGLLNFARNFIPNYSELVKPLYTIVANANGKFISWTEDNSNQLQHIISVLNQADNLEERNPETRLIIKVNSSPSAGYIRYYNEGSKRPIMYVNYIFSKAEAKFTQTEKLLTTMHKGLIKAMDLAMGQEILVYSPIVSMTKIQRTPLPERKALPVRWITWMTYLEDPRIQFHYDKSLPELQQIPNVTEDVIAKTKHPSEFAMVFYTDGSAIKHPDVNKSHSAGMGIAQVQFIPEYKIVHQWSIPLGDHTAQLAEIAAVEFACKKALKISGPVLIVTDSFYVAESANKELPYWKSNGFLNNKKKPLRHVSKWKSIAECLQLKPDIIIMHEKGHQQPMTTLHTEGNNLADKLATQGSYVVHAGKRTADGSEFEKRTADGSEFESPKKKAKVE

SEQ ID NO: 6161 - protein, 2185 aa, synthetic construct
MPAAKRVKLDGGDKKYSIGLDIGTNSVGWAVITDEYKVPSKKFKVLGNTDRHSIKKNLIGALLFDSGETAEATRLKRTARRRYTRRKNRICYLQEIFSNEMAKVDDSFFHRLEESFLVEEDKKHERHPIFGNIVDEVAYHEKYPTIYHLRKKLVDSTDKADLRLIYLALAHMIKFRGHFLIEGDLNPDNSDVDKLFIQLVQTYNQLFEENPINASGVDAKAILSARLSKSRRLENLIAQLPGEKKNGLFGNLIALSLGLTPNFKSNFDLAEDAKLQLSKDTYDDDLDNLLAQIGDQYADLFLAAKNLSDAILLSDILRVNTEITKAPLSASMIKRYDEHHQDLTLLKALVRQQLPEKYKEIFFDQSKNGYAGYIDGGASQEEFYKFIKPILEKMDGTEELLVKLNREDLLRKQRTFDNGSIPHQIHLGELHAILRRQEDFYPFLKDNREKIEKILTFRIPYYVGPLARGNSRFAWMTRKSEETITPWNFEEVVDKGASAQSFIERMTNFDKNLPNEKVLPKHSLLYEYFTVYNELTKVKYVTEGMRKPAFLSGEQKKAIVDLLFKTNRKVTVKQLKEDYFKKIECFDSVEISGVEDRFNASLGTYHDLLKIIKDKDFLDNEENEDILEDIVLTLTLFEDREMIEERLKTYAHLFDDKVMKQLKRRRYTGWGRLSRKLINGIRDKQSGKTILDFLKSDGFANRNFMQLIHDDSLTFKEDIQKAQVSGQGDSLHEHIANLAGSPAIKKGILQTVKVVDELVKVMGRHKPENIVIEMARENQTTQKGQKNSRERMKRIEEGIKELGSQILKEHPVENTQLQNEKLYLYYLQNGRDMYVDQELDINRLSDYDVDHIVPQSFLKDDSIDNKVLTRSDKARGKSDNVPSEEVVKKMKNYWRQLLNAKLITQRKFDNLTKAERGGLSELDKAGFIKRQLVETRQITKHVAQILDSRMNTKYDENDKLIREVKVITLKSKLVSDFRKDFQFYKVREINNYHHAHDAYLNAVVGTALIKKYPKLESEFVYGDYKVYDVRKMIAKSEQEIGKATAKYFFYSNIMNFFKTEITLANGEIRKRPLIETNGETGEIVWDKGRDFATVRKVLSMPQVNIVKKTEVQTGGFSKESILPKRNSDKLIARKKDWDPKKYGGFDSPTVAYSVLVVAKVEKGKSKKLKSVKELLGITIMERSSFEKNPIDFLEAKGYKEVKKDLIIKLPKYSLFELENGRKRMLASAGELQKGNELALPSKYVNFLYLASHYEKLKGSPEDNEQKQLFVEQHKHYLDEIIEQISEFSKRVILADANLDKVLSAYNKHRDKPIREQAENIIHLFTLTNLGAPAAFKYFDTTIDRKRYTSTKEVLDATLIHQSITGLYETRIDLSQLGGDGGGGGGSGGGGSGGGGSGGGGSGGMDPLQLLQPLEAEIKGTKLKAHWNSGATITCVPQAFLEEEVPIKNIWIKTIHGEKEQPVYYLTFKIQGRKVEAEVISSPYDYILVSPSDIPWLMKKPLQLTTLVPLQEYEERLLKQTMLTGSYKEKLQSLFLKYDALWQHWENQVGHRRIKPHHIATGTVNPRPQKQYPINPKAKASIQTVINDLLKQGVLIQQNSIMNTPVYPVPKPDGKWRMVLDYREVNKTIPLIAAQNQHSAGILSSIFRGKYKTTLDLSNGFWAHSITPESYWLTAFTWLGQQYCWTRLPQGFLNSPALFTADVVDLLKEVPNVQVYVDDIYISHDDPREHLEQLEKVFSLLLNAGYVVSLKKSEIAQHEVEFLGFNITKEGRGLTETFKQKLLNITPPRDLKQLQSILGLLNFARNFIPNFSELVKPLYNIIATANGKYITWTTDNSQQLQNIISMLNSAENLEERNPEVRLIMKVNTSPSAGYIRFYNEFAKRPIMYLNYVYTKAEVKFTNTEKLLTTIHKGLIKALDLGMGQEILVYSPIVSMTKIQKTPLPERKALPIRWITWMSYLEDPRIQFHYDKTLPELQQVPTVTDDIIAKIKHPSEFSMVFYTDGSAIKHPNVNKSHNAGMGIAQVQFKPEFTVINTWSIPLGDHTAQLAEVAAVEFACKKALKIDGPVLIVTDSFYVAESVNKELPYWQSNGFFNNKKKPLKHVSKWKSIADCIQLKPDIIIIHEKGHQPTASTFHTEGNNLADKLATQGSYVVNAGKRTADGSEFEKRTADGSEFESPKKKAKVE

SEQ ID NO: 6162 - protein, 2096 aa, synthetic construct
MPAAKRVKLDGGDKKYSIGLDIGTNSVGWAVITDEYKVPSKKFKVLGNTDRHSIKKNLIGALLFDSGETAEATRLKRTARRRYTRRKNRICYLQEIFSNEMAKVDDSFFHRLEESFLVEEDKKHERHPIFGNIVDEVAYHEKYPTIYHLRKKLVDSTDKADLRLIYLALAHMIKFRGHFLIEGDLNPDNSDVDKLFIQLVQTYNQLFEENPINASGVDAKAILSARLSKSRRLENLIAQLPGEKKNGLFGNLIALSLGLTPNFKSNFDLAEDAKLQLSKDTYDDDLDNLLAQIGDQYADLFLAAKNLSDAILLSDILRVNTEITKAPLSASMIKRYDEHHQDLTLLKALVRQQLPEKYKEIFFDQSKNGYAGYIDGGASQEEFYKFIKPILEKMDGTEELLVKLNREDLLRKQRTFDNGSIPHQIHLGELHAILRRQEDFYPFLKDNREKIEKILTFRIPYYVGPLARGNSRFAWMTRKSEETITPWNFEEVVDKGASAQSFIERMTNFDKNLPNEKVLPKHSLLYEYFTVYNELTKVKYVTEGMRKPAFLSGEQKKAIVDLLFKTNRKVTVKQLKEDYFKKIECFDSVEISGVEDRFNASLGTYHDLLKIIKDKDFLDNEENEDILEDIVLTLTLFEDREMIEERLKTYAHLFDDKVMKQLKRRRYTGWGRLSRKLINGIRDKQSGKTILDFLKSDGFANRNFMQLIHDDSLTFKEDIQKAQVSGQGDSLHEHIANLAGSPAIKKGILQTVKVVDELVKVMGRHKPENIVIEMARENQTTQKGQKNSRERMKRIEEGIKELGSQILKEHPVENTQLQNEKLYLYYLQNGRDMYVDQELDINRLSDYDVDHIVPQSFLKDDSIDNKVLTRSDKARGKSDNVPSEEVVKKMKNYWRQLLNAKLITQRKFDNLTKAERGGLSELDKAGFIKRQLVETRQITKHVAQILDSRMNTKYDENDKLIREVKVITLKSKLVSDFRKDFQFYKVREINNYHHAHDAYLNAVVGTALIKKYPKLESEFVYGDYKVYDVRKMIAKSEQEIGKATAKYFFYSNIMNFFKTEITLANGEIRKRPLIETNGETGEIVWDKGRDFATVRKVLSMPQVNIVKKTEVQTGGFSKESILPKRNSDKLIARKKDWDPKKYGGFDSPTVAYSVLVVAKVEKGKSKKLKSVKELLGITIMERSSFEKNPIDFLEAKGYKEVKKDLIIKLPKYSLFELENGRKRMLASAGELQKGNELALPSKYVNFLYLASHYEKLKGSPEDNEQKQLFVEQHKHYLDEIIEQISEFSKRVILADANLDKVLSAYNKHRDKPIREQAENIIHLFTLTNLGAPAAFKYFDTTIDRKRYTSTKEVLDATLIHQSITGLYETRIDLSQLGGDGGGGGGSGGGGSGGGGSGGGGSGGIPWLMKKPLQLTTLVPLQEYEERLLKQTMLTGSYKEKLQSLFLKYDALWQHWENQVGHRRIKPHHIATGTVNPRPQKQYPINPKAKASIQTVINDLLKQGVLIQQNSIMNTPVYPVPKPDGKWRMVLDYREVNKTIPLIAAQNQHSAGILSSIFRGKYKTTLDLSNGFWAHSITPESYWLTAFTWLGQQYCWTRLPQGFLNSPALFNADVVDLLKEVPNVQVYVDDIYISHDDPREHLEQLEKVFSLLLNAGYVVSLKKSEIAQHEVEFLGFNITKEGRGLTETFKQKLLNITPPRDLKQLQSILGKLNFARNFIPNFSELVKPLYNIIATAPGKYITWTTDNSQQLQNIISMLNSAENLEERNPEVRLIMKVNTSPSAGYIRFYNEFAKRPIMYLNYVYTKAEVKFTNTEKLLTTIHKGLIKALDLGMGQEILVYSPIVSMTKIQKTPLPERKALPIRWITWMSYLEDPRIQFHYDKTLPELQQVPTVTDDIIAKIKHPSEFSMVFYTDGSAIKHPNVNKSHNAGMGIAQVQFKPEFTVINTWSIPLGDHTAQLAEVAAVEFACKKALKIDGPVLIVTDSFYVAESVNKELPYWQSNGFFNNKKKPLKHVSKWKSIADCIQLKPDIIIIHEKGHQPTASTFHTEGNNLADKLATQGSYVVNAGKRTADGSEFEKRTADGSEFESPKKKAKVE

SEQ ID NO: 6163 - protein, 2103 aa, synthetic construct
MPAAKRVKLDGGDKKYSIGLDIGTNSVGWAVITDEYKVPSKKFKVLGNTDRHSIKKNLIGALLFDSGETAEATRLKRTARRRYTRRKNRICYLQEIFSNEMAKVDDSFFHRLEESFLVEEDKKHERHPIFGNIVDEVAYHEKYPTIYHLRKKLVDSTDKADLRLIYLALAHMIKFRGHFLIEGDLNPDNSDVDKLFIQLVQTYNQLFEENPINASGVDAKAILSARLSKSRRLENLIAQLPGEKKNGLFGNLIALSLGLTPNFKSNFDLAEDAKLQLSKDTYDDDLDNLLAQIGDQYADLFLAAKNLSDAILLSDILRVNTEITKAPLSASMIKRYDEHHQDLTLLKALVRQQLPEKYKEIFFDQSKNGYAGYIDGGASQEEFYKFIKPILEKMDGTEELLVKLNREDLLRKQRTFDNGSIPHQIHLGELHAILRRQEDFYPFLKDNREKIEKILTFRIPYYVGPLARGNSRFAWMTRKSEETITPWNFEEVVDKGASAQSFIERMTNFDKNLPNEKVLPKHSLLYEYFTVYNELTKVKYVTEGMRKPAFLSGEQKKAIVDLLFKTNRKVTVKQLKEDYFKKIECFDSVEISGVEDRFNASLGTYHDLLKIIKDKDFLDNEENEDILEDIVLTLTLFEDREMIEERLKTYAHLFDDKVMKQLKRRRYTGWGRLSRKLINGIRDKQSGKTILDFLKSDGFANRNFMQLIHDDSLTFKEDIQKAQVSGQGDSLHEHIANLAGSPAIKKGILQTVKVVDELVKVMGRHKPENIVIEMARENQTTQKGQKNSRERMKRIEEGIKELGSQILKEHPVENTQLQNEKLYLYYLQNGRDMYVDQELDINRLSDYDVDHIVPQSFLKDDSIDNKVLTRSDKARGKSDNVPSEEVVKKMKNYWRQLLNAKLITQRKFDNLTKAERGGLSELDKAGFIKRQLVETRQITKHVAQILDSRMNTKYDENDKLIREVKVITLKSKLVSDFRKDFQFYKVREINNYHHAHDAYLNAVVGTALIKKYPKLESEFVYGDYKVYDVRKMIAKSEQEIGKATAKYFFYSNIMNFFKTEITLANGEIRKRPLIETNGETGEIVWDKGRDFATVRKVLSMPQVNIVKKTEVQTGGFSKESILPKRNSDKLIARKKDWDPKKYGGFDSPTVAYSVLVVAKVEKGKSKKLKSVKELLGITIMERSSFEKNPIDFLEAKGYKEVKKDLIIKLPKYSLFELENGRKRMLASAGELQKGNELALPSKYVNFLYLASHYEKLKGSPEDNEQKQLFVEQHKHYLDEIIEQISEFSKRVILADANLDKVLSAYNKHRDKPIREQAENIIHLFTLTNLGAPAAFKYFDTTIDRKRYTSTKEVLDATLIHQSITGLYETRIDLSQLGGDGGGGGGSGGGGSGGGGSGGGGSGGVLNLEEEYRLHEKPVPSSIDPSWLQLFPTVWAERAGMGLANQVPPVVVELRSGASPVAVRQYPMSKEAREGIRPHIQRFLDLGVLVPCQSPWNTPLLPVKKPGTNDYRPVQDLREINKRVQDIHPTVPNPYNLLSSLPPSHTWYSVLDLKDAFFCLKLHPNSQPLFAFEWRDPEKGNTGQLTWTRLPQGFKNSPTLFNEALHRDLAPFRALNPQVVLLQYVDDLLVAAPTYRDCKEGTQKLLQELSKLGYRVSAKKAQLCQKEVTYLGYLLKEGKRWLTPARKATVMKIPPPTTPRQVREFLGKAGFCRLFIPGFASLAAPLYPLTKPSIPFIWTEEHQKAFDRIKEALLSAPALALPDLTKPFTLYVDERAGVARGVLTQTLGPWRRPVAYLSKKLDPVASGWPTCLKAVAAVALLLKDADKLTLGQNVTVIASHSLESIVRQPPDRWMTNARMTHYQSLLLNERVSFAPPAVLNPATLLPVESEATPVHRCSEILAEETGTRRDLKDQPLPGVPAWYTDGSSFIAEGKRRAGAAIVDGKRTVWASSLPEGTSAQKAELVALTQALRLAEGKDINIYTDSRYAFATAHIHGAIYKQRGWLTSAGKDIKNKEEILALLEAIHLPKRVAIIHCPGHQKGNDPVATGNRRADEAAKQAALSTRVLAETTKPAGKRTADGSEFEKRTADGSEFESPKKKAKVE

SEQ ID NO: 6164 - protein, 2112 aa, synthetic construct
MPAAKRVKLDGGDKKYSIGLDIGTNSVGWAVITDEYKVPSKKFKVLGNTDRHSIKKNLIGALLFDSGETAEATRLKRTARRRYTRRKNRICYLQEIFSNEMAKVDDSFFHRLEESFLVEEDKKHERHPIFGNIVDEVAYHEKYPTIYHLRKKLVDSTDKADLRLIYLALAHMIKFRGHFLIEGDLNPDNSDVDKLFIQLVQTYNQLFEENPINASGVDAKAILSARLSKSRRLENLIAQLPGEKKNGLFGNLIALSLGLTPNFKSNFDLAEDAKLQLSKDTYDDDLDNLLAQIGDQYADLFLAAKNLSDAILLSDILRVNTEITKAPLSASMIKRYDEHHQDLTLLKALVRQQLPEKYKEIFFDQSKNGYAGYIDGGASQEEFYKFIKPILEKMDGTEELLVKLNREDLLRKQRTFDNGSIPHQIHLGELHAILRRQEDFYPFLKDNREKIEKILTFRIPYYVGPLARGNSRFAWMTRKSEETITPWNFEEVVDKGASAQSFIERMTNFDKNLPNEKVLPKHSLLYEYFTVYNELTKVKYVTEGMRKPAFLSGEQKKAIVDLLFKTNRKVTVKQLKEDYFKKIECFDSVEISGVEDRFNASLGTYHDLLKIIKDKDFLDNEENEDILEDIVLTLTLFEDREMIEERLKTYAHLFDDKVMKQLKRRRYTGWGRLSRKLINGIRDKQSGKTILDFLKSDGFANRNFMQLIHDDSLTFKEDIQKAQVSGQGDSLHEHIANLAGSPAIKKGILQTVKVVDELVKVMGRHKPENIVIEMARENQTTQKGQKNSRERMKRIEEGIKELGSQILKEHPVENTQLQNEKLYLYYLQNGRDMYVDQELDINRLSDYDVDHIVPQSFLKDDSIDNKVLTRSDKARGKSDNVPSEEVVKKMKNYWRQLLNAKLITQRKFDNLTKAERGGLSELDKAGFIKRQLVETRQITKHVAQILDSRMNTKYDENDKLIREVKVITLKSKLVSDFRKDFQFYKVREINNYHHAHDAYLNAVVGTALIKKYPKLESEFVYGDYKVYDVRKMIAKSEQEIGKATAKYFFYSNIMNFFKTEITLANGEIRKRPLIETNGETGEIVWDKGRDFATVRKVLSMPQVNIVKKTEVQTGGFSKESILPKRNSDKLIARKKDWDPKKYGGFDSPTVAYSVLVVAKVEKGKSKKLKSVKELLGITIMERSSFEKNPIDFLEAKGYKEVKKDLIIKLPKYSLFELENGRKRMLASAGELQKGNELALPSKYVNFLYLASHYEKLKGSPEDNEQKQLFVEQHKHYLDEIIEQISEFSKRVILADANLDKVLSAYNKHRDKPIREQAENIIHLFTLTNLGAPAAFKYFDTTIDRKRYTSTKEVLDATLIHQSITGLYETRIDLSQLGGDGGGGGGSGGGGSGGGGSGGGGSGGGGSGGTAPLEEEYRLFLEAPIQNVTLLEQWKREIPKVWAEINPPGLASTQAPIHVQLLSTALPVRVRQYPITLEAKRSLRETIRKFRAAGILRPVHSPWNTPLLPVRKSGTSEYRMVQDLREVNKRVETIHPTVPNPYTLLSLLPPDRIWYSVLDLKDAFFCIPLAPESQLIFAFEWADAEEGESGQLTWTRLPQGFKNSPTLFNEALNRDLQGFRLDHPSVSLLQYVDDLLIAADTQAACLSATRDLLMTLAELGYRVSGKKAQLCQEEVTYLGFKIHKGSRSLSNSRTQAILQIPVPKTKRQVREFLGTIGYCRLWIPGFAELAQPLYAATRPGNDPLVWGEKEEEAFQSLKLALTQPPALALPSLDKPFQLFVEETSGAAKGVLTQALGPWKRPVAYLSKRLDPVAAGWPRCLRAIAAAALLTREASKLTFGQDIEITSSHNLESLLRSPPDKWLTNARITQYQVLLLDPPRVRFKQTAALNPATLLPETDDTLPIHHCLDTLDSLTSTRPDLTDQPLAQAEATLFTDGSSYIRDGKRYAGAAVVTLDSVIWAEPLPIGTSAQKAELIALTKALEWSKDKSVNIYTDSRYAFATLHVHGMIYRERGWLTAGGKAIKNAPEILALLTAVWLPKRVAVMHCKGHQKDDAPTSTGNRRADEVAREVAIRPLSTQATISAGKRTADGSEFEKRTADGSEFESPKKKAKVE

SEQ ID NO: 6165 - protein, 2112 aa, synthetic construct
MPAAKRVKLDGGDKKYSIGLDIGTNSVGWAVITDEYKVPSKKFKVLGNTDRHSIKKNLIGALLFDSGETAEATRLKRTARRRYTRRKNRICYLQEIFSNEMAKVDDSFFHRLEESFLVEEDKKHERHPIFGNIVDEVAYHEKYPTIYHLRKKLVDSTDKADLRLIYLALAHMIKFRGHFLIEGDLNPDNSDVDKLFIQLVQTYNQLFEENPINASGVDAKAILSARLSKSRRLENLIAQLPGEKKNGLFGNLIALSLGLTPNFKSNFDLAEDAKLQLSKDTYDDDLDNLLAQIGDQYADLFLAAKNLSDAILLSDILRVNTEITKAPLSASMIKRYDEHHQDLTLLKALVRQQLPEKYKEIFFDQSKNGYAGYIDGGASQEEFYKFIKPILEKMDGTEELLVKLNREDLLRKQRTFDNGSIPHQIHLGELHAILRRQEDFYPFLKDNREKIEKILTFRIPYYVGPLARGNSRFAWMTRKSEETITPWNFEEVVDKGASAQSFIERMTNFDKNLPNEKVLPKHSLLYEYFTVYNELTKVKYVTEGMRKPAFLSGEQKKAIVDLLFKTNRKVTVKQLKEDYFKKIECFDSVEISGVEDRFNASLGTYHDLLKIIKDKDFLDNEENEDILEDIVLTLTLFEDREMIEERLKTYAHLFDDKVMKQLKRRRYTGWGRLSRKLINGIRDKQSGKTILDFLKSDGFANRNFMQLIHDDSLTFKEDIQKAQVSGQGDSLHEHIANLAGSPAIKKGILQTVKVVDELVKVMGRHKPENIVIEMARENQTTQKGQKNSRERMKRIEEGIKELGSQILKEHPVENTQLQNEKLYLYYLQNGRDMYVDQELDINRLSDYDVDHIVPQSFLKDDSIDNKVLTRSDKARGKSDNVPSEEVVKKMKNYWRQLLNAKLITQRKFDNLTKAERGGLSELDKAGFIKRQLVETRQITKHVAQILDSRMNTKYDENDKLIREVKVITLKSKLVSDFRKDFQFYKVREINNYHHAHDAYLNAVVGTALIKKYPKLESEFVYGDYKVYDVRKMIAKSEQEIGKATAKYFFYSNIMNFFKTEITLANGEIRKRPLIETNGETGEIVWDKGRDFATVRKVLSMPQVNIVKKTEVQTGGFSKESILPKRNSDKLIARKKDWDPKKYGGFDSPTVAYSVLVVAKVEKGKSKKLKSVKELLGITIMERSSFEKNPIDFLEAKGYKEVKKDLIIKLPKYSLFELENGRKRMLASAGELQKGNELALPSKYVNFLYLASHYEKLKGSPEDNEQKQLFVEQHKHYLDEIIEQISEFSKRVILADANLDKVLSAYNKHRDKPIREQAENIIHLFTLTNLGAPAAFKYFDTTIDRKRYTSTKEVLDATLIHQSITGLYETRIDLSQLGGDGGGGGGSGGGGSGGGGSGGGGSGGGGSGGTAPLEEEYRLFLEAPIQNVTLLEQWKREIPKVWAEINPPGLASTQAPIHVQLLSTALPVRVRQYPITLEAKRSLRETIRKFRAAGILRPVHSPWNTPLLPVRKSGTSEYRMVQDLREVNKRVETIHPTVPNPYTLLSLLPPDRIWYSVLDLKDAFFCIPLAPESQLIFAFEWADAEEGESGQLTWTRLPQGFKNSPTLFNEALNRDLQGFRLDHPSVSLLQYVDDLLIAADTQAACLSATRDLLMTLAELGYRVSGKKAQLCQEEVTYLGFKIHKGSRSLSNSRTQAILQIPVPKTKRQVREFLGKIGYCRLFIPGFAELAQPLYAATRPGNDPLVWGEKEEEAFQSLKLALTQPPALALPSLDKPFQLFVEETSGAAKGVLTQALGPWKRPVAYLSKRLDPVAAGWPRCLRAIAAAALLTREASKLTFGQDIEITSSHNLESLLRSPPDKWLTNARITQYQVLLLDPPRVRFKQTAALNPATLLPETDDTLPIHHCLDTLDSLTSTRPDLTDQPLAQAEATLFTDGSSYIRDGKRYAGAAVVTLDSVIWAEPLPIGTSAQKAELIALTKALEWSKDKSVNIYTDSRYAFATLHVHGMIYRERGWLTAGGKAIKNAPEILALLTAVWLPKRVAVMHCKGHQKDDAPTSTGNRRADEVAREVAIRPLSTQATISAGKRTADGSEFEKRTADGSEFESPKKKAKVE

SEQ ID NO: 6166 - protein, 2116 aa, synthetic construct
MPAAKRVKLDGGDKKYSIGLDIGTNSVGWAVITDEYKVPSKKFKVLGNTDRHSIKKNLIGALLFDSGETAEATRLKRTARRRYTRRKNRICYLQEIFSNEMAKVDDSFFHRLEESFLVEEDKKHERHPIFGNIVDEVAYHEKYPTIYHLRKKLVDSTDKADLRLIYLALAHMIKFRGHFLIEGDLNPDNSDVDKLFIQLVQTYNQLFEENPINASGVDAKAILSARLSKSRRLENLIAQLPGEKKNGLFGNLIALSLGLTPNFKSNFDLAEDAKLQLSKDTYDDDLDNLLAQIGDQYADLFLAAKNLSDAILLSDILRVNTEITKAPLSASMIKRYDEHHQDLTLLKALVRQQLPEKYKEIFFDQSKNGYAGYIDGGASQEEFYKFIKPILEKMDGTEELLVKLNREDLLRKQRTFDNGSIPHQIHLGELHAILRRQEDFYPFLKDNREKIEKILTFRIPYYVGPLARGNSRFAWMTRKSEETITPWNFEEVVDKGASAQSFIERMTNFDKNLPNEKVLPKHSLLYEYFTVYNELTKVKYVTEGMRKPAFLSGEQKKAIVDLLFKTNRKVTVKQLKEDYFKKIECFDSVEISGVEDRFNASLGTYHDLLKIIKDKDFLDNEENEDILEDIVLTLTLFEDREMIEERLKTYAHLFDDKVMKQLKRRRYTGWGRLSRKLINGIRDKQSGKTILDFLKSDGFANRNFMQLIHDDSLTFKEDIQKAQVSGQGDSLHEHIANLAGSPAIKKGILQTVKVVDELVKVMGRHKPENIVIEMARENQTTQKGQKNSRERMKRIEEGIKELGSQILKEHPVENTQLQNEKLYLYYLQNGRDMYVDQELDINRLSDYDVDHIVPQSFLKDDSIDNKVLTRSDKARGKSDNVPSEEVVKKMKNYWRQLLNAKLITQRKFDNLTKAERGGLSELDKAGFIKRQLVETRQITKHVAQILDSRMNTKYDENDKLIREVKVITLKSKLVSDFRKDFQFYKVREINNYHHAHDAYLNAVVGTALIKKYPKLESEFVYGDYKVYDVRKMIAKSEQEIGKATAKYFFYSNIMNFFKTEITLANGEIRKRPLIETNGETGEIVWDKGRDFATVRKVLSMPQVNIVKKTEVQTGGFSKESILPKRNSDKLIARKKDWDPKKYGGFDSPTVAYSVLVVAKVEKGKSKKLKSVKELLGITIMERSSFEKNPIDFLEAKGYKEVKKDLIIKLPKYSLFELENGRKRMLASAGELQKGNELALPSKYVNFLYLASHYEKLKGSPEDNEQKQLFVEQHKHYLDEIIEQISEFSKRVILADANLDKVLSAYNKHRDKPIREQAENIIHLFTLTNLGAPAAFKYFDTTIDRKRYTSTKEVLDATLIHQSITGLYETRIDLSQLGGDGGGGGGSGGGGSGGGGSGGGGSGGGGSGGTVSLQDEHRLFDIPVTTSLPDVWLQDFPQAWAETGGLGRAKCQAPIIIDLKPTAVPVSIKQYPMSLEAHMGIRQHIIKFLELGVLRPCRSPWNTPLLPVKKPGTQDYRPVQDLREINKRTVDIHPTVPNPYNLLSTLKPDYSWYTVLDLKDAFFCLPLAPQSQELFAFEWKDPERGISGQLTWTRLPQGFKNSPTLFDEALHRDLTDFRTQHPEVTLLQYVDDLLLAAPTKKACTQGTRHLLQELGEKGYRASAKKAQICQTKVTYLGYILSEGKRWLTPGRIETVARIPPPRNPREVREFLGTAGFCRLWIPGFAELAAPLYALTKESTPFTWQTEHQLAFEALKKALLSAPALGLPDTSKPFTLFLDERQGIAKGVLTQKLGPWKRPVAYLSKKLDPVAAGWPPCLRIMAATAMLVKDSAKLTLGQPLTVITPHTLEAIVRQPPDRWITNARLTHYQALLLDTDRVQFGPPVTLNPATLLPVPENQPSPHDCRQVLAETHGTREDLKDQELPDADHTWYTDGSSYLDSGTRRAGAAVVDGHNTIWAQSLPPGTSAQKAELIALTKALELSKGKKANIYTDSRYAFATAHTHGSIYERRGLLTSEGKEIKNKAEIIALLKALFLPQEVAIIHCPGHQKGQDPVAVGNRQADRVARQAAMAEVLTLATEPDNTSHITAGKRTADGSEFEKRTADGSEFESPKKKAKVE

SEQ ID NO: 6167 - protein, 2015 aa, synthetic construct
MPAAKRVKLDGGDKKYSIGLDIGTNSVGWAVITDEYKVPSKKFKVLGNTDRHSIKKNLIGALLFDSGETAEATRLKRTARRRYTRRKNRICYLQEIFSNEMAKVDDSFFHRLEESFLVEEDKKHERHPIFGNIVDEVAYHEKYPTIYHLRKKLVDSTDKADLRLIYLALAHMIKFRGHFLIEGDLNPDNSDVDKLFIQLVQTYNQLFEENPINASGVDAKAILSARLSKSRRLENLIAQLPGEKKNGLFGNLIALSLGLTPNFKSNFDLAEDAKLQLSKDTYDDDLDNLLAQIGDQYADLFLAAKNLSDAILLSDILRVNTEITKAPLSASMIKRYDEHHQDLTLLKALVRQQLPEKYKEIFFDQSKNGYAGYIDGGASQEEFYKFIKPILEKMDGTEELLVKLNREDLLRKQRTFDNGSIPHQIHLGELHAILRRQEDFYPFLKDNREKIEKILTFRIPYYVGPLARGNSRFAWMTRKSEETITPWNFEEVVDKGASAQSFIERMTNFDKNLPNEKVLPKHSLLYEYFTVYNELTKVKYVTEGMRKPAFLSGEQKKAIVDLLFKTNRKVTVKQLKEDYFKKIECFDSVEISGVEDRFNASLGTYHDLLKIIKDKDFLDNEENEDILEDIVLTLTLFEDREMIEERLKTYAHLFDDKVMKQLKRRRYTGWGRLSRKLINGIRDKQSGKTILDFLKSDGFANRNFMQLIHDDSLTFKEDIQKAQVSGQGDSLHEHIANLAGSPAIKKGILQTVKVVDELVKVMGRHKPENIVIEMARENQTTQKGQKNSRERMKRIEEGIKELGSQILKEHPVENTQLQNEKLYLYYLQNGRDMYVDQELDINRLSDYDVDHIVPQSFLKDDSIDNKVLTRSDKARGKSDNVPSEEVVKKMKNYWRQLLNAKLITQRKFDNLTKAERGGLSELDKAGFIKRQLVETRQITKHVAQILDSRMNTKYDENDKLIREVKVITLKSKLVSDFRKDFQFYKVREINNYHHAHDAYLNAVVGTALIKKYPKLESEFVYGDYKVYDVRKMIAKSEQEIGKATAKYFFYSNIMNFFKTEITLANGEIRKRPLIETNGETGEIVWDKGRDFATVRKVLSMPQVNIVKKTEVQTGGFSKESILPKRNSDKLIARKKDWDPKKYGGFDSPTVAYSVLVVAKVEKGKSKKLKSVKELLGITIMERSSFEKNPIDFLEAKGYKEVKKDLIIKLPKYSLFELENGRKRMLASAGELQKGNELALPSKYVNFLYLASHYEKLKGSPEDNEQKQLFVEQHKHYLDEIIEQISEFSKRVILADANLDKVLSAYNKHRDKPIREQAENIIHLFTLTNLGAPAAFKYFDTTIDRKRYTSTKEVLDATLIHQSITGLYETRIDLSQLGGDGGGGGGSGGGGSGGGGSGGGGSGGGGSGGGVLDAPPSHIGLEHLPPPPEVPQFPLNLERLQALQDLVHRSLEAGYISPWDGPGNNPVFPVRKPNGAWRFVHDLRVTNALTKPIPALSPGPPDLTAIPTHLPHIICLDLKDAFFQIPVEDRFRSYFAFTLPTPGGLQPHRRFAWRVLPQGFINSPALFQRALQEPLRQVSAAFSQSLLVSYMDDILYVSPTEEQRLQCYQTMAAHLRDLGFQVASEKTRQTPSPVPFLGQMVHERMVTYQSLPTLQISSPISLHQLQTVLGDLQWVSRGTPTTRRPLQLLYSSLKPIDDPRAIIHLSPEQQQGIAELRQALSHNARSRYNEQEPLLAYVHLTRAGSTLVLFQKGAQFPLAYFQTPLTDNQASPWGLLLLLGCQYLQAQALSSYAKTILKYYHNLPKTSLDNWIQSSEDPRVQELLQLWPQISSQGIQPPGPWKTLVTRAEVFLTPQFSPEPIPAALCLFSDGAARRGAYCLWKDHLLDFQAVPAPESAQKGELAGLLAGLAAAPPEPLNIWVDSKYLYSLLRTLVLGAWLQPDPVPSYALLYKSLLRHPAIFVGHVRSHSSASHPIASLNNYVDQLAGKRTADGSEFEKRTADGSEFESPKKKAKVE

SEQ ID NO: 6168 - protein, 2187 aa, synthetic construct
MPAAKRVKLDGGDKKYSIGLDIGTNSVGWAVITDEYKVPSKKFKVLGNTDRHSIKKNLIGALLFDSGETAEATRLKRTARRRYTRRKNRICYLQEIFSNEMAKVDDSFFHRLEESFLVEEDKKHERHPIFGNIVDEVAYHEKYPTIYHLRKKLVDSTDKADLRLIYLALAHMIKFRGHFLIEGDLNPDNSDVDKLFIQLVQTYNQLFEENPINASGVDAKAILSARLSKSRRLENLIAQLPGEKKNGLFGNLIALSLGLTPNFKSNFDLAEDAKLQLSKDTYDDDLDNLLAQIGDQYADLFLAAKNLSDAILLSDILRVNTEITKAPLSASMIKRYDEHHQDLTLLKALVRQQLPEKYKEIFFDQSKNGYAGYIDGGASQEEFYKFIKPILEKMDGTEELLVKLNREDLLRKQRTFDNGSIPHQIHLGELHAILRRQEDFYPFLKDNREKIEKILTFRIPYYVGPLARGNSRFAWMTRKSEETITPWNFEEVVDKGASAQSFIERMTNFDKNLPNEKVLPKHSLLYEYFTVYNELTKVKYVTEGMRKPAFLSGEQKKAIVDLLFKTNRKVTVKQLKEDYFKKIECFDSVEISGVEDRFNASLGTYHDLLKIIKDKDFLDNEENEDILEDIVLTLTLFEDREMIEERLKTYAHLFDDKVMKQLKRRRYTGWGRLSRKLINGIRDKQSGKTILDFLKSDGFANRNFMQLIHDDSLTFKEDIQKAQVSGQGDSLHEHIANLAGSPAIKKGILQTVKVVDELVKVMGRHKPENIVIEMARENQTTQKGQKNSRERMKRIEEGIKELGSQILKEHPVENTQLQNEKLYLYYLQNGRDMYVDQELDINRLSDYDVDHIVPQSFLKDDSIDNKVLTRSDKARGKSDNVPSEEVVKKMKNYWRQLLNAKLITQRKFDNLTKAERGGLSELDKAGFIKRQLVETRQITKHVAQILDSRMNTKYDENDKLIREVKVITLKSKLVSDFRKDFQFYKVREINNYHHAHDAYLNAVVGTALIKKYPKLESEFVYGDYKVYDVRKMIAKSEQEIGKATAKYFFYSNIMNFFKTEITLANGEIRKRPLIETNGETGEIVWDKGRDFATVRKVLSMPQVNIVKKTEVQTGGFSKESILPKRNSDKLIARKKDWDPKKYGGFDSPTVAYSVLVVAKVEKGKSKKLKSVKELLGITIMERSSFEKNPIDFLEAKGYKEVKKDLIIKLPKYSLFELENGRKRMLASAGELQKGNELALPSKYVNFLYLASHYEKLKGSPEDNEQKQLFVEQHKHYLDEIIEQISEFSKRVILADANLDKVLSAYNKHRDKPIREQAENIIHLFTLTNLGAPAAFKYFDTTIDRKRYTSTKEVLDATLIHQSITGLYETRIDLSQLGGDGGGGGGSGGGGSGGGGSGGGGSGGGGSGGMDLLKPLTVERKGVKIKGYWNSQADITCVPKDLLQGEEPVRQQNVTTIHGTQEGDVYYVNLKIDGRRINTEVIGTTLDYAIITPGDVPWILKKPLELTIKLDLEEQQGTLLNNSILSKKGKEELKQLFEKYSALWQSWENQVGHRRIRPHKIATGTVKPTPQKQYHINPKAKPDIQIVINDLLKQGVLIQKESTMNTPVYPVPKPNGRWRMVLDYRAVNKVTPLIAVQNQHSYGILGSLFKGRYKTTIDLSNGFWAHPIVPEDYWITAFTWQGKQYCWTVLPQGFLNSPGLFTGDVVDLLQGIPNVEVYVDDVYISHDSEKEHLEYLDILFNRLKEAGYIISLKKSNIANSIVDFLGFQITNEGRGLTDTFKEKLENITAPTTLKQLQSILGLLNFARNFIPDFTELIAPLYALIPKSTKNYVPWQIEHSTTLETLITKLNGAEYLQGRKGDKTLIMKVNASYTTGYIRYYNEGEKKPISYVSIVFSKTELKFTELEKLLTTVHKGLLKALDLSMGQNIHVYSPIVSMQNIQKTPQTAKKALASRWLSWLSYLEDPRIRFFYDPQMPALKDLPAVDTGKDNKKHPSNFQHIFYTDGSAITSPTKEGHLNAGMGIVYFINKDGNLQKQQEWSISLGNHTAQFAEIAAFEFALKKCLPLGGNILVVTDSNYVAKAYNEELDVWASNGFVNNRKKPLKHISKWKSVADLKRLRPDVVVTHEPGHQKLDSSPHAYGNNLADQLATQASFKVHAGKRTADGSEFEKRTADGSEFESPKKKAKVE

SEQ ID NO: 6169 - protein, 2101 aa, synthetic construct
MPAAKRVKLDGGDKKYSIGLDIGTNSVGWAVITDEYKVPSKKFKVLGNTDRHSIKKNLIGALLFDSGETAEATRLKRTARRRYTRRKNRICYLQEIFSNEMAKVDDSFFHRLEESFLVEEDKKHERHPIFGNIVDEVAYHEKYPTIYHLRKKLVDSTDKADLRLIYLALAHMIKFRGHFLIEGDLNPDNSDVDKLFIQLVQTYNQLFEENPINASGVDAKAILSARLSKSRRLENLIAQLPGEKKNGLFGNLIALSLGLTPNFKSNFDLAEDAKLQLSKDTYDDDLDNLLAQIGDQYADLFLAAKNLSDAILLSDILRVNTEITKAPLSASMIKRYDEHHQDLTLLKALVRQQLPEKYKEIFFDQSKNGYAGYIDGGASQEEFYKFIKPILEKMDGTEELLVKLNREDLLRKQRTFDNGSIPHQIHLGELHAILRRQEDFYPFLKDNREKIEKILTFRIPYYVGPLARGNSRFAWMTRKSEETITPWNFEEVVDKGASAQSFIERMTNFDKNLPNEKVLPKHSLLYEYFTVYNELTKVKYVTEGMRKPAFLSGEQKKAIVDLLFKTNRKVTVKQLKEDYFKKIECFDSVEISGVEDRFNASLGTYHDLLKIIKDKDFLDNEENEDILEDIVLTLTLFEDREMIEERLKTYAHLFDDKVMKQLKRRRYTGWGRLSRKLINGIRDKQSGKTILDFLKSDGFANRNFMQLIHDDSLTFKEDIQKAQVSGQGDSLHEHIANLAGSPAIKKGILQTVKVVDELVKVMGRHKPENIVIEMARENQTTQKGQKNSRERMKRIEEGIKELGSQILKEHPVENTQLQNEKLYLYYLQNGRDMYVDQELDINRLSDYDVDHIVPQSFLKDDSIDNKVLTRSDKARGKSDNVPSEEVVKKMKNYWRQLLNAKLITQRKFDNLTKAERGGLSELDKAGFIKRQLVETRQITKHVAQILDSRMNTKYDENDKLIREVKVITLKSKLVSDFRKDFQFYKVREINNYHHAHDAYLNAVVGTALIKKYPKLESEFVYGDYKVYDVRKMIAKSEQEIGKATAKYFFYSNIMNFFKTEITLANGEIRKRPLIETNGETGEIVWDKGRDFATVRKVLSMPQVNIVKKTEVQTGGFSKESILPKRNSDKLIARKKDWDPKKYGGFDSPTVAYSVLVVAKVEKGKSKKLKSVKELLGITIMERSSFEKNPIDFLEAKGYKEVKKDLIIKLPKYSLFELENGRKRMLASAGELQKGNELALPSKYVNFLYLASHYEKLKGSPEDNEQKQLFVEQHKHYLDEIIEQISEFSKRVILADANLDKVLSAYNKHRDKPIREQAENIIHLFTLTNLGAPAAFKYFDTTIDRKRYTSTKEVLDATLIHQSITGLYETRIDLSQLGGDGGGGGGSGGGGSGGGGSGGGGSGGGGSGGVPWILKKPLELTIKLDLEEQQGTLLNNSILSKKGKEELKQLFEKYSALWQSWENQVGHRRIRPHKIATGTVKPTPQKQYHINPKAKPDIQIVINDLLKQGVLIQKESTMNTPVYPVPKPNGRWRMVLDYRAVNKVTPLIAVQNQHSYGILGSLFKGRYKTTIDLSNGFWAHPIVPEDYWITAFTWQGKQYCWTVLPQGFLNSPGLFTGDVVDLLQGIPNVEVYVDDVYISHDSEKEHLEYLDILFNRLKEAGYIISLKKSNIANSIVDFLGFQITNEGRGLTDTFKEKLENITAPTTLKQLQSILGLLNFARNFIPDFTELIAPLYALIPKSTKNYVPWQIEHSTTLETLITKLNGAEYLQGRKGDKTLIMKVNASYTTGYIRYYNEGEKKPISYVSIVFSKTELKFTELEKLLTTVHKGLLKALDLSMGQNIHVYSPIVSMQNIQKTPQTAKKALASRWLSWLSYLEDPRIRFFYDPQMPALKDLPAVDTGKDNKKHPSNFQHIFYTDGSAITSPTKEGHLNAGMGIVYFINKDGNLQKQQEWSISLGNHTAQFAEIAAFEFALKKCLPLGGNILVVTDSNYVAKAYNEELDVWASNGFVNNRKKPLKHISKWKSVADLKRLRPDVVVTHEPGHQKLDSSPHAYGNNLADQLATQASFKVHAGKRTADGSEFEKRTADGSEFESPKKKAKVE

SEQ ID NO: 6170 - protein, 2101 aa, synthetic construct
MPAAKRVKLDGGDKKYSIGLDIGTNSVGWAVITDEYKVPSKKFKVLGNTDRHSIKKNLIGALLFDSGETAEATRLKRTARRRYTRRKNRICYLQEIFSNEMAKVDDSFFHRLEESFLVEEDKKHERHPIFGNIVDEVAYHEKYPTIYHLRKKLVDSTDKADLRLIYLALAHMIKFRGHFLIEGDLNPDNSDVDKLFIQLVQTYNQLFEENPINASGVDAKAILSARLSKSRRLENLIAQLPGEKKNGLFGNLIALSLGLTPNFKSNFDLAEDAKLQLSKDTYDDDLDNLLAQIGDQYADLFLAAKNLSDAILLSDILRVNTEITKAPLSASMIKRYDEHHQDLTLLKALVRQQLPEKYKEIFFDQSKNGYAGYIDGGASQEEFYKFIKPILEKMDGTEELLVKLNREDLLRKQRTFDNGSIPHQIHLGELHAILRRQEDFYPFLKDNREKIEKILTFRIPYYVGPLARGNSRFAWMTRKSEETITPWNFEEVVDKGASAQSFIERMTNFDKNLPNEKVLPKHSLLYEYFTVYNELTKVKYVTEGMRKPAFLSGEQKKAIVDLLFKTNRKVTVKQLKEDYFKKIECFDSVEISGVEDRFNASLGTYHDLLKIIKDKDFLDNEENEDILEDIVLTLTLFEDREMIEERLKTYAHLFDDKVMKQLKRRRYTGWGRLSRKLINGIRDKQSGKTILDFLKSDGFANRNFMQLIHDDSLTFKEDIQKAQVSGQGDSLHEHIANLAGSPAIKKGILQTVKVVDELVKVMGRHKPENIVIEMARENQTTQKGQKNSRERMKRIEEGIKELGSQILKEHPVENTQLQNEKLYLYYLQNGRDMYVDQELDINRLSDYDVDHIVPQSFLKDDSIDNKVLTRSDKARGKSDNVPSEEVVKKMKNYWRQLLNAKLITQRKFDNLTKAERGGLSELDKAGFIKRQLVETRQITKHVAQILDSRMNTKYDENDKLIREVKVITLKSKLVSDFRKDFQFYKVREINNYHHAHDAYLNAVVGTALIKKYPKLESEFVYGDYKVYDVRKMIAKSEQEIGKATAKYFFYSNIMNFFKTEITLANGEIRKRPLIETNGETGEIVWDKGRDFATVRKVLSMPQVNIVKKTEVQTGGFSKESILPKRNSDKLIARKKDWDPKKYGGFDSPTVAYSVLVVAKVEKGKSKKLKSVKELLGITIMERSSFEKNPIDFLEAKGYKEVKKDLIIKLPKYSLFELENGRKRMLASAGELQKGNELALPSKYVNFLYLASHYEKLKGSPEDNEQKQLFVEQHKHYLDEIIEQISEFSKRVILADANLDKVLSAYNKHRDKPIREQAENIIHLFTLTNLGAPAAFKYFDTTIDRKRYTSTKEVLDATLIHQSITGLYETRIDLSQLGGDGGGGGGSGGGGSGGGGSGGGGSGGGGSGGVPWILKKPLELTIKLDLEEQQGTLLNNSILSKKGKEELKQLFEKYSALWQSWENQVGHRRIRPHKIATGTVKPTPQKQYHINPKAKPDIQIVINDLLKQGVLIQKESTMNTPVYPVPKPNGRWRMVLDYRAVNKVTPLIAVQNQHSYGILGSLFKGRYKTTIDLSNGFWAHPIVPEDYWITAFTWQGKQYCWTVLPQGFLNSPGLFNGDVVDLLQGIPNVEVYVDDVYISHDSEKEHLEYLDILFNRLKEAGYIISLKKSNIANSIVDFLGFQITNEGRGLTDTFKEKLENITAPTTLKQLQSILGLLNFARNFIPDFTELIAPLYALIPKSPKNYVPWQIEHSTTLETLITKLNGAEYLQGRKGDKTLIMKVNASYTTGYIRYYNEGEKKPISYVSIVFSKTELKFTELEKLLTTVHKGLLKALDLSMGQNIHVYSPIVSMQNIQKTPQTAKKALASRWLSWLSYLEDPRIRFFYDPQMPALKDLPAVDTGKDNKKHPSNFQHIFYTDGSAITSPTKEGHLNAGMGIVYFINKDGNLQKQQEWSISLGNHTAQFAEIAAFEFALKKCLPLGGNILVVTDSNYVAKAYNEELDVWASNGFVNNRKKPLKHISKWKSVADLKRLRPDVVVTHEPGHQKLDSSPHAYGNNLADQLATQASFKVHAGKRTADGSEFEKRTADGSEFESPKKKAKVE

SEQ ID NO: 6171 - protein, 2109 aa, synthetic construct
MPAAKRVKLDGGDKKYSIGLDIGTNSVGWAVITDEYKVPSKKFKVLGNTDRHSIKKNLIGALLFDSGETAEATRLKRTARRRYTRRKNRICYLQEIFSNEMAKVDDSFFHRLEESFLVEEDKKHERHPIFGNIVDEVAYHEKYPTIYHLRKKLVDSTDKADLRLIYLALAHMIKFRGHFLIEGDLNPDNSDVDKLFIQLVQTYNQLFEENPINASGVDAKAILSARLSKSRRLENLIAQLPGEKKNGLFGNLIALSLGLTPNFKSNFDLAEDAKLQLSKDTYDDDLDNLLAQIGDQYADLFLAAKNLSDAILLSDILRVNTEITKAPLSASMIKRYDEHHQDLTLLKALVRQQLPEKYKEIFFDQSKNGYAGYIDGGASQEEFYKFIKPILEKMDGTEELLVKLNREDLLRKQRTFDNGSIPHQIHLGELHAILRRQEDFYPFLKDNREKIEKILTFRIPYYVGPLARGNSRFAWMTRKSEETITPWNFEEVVDKGASAQSFIERMTNFDKNLPNEKVLPKHSLLYEYFTVYNELTKVKYVTEGMRKPAFLSGEQKKAIVDLLFKTNRKVTVKQLKEDYFKKIECFDSVEISGVEDRFNASLGTYHDLLKIIKDKDFLDNEENEDILEDIVLTLTLFEDREMIEERLKTYAHLFDDKVMKQLKRRRYTGWGRLSRKLINGIRDKQSGKTILDFLKSDGFANRNFMQLIHDDSLTFKEDIQKAQVSGQGDSLHEHIANLAGSPAIKKGILQTVKVVDELVKVMGRHKPENIVIEMARENQTTQKGQKNSRERMKRIEEGIKELGSQILKEHPVENTQLQNEKLYLYYLQNGRDMYVDQELDINRLSDYDVDHIVPQSFLKDDSIDNKVLTRSDKARGKSDNVPSEEVVKKMKNYWRQLLNAKLITQRKFDNLTKAERGGLSELDKAGFIKRQLVETRQITKHVAQILDSRMNTKYDENDKLIREVKVITLKSKLVSDFRKDFQFYKVREINNYHHAHDAYLNAVVGTALIKKYPKLESEFVYGDYKVYDVRKMIAKSEQEIGKATAKYFFYSNIMNFFKTEITLANGEIRKRPLIETNGETGEIVWDKGRDFATVRKVLSMPQVNIVKKTEVQTGGFSKESILPKRNSDKLIARKKDWDPKKYGGFDSPTVAYSVLVVAKVEKGKSKKLKSVKELLGITIMERSSFEKNPIDFLEAKGYKEVKKDLIIKLPKYSLFELENGRKRMLASAGELQKGNELALPSKYVNFLYLASHYEKLKGSPEDNEQKQLFVEQHKHYLDEIIEQISEFSKRVILADANLDKVLSAYNKHRDKPIREQAENIIHLFTLTNLGAPAAFKYFDTTIDRKRYTSTKEVLDATLIHQSITGLYETRIDLSQLGGDGGGGGGSGGGGSGGGGSGGGGSGGGGSGGTLQLEEEYRLFEPESTQKQEMDIWLKNFPQAWAETGGMGTAHCQAPVLIQLKATATPISIRQYPMPHEAYQGIKPHIRRMLDQGILKPCQSPWNTPLLPVKKPGTEDYRPVQDLREVNKRVEDIHPTVPNPYNLLSTLPPSHPWYTVLDLKDAFFCLRLHSESQLLFAFEWRDPEIGLSGQLTWTRLPQGFKNSPTLFNEALHSDLADFRVRYPALVLLQYVDDLLLAAATRTECLEGTKALLETLGNKGYRASAKKAQICLQEVTYLGYSLKDGQRWLTKARKEAILSIPVPKNSRQVREFLGTAGYCRLWIPGFAELAAPLYPLTRPGTLFQWGTEQQLAFEDIKKALLSSPALGLPDITKPFELFIDENSGFAKGVLVQKLGPWKRPVAYLSKKLDTVASGWPPCLRMVAAIAILVKDAGKLTLGQPLTILTSHPVEALVRQPPNKWLSNARMTHYQAMLLDAERVHFGPTVSLNPATLLPLPSGGNHHDCLQILAETHGTRPDLTDQPLPDADLTWYTDGSSFIRNGEREAGAAVTTESEVIWAAPLPPGTSAQRAELIALTQALKMAEGKKLTVYTDSRYAFATTHVHGEIYRRRGWLTSEGKEIKNKNEILALLEALFLPKRLSIIHCPGHQKGDSPQAKGNRLADDTAKKAATETHSSLTVLPAGKRTADGSEFEKRTADGSEFESPKKKAKVE

SEQ ID NO: 6172 - protein, 2108 aa, synthetic construct
MPAAKRVKLDGGDKKYSIGLDIGTNSVGWAVITDEYKVPSKKFKVLGNTDRHSIKKNLIGALLFDSGETAEATRLKRTARRRYTRRKNRICYLQEIFSNEMAKVDDSFFHRLEESFLVEEDKKHERHPIFGNIVDEVAYHEKYPTIYHLRKKLVDSTDKADLRLIYLALAHMIKFRGHFLIEGDLNPDNSDVDKLFIQLVQTYNQLFEENPINASGVDAKAILSARLSKSRRLENLIAQLPGEKKNGLFGNLIALSLGLTPNFKSNFDLAEDAKLQLSKDTYDDDLDNLLAQIGDQYADLFLAAKNLSDAILLSDILRVNTEITKAPLSASMIKRYDEHHQDLTLLKALVRQQLPEKYKEIFFDQSKNGYAGYIDGGASQEEFYKFIKPILEKMDGTEELLVKLNREDLLRKQRTFDNGSIPHQIHLGELHAILRRQEDFYPFLKDNREKIEKILTFRIPYYVGPLARGNSRFAWMTRKSEETITPWNFEEVVDKGASAQSFIERMTNFDKNLPNEKVLPKHSLLYEYFTVYNELTKVKYVTEGMRKPAFLSGEQKKAIVDLLFKTNRKVTVKQLKEDYFKKIECFDSVEISGVEDRFNASLGTYHDLLKIIKDKDFLDNEENEDILEDIVLTLTLFEDREMIEERLKTYAHLFDDKVMKQLKRRRYTGWGRLSRKLINGIRDKQSGKTILDFLKSDGFANRNFMQLIHDDSLTFKEDIQKAQVSGQGDSLHEHIANLAGSPAIKKGILQTVKVVDELVKVMGRHKPENIVIEMARENQTTQKGQKNSRERMKRIEEGIKELGSQILKEHPVENTQLQNEKLYLYYLQNGRDMYVDQELDINRLSDYDVDHIVPQSFLKDDSIDNKVLTRSDKARGKSDNVPSEEVVKKMKNYWRQLLNAKLITQRKFDNLTKAERGGLSELDKAGFIKRQLVETRQITKHVAQILDSRMNTKYDENDKLIREVKVITLKSKLVSDFRKDFQFYKVREINNYHHAHDAYLNAVVGTALIKKYPKLESEFVYGDYKVYDVRKMIAKSEQEIGKATAKYFFYSNIMNFFKTEITLANGEIRKRPLIETNGETGEIVWDKGRDFATVRKVLSMPQVNIVKKTEVQTGGFSKESILPKRNSDKLIARKKDWDPKKYGGFDSPTVAYSVLVVAKVEKGKSKKLKSVKELLGITIMERSSFEKNPIDFLEAKGYKEVKKDLIIKLPKYSLFELENGRKRMLASAGELQKGNELALPSKYVNFLYLASHYEKLKGSPEDNEQKQLFVEQHKHYLDEIIEQISEFSKRVILADANLDKVLSAYNKHRDKPIREQAENIIHLFTLTNLGAPAAFKYFDTTIDRKRYTSTKEVLDATLIHQSITGLYETRIDLSQLGGDGGGGGGSGGGGSGGGGSGGGGSGGGGSGGVLNLEEEYRLHEKPVPSSIDPSWLQLFPTVWAERAGMGLANQVPPVVVELRSGASPVAVRQYPMSKEAREGIRPHIQKFLDLGVLVPCRSPWNTPLLPVKKPGTNDYRPVQDLREINKRVQDIHPTVPNPYNLLSSLPPSYTWYSVLDLKDAFFCLRLHPNSQPLFAFEWKDPEKGNTGQLTWTRLPQGFKNSPTLFNEALHRDLAPFRALNPQVVLLQYVDDLLVAAPTYEDCKKGTQKLLQELSKLGYRVSAKKAQLCQREVTYLGYLLKEGKRWLTPARKATVMKIPVPTTPRQVREFLGKAGFCRLFIPGFASLAAPLYPLTKPSIPFIWTEEHQQAFDHIKKALLSAPALALPDLTKPFTLYIDERAGVARGVLTQTLGPWRRPVAYLSKKLDPVASGWPTCLKAVAAVALLLKDADKLTLGQNVTVIASHSLESIVRQPPDRWMTNARMTHYQSLLLNERVSFAPPAVLNPATLLPVESEATPVHRCSEILAEETGTRRDLEDQPLPGVPTWYTDGSSFITEGKRRAGAPIVDGKRTVWASSLPEGTSAQKAELVALTQALRLAEGKNINIYTDSRYAFATAHIHGAIYKQRGWLTSAGKDIKNKEEILALLEAIHLPRRVAIIHCPGHQRGSNPVATGNRRADEAAKQAALSTRVLAGTTKPAGKRTADGSEFEKRTADGSEFESPKKKAKVE

SEQ ID NO: 6173 - protein, 2232 aa, synthetic construct
MPAAKRVKLDGGDKKYSIGLDIGTNSVGWAVITDEYKVPSKKFKVLGNTDRHSIKKNLIGALLFDSGETAEATRLKRTARRRYTRRKNRICYLQEIFSNEMAKVDDSFFHRLEESFLVEEDKKHERHPIFGNIVDEVAYHEKYPTIYHLRKKLVDSTDKADLRLIYLALAHMIKFRGHFLIEGDLNPDNSDVDKLFIQLVQTYNQLFEENPINASGVDAKAILSARLSKSRRLENLIAQLPGEKKNGLFGNLIALSLGLTPNFKSNFDLAEDAKLQLSKDTYDDDLDNLLAQIGDQYADLFLAAKNLSDAILLSDILRVNTEITKAPLSASMIKRYDEHHQDLTLLKALVRQQLPEKYKEIFFDQSKNGYAGYIDGGASQEEFYKFIKPILEKMDGTEELLVKLNREDLLRKQRTFDNGSIPHQIHLGELHAILRRQEDFYPFLKDNREKIEKILTFRIPYYVGPLARGNSRFAWMTRKSEETITPWNFEEVVDKGASAQSFIERMTNFDKNLPNEKVLPKHSLLYEYFTVYNELTKVKYVTEGMRKPAFLSGEQKKAIVDLLFKTNRKVTVKQLKEDYFKKIECFDSVEISGVEDRFNASLGTYHDLLKIIKDKDFLDNEENEDILEDIVLTLTLFEDREMIEERLKTYAHLFDDKVMKQLKRRRYTGWGRLSRKLINGIRDKQSGKTILDFLKSDGFANRNFMQLIHDDSLTFKEDIQKAQVSGQGDSLHEHIANLAGSPAIKKGILQTVKVVDELVKVMGRHKPENIVIEMARENQTTQKGQKNSRERMKRIEEGIKELGSQILKEHPVENTQLQNEKLYLYYLQNGRDMYVDQELDINRLSDYDVDHIVPQSFLKDDSIDNKVLTRSDKARGKSDNVPSEEVVKKMKNYWRQLLNAKLITQRKFDNLTKAERGGLSELDKAGFIKRQLVETRQITKHVAQILDSRMNTKYDENDKLIREVKVITLKSKLVSDFRKDFQFYKVREINNYHHAHDAYLNAVVGTALIKKYPKLESEFVYGDYKVYDVRKMIAKSEQEIGKATAKYFFYSNIMNFFKTEITLANGEIRKRPLIETNGETGEIVWDKGRDFATVRKVLSMPQVNIVKKTEVQTGGFSKESILPKRNSDKLIARKKDWDPKKYGGFDSPTVAYSVLVVAKVEKGKSKKLKSVKELLGITIMERSSFEKNPIDFLEAKGYKEVKKDLIIKLPKYSLFELENGRKRMLASAGELQKGNELALPSKYVNFLYLASHYEKLKGSPEDNEQKQLFVEQHKHYLDEIIEQISEFSKRVILADANLDKVLSAYNKHRDKPIREQAENIIHLFTLTNLGAPAAFKYFDTTIDRKRYTSTKEVLDATLIHQSITGLYETRIDLSQLGGDGGGGGGSGGGGSGGGGSGGGGSGGGGSGGTLGDQGSRGSDPLPEPRVTLTVEGIPTEFLVNTGAEHSVLTKPMGKMGSKRTVVAGATGSKVYPWTTKRLLKIGQKQVTHSFLVIPECPAPLLGRDLLTKLKAQIQFSTEGPQVTWEDRPAMCLVLNLEEEYRLHEKPVPPSIDPSWLQLFPMVWAEKAGMGLANQVPPVVVELKSDASPVAVRQYPMSKEAREGIRPHIQRFLDLGILVPCQSPWNTPLLPVKKPGTNDYRPVQDLREVNKRVQDIHPTVPNPYNLLSSLPPSHTWYSVLDLKDAFFCLKLHPNSQPLFAFEWRDPEKGNTGQLTWTRLPQGFKNSPTLFDEALHRDLASFRALNPQVVMLQYVDDLLVAAPTYRDCKEGTRRLLQELSKLGYRVSAKKAQLCREEVTYLGYLLKGGKRWLTPARKATVMKIPTPTTPRQVREFLGTAGFCRLWIPGFASLAAPLYPLTREKVPFTWTEAHQEAFGRIKEALLSAPALALPDLTKPFALYVDEKEGVARGVLTQTLGPWRRPVAYLSKKLDPVASGWPTCLKAIAAVALLLKDADKLTLGQNVLVIAPHNLESIVRQPPDRWMTNARMTHYQSLLLNERVSFAPPAILNPATLLPVESDDTPIHICSEILAEETGTRPDLRDQPLPGVPAWYTDGSSFIMDGRRQAGAAIVDNKRTVWASNLPEGTSAQKAELIALTQALRLAEGKSINIYTDSRYAFATAHVHGAIYKQRGLLTSAGKDIKNKEEILALLEAIHLPKRVAIIHCPGHQRGTDPVATGNRKADEAAKQAAQSTRILTETTKNAGKRTADGSEFEKRTADGSEFESPKKKAKVE

SEQ ID NO: 6174 - protein, 2141 aa, synthetic construct
MPAAKRVKLDGGDKKYSIGLDIGTNSVGWAVITDEYKVPSKKFKVLGNTDRHSIKKNLIGALLFDSGETAEATRLKRTARRRYTRRKNRICYLQEIFSNEMAKVDDSFFHRLEESFLVEEDKKHERHPIFGNIVDEVAYHEKYPTIYHLRKKLVDSTDKADLRLIYLALAHMIKFRGHFLIEGDLNPDNSDVDKLFIQLVQTYNQLFEENPINASGVDAKAILSARLSKSRRLENLIAQLPGEKKNGLFGNLIALSLGLTPNFKSNFDLAEDAKLQLSKDTYDDDLDNLLAQIGDQYADLFLAAKNLSDAILLSDILRVNTEITKAPLSASMIKRYDEHHQDLTLLKALVRQQLPEKYKEIFFDQSKNGYAGYIDGGASQEEFYKFIKPILEKMDGTEELLVKLNREDLLRKQRTFDNGSIPHQIHLGELHAILRRQEDFYPFLKDNREKIEKILTFRIPYYVGPLARGNSRFAWMTRKSEETITPWNFEEVVDKGASAQSFIERMTNFDKNLPNEKVLPKHSLLYEYFTVYNELTKVKYVTEGMRKPAFLSGEQKKAIVDLLFKTNRKVTVKQLKEDYFKKIECFDSVEISGVEDRFNASLGTYHDLLKIIKDKDFLDNEENEDILEDIVLTLTLFEDREMIEERLKTYAHLFDDKVMKQLKRRRYTGWGRLSRKLINGIRDKQSGKTILDFLKSDGFANRNFMQLIHDDSLTFKEDIQKAQVSGQGDSLHEHIANLAGSPAIKKGILQTVKVVDELVKVMGRHKPENIVIEMARENQTTQKGQKNSRERMKRIEEGIKELGSQILKEHPVENTQLQNEKLYLYYLQNGRDMYVDQELDINRLSDYDVDHIVPQSFLKDDSIDNKVLTRSDKARGKSDNVPSEEVVKKMKNYWRQLLNAKLITQRKFDNLTKAERGGLSELDKAGFIKRQLVETRQITKHVAQILDSRMNTKYDENDKLIREVKVITLKSKLVSDFRKDFQFYKVREINNYHHAHDAYLNAVVGTALIKKYPKLESEFVYGDYKVYDVRKMIAKSEQEIGKATAKYFFYSNIMNFFKTEITLANGEIRKRPLIETNGETGEIVWDKGRDFATVRKVLSMPQVNIVKKTEVQTGGFSKESILPKRNSDKLIARKKDWDPKKYGGFDSPTVAYSVLVVAKVEKGKSKKLKSVKELLGITIMERSSFEKNPIDFLEAKGYKEVKKDLIIKLPKYSLFELENGRKRMLASAGELQKGNELALPSKYVNFLYLASHYEKLKGSPEDNEQKQLFVEQHKHYLDEIIEQISEFSKRVILADANLDKVLSAYNKHRDKPIREQAENIIHLFTLTNLGAPAAFKYFDTTIDRKRYTSTKEVLDATLIHQSITGLYETRIDLSQLGGDGGGGGGSGGGGSGGGGSGGGGSGGGGSGGLLGRDLLTKLKAQIQFSTEGPQVTWEDRPAMCLVLNLEEEYRLHEKPVPPSIDPSWLQLFPMVWAEKAGMGLANQVPPVVVELKSDASPVAVRQYPMSKEAREGIRPHIQRFLDLGILVPCQSPWNTPLLPVKKPGTNDYRPVQDLREVNKRVQDIHPTVPNPYNLLSSLPPSHTWYSVLDLKDAFFCLKLHPNSQPLFAFEWRDPEKGNTGQLTWTRLPQGFKNSPTLFDEALHRDLASFRALNPQVVMLQYVDDLLVAAPTYRDCKEGTRRLLQELSKLGYRVSAKKAQLCREEVTYLGYLLKGGKRWLTPARKATVMKIPTPTTPRQVREFLGTAGFCRLWIPGFASLAAPLYPLTREKVPFTWTEAHQEAFGRIKEALLSAPALALPDLTKPFALYVDEKEGVARGVLTQTLGPWRRPVAYLSKKLDPVASGWPTCLKAIAAVALLLKDADKLTLGQNVLVIAPHNLESIVRQPPDRWMTNARMTHYQSLLLNERVSFAPPAILNPATLLPVESDDTPIHICSEILAEETGTRPDLRDQPLPGVPAWYTDGSSFIMDGRRQAGAAIVDNKRTVWASNLPEGTSAQKAELIALTQALRLAEGKSINIYTDSRYAFATAHVHGAIYKQRGLLTSAGKDIKNKEEILALLEAIHLPKRVAIIHCPGHQRGTDPVATGNRKADEAAKQAAQSTRILTETTKNAGKRTADGSEFEKRTADGSEFESPKKKAKVE

SEQ ID NO: 6175 - protein, 2141 aa, synthetic construct
MPAAKRVKLDGGDKKYSIGLDIGTNSVGWAVITDEYKVPSKKFKVLGNTDRHSIKKNLIGALLFDSGETAEATRLKRTARRRYTRRKNRICYLQEIFSNEMAKVDDSFFHRLEESFLVEEDKKHERHPIFGNIVDEVAYHEKYPTIYHLRKKLVDSTDKADLRLIYLALAHMIKFRGHFLIEGDLNPDNSDVDKLFIQLVQTYNQLFEENPINASGVDAKAILSARLSKSRRLENLIAQLPGEKKNGLFGNLIALSLGLTPNFKSNFDLAEDAKLQLSKDTYDDDLDNLLAQIGDQYADLFLAAKNLSDAILLSDILRVNTEITKAPLSASMIKRYDEHHQDLTLLKALVRQQLPEKYKEIFFDQSKNGYAGYIDGGASQEEFYKFIKPILEKMDGTEELLVKLNREDLLRKQRTFDNGSIPHQIHLGELHAILRRQEDFYPFLKDNREKIEKILTFRIPYYVGPLARGNSRFAWMTRKSEETITPWNFEEVVDKGASAQSFIERMTNFDKNLPNEKVLPKHSLLYEYFTVYNELTKVKYVTEGMRKPAFLSGEQKKAIVDLLFKTNRKVTVKQLKEDYFKKIECFDSVEISGVEDRFNASLGTYHDLLKIIKDKDFLDNEENEDILEDIVLTLTLFEDREMIEERLKTYAHLFDDKVMKQLKRRRYTGWGRLSRKLINGIRDKQSGKTILDFLKSDGFANRNFMQLIHDDSLTFKEDIQKAQVSGQGDSLHEHIANLAGSPAIKKGILQTVKVVDELVKVMGRHKPENIVIEMARENQTTQKGQKNSRERMKRIEEGIKELGSQILKEHPVENTQLQNEKLYLYYLQNGRDMYVDQELDINRLSDYDVDHIVPQSFLKDDSIDNKVLTRSDKARGKSDNVPSEEVVKKMKNYWRQLLNAKLITQRKFDNLTKAERGGLSELDKAGFIKRQLVETRQITKHVAQILDSRMNTKYDENDKLIREVKVITLKSKLVSDFRKDFQFYKVREINNYHHAHDAYLNAVVGTALIKKYPKLESEFVYGDYKVYDVRKMIAKSEQEIGKATAKYFFYSNIMNFFKTEITLANGEIRKRPLIETNGETGEIVWDKGRDFATVRKVLSMPQVNIVKKTEVQTGGFSKESILPKRNSDKLIARKKDWDPKKYGGFDSPTVAYSVLVVAKVEKGKSKKLKSVKELLGITIMERSSFEKNPIDFLEAKGYKEVKKDLIIKLPKYSLFELENGRKRMLASAGELQKGNELALPSKYVNFLYLASHYEKLKGSPEDNEQKQLFVEQHKHYLDEIIEQISEFSKRVILADANLDKVLSAYNKHRDKPIREQAENIIHLFTLTNLGAPAAFKYFDTTIDRKRYTSTKEVLDATLIHQSITGLYETRIDLSQLGGDGGGGGGSGGGGSGGGGSGGGGSGGGGSGGLLGRDLLTKLKAQIQFSTEGPQVTWEDRPAMCLVLNLEEEYRLHEKPVPPSIDPSWLQLFPMVWAEKAGMGLANQVPPVVVELKSDASPVAVRQYPMSKEAREGIRPHIQRFLDLGILVPCQSPWNTPLLPVKKPGTNDYRPVQDLREVNKRVQDIHPTVPNPYNLLSSLPPSHTWYSVLDLKDAFFCLKLHPNSQPLFAFEWRDPEKGNTGQLTWTRLPQGFKNSPTLFNEALHRDLASFRALNPQVVMLQYVDDLLVAAPTYRDCKEGTRRLLQELSKLGYRVSAKKAQLCREEVTYLGYLLKGGKRWLTPARKATVMKIPTPTTPRQVREFLGTAGFCRLWIPGFASLAAPLYPLTRPKVPFTWTEAHQEAFGRIKEALLSAPALALPDLTKPFALYVDEKEGVARGVLTQTLGPWRRPVAYLSKKLDPVASGWPTCLKAIAAVALLLKDADKLTLGQNVLVIAPHNLESIVRQPPDRWMTNARMTHYQSLLLNERVSFAPPAILNPATLLPVESDDTPIHICSEILAEETGTRPDLRDQPLPGVPAWYTDGSSFIMDGRRQAGAAIVDNKRTVWASNLPEGTSAQKAELIALTQALRLAEGKSINIYTDSRYAFATAHVHGAIYKQRGWLTSAGKDIKNKEEILALLEAIHLPKRVAIIHCPGHQRGTDPVATGNRKADEAAKQAAQSTRILTETTKNAGKRTADGSEFEKRTADGSEFESPKKKAKVE

SEQ ID NO: 6176 - protein, 2141 aa, synthetic construct
MPAAKRVKLDGGDKKYSIGLDIGTNSVGWAVITDEYKVPSKKFKVLGNTDRHSIKKNLIGALLFDSGETAEATRLKRTARRRYTRRKNRICYLQEIFSNEMAKVDDSFFHRLEESFLVEEDKKHERHPIFGNIVDEVAYHEKYPTIYHLRKKLVDSTDKADLRLIYLALAHMIKFRGHFLIEGDLNPDNSDVDKLFIQLVQTYNQLFEENPINASGVDAKAILSARLSKSRRLENLIAQLPGEKKNGLFGNLIALSLGLTPNFKSNFDLAEDAKLQLSKDTYDDDLDNLLAQIGDQYADLFLAAKNLSDAILLSDILRVNTEITKAPLSASMIKRYDEHHQDLTLLKALVRQQLPEKYKEIFFDQSKNGYAGYIDGGASQEEFYKFIKPILEKMDGTEELLVKLNREDLLRKQRTFDNGSIPHQIHLGELHAILRRQEDFYPFLKDNREKIEKILTFRIPYYVGPLARGNSRFAWMTRKSEETITPWNFEEVVDKGASAQSFIERMTNFDKNLPNEKVLPKHSLLYEYFTVYNELTKVKYVTEGMRKPAFLSGEQKKAIVDLLFKTNRKVTVKQLKEDYFKKIECFDSVEISGVEDRFNASLGTYHDLLKIIKDKDFLDNEENEDILEDIVLTLTLFEDREMIEERLKTYAHLFDDKVMKQLKRRRYTGWGRLSRKLINGIRDKQSGKTILDFLKSDGFANRNFMQLIHDDSLTFKEDIQKAQVSGQGDSLHEHIANLAGSPAIKKGILQTVKVVDELVKVMGRHKPENIVIEMARENQTTQKGQKNSRERMKRIEEGIKELGSQILKEHPVENTQLQNEKLYLYYLQNGRDMYVDQELDINRLSDYDVDHIVPQSFLKDDSIDNKVLTRSDKARGKSDNVPSEEVVKKMKNYWRQLLNAKLITQRKFDNLTKAERGGLSELDKAGFIKRQLVETRQITKHVAQILDSRMNTKYDENDKLIREVKVITLKSKLVSDFRKDFQFYKVREINNYHHAHDAYLNAVVGTALIKKYPKLESEFVYGDYKVYDVRKMIAKSEQEIGKATAKYFFYSNIMNFFKTEITLANGEIRKRPLIETNGETGEIVWDKGRDFATVRKVLSMPQVNIVKKTEVQTGGFSKESILPKRNSDKLIARKKDWDPKKYGGFDSPTVAYSVLVVAKVEKGKSKKLKSVKELLGITIMERSSFEKNPIDFLEAKGYKEVKKDLIIKLPKYSLFELENGRKRMLASAGELQKGNELALPSKYVNFLYLASHYEKLKGSPEDNEQKQLFVEQHKHYLDEIIEQISEFSKRVILADANLDKVLSAYNKHRDKPIREQAENIIHLFTLTNLGAPAAFKYFDTTIDRKRYTSTKEVLDATLIHQSITGLYETRIDLSQLGGDGGGGGGSGGGGSGGGGSGGGGSGGGGSGGLLGRDLLTKLKAQIQFSTEGPQVTWEDRPAMCLVLNLEEEYRLHEKPVPPSIDPSWLQLFPMVWAEKAGMGLANQVPPVVVELKSDASPVAVRQYPMSKEAREGIRPHIQRFLDLGILVPCQSPWNTPLLPVKKPGTNDYRPVQDLREVNKRVQDIHPTVPNPYNLLSSLPPSHTWYSVLDLKDAFFCLKLHPNSQPLFAFEWRDPEKGNTGQLTWTRLPQGFKNSPTLFNEALHRDLASFRALNPQVVMLQYVDDLLVAAPTYRDCKEGTRRLLQELSKLGYRVSAKKAQLCREEVTYLGYLLKGGKRWLTPARKATVMKIPTPTTPRQVREFLGKAGFCRLFIPGFASLAAPLYPLTRPKVPFTWTEAHQEAFGRIKEALLSAPALALPDLTKPFALYVDEKEGVARGVLTQTLGPWRRPVAYLSKKLDPVASGWPTCLKAIAAVALLLKDADKLTLGQNVLVIAPHNLESIVRQPPDRWMTNARMTHYQSLLLNERVSFAPPAILNPATLLPVESDDTPIHICSEILAEETGTRPDLRDQPLPGVPAWYTDGSSFIMDGRRQAGAAIVDNKRTVWASNLPEGTSAQKAELIALTQALRLAEGKSINIYTDSRYAFATAHVHGAIYKQRGWLTSAGKDIKNKEEILALLEAIHLPKRVAIIHCPGHQRGTDPVATGNRKADEAAKQAAQSTRILTETTKNAGKRTADGSEFEKRTADGSEFESPKKKAKVE

SEQ ID NO: 6177 - protein, 2232 aa, synthetic construct
MPAAKRVKLDGGDKKYSIGLDIGTNSVGWAVITDEYKVPSKKFKVLGNTDRHSIKKNLIGALLFDSGETAEATRLKRTARRRYTRRKNRICYLQEIFSNEMAKVDDSFFHRLEESFLVEEDKKHERHPIFGNIVDEVAYHEKYPTIYHLRKKLVDSTDKADLRLIYLALAHMIKFRGHFLIEGDLNPDNSDVDKLFIQLVQTYNQLFEENPINASGVDAKAILSARLSKSRRLENLIAQLPGEKKNGLFGNLIALSLGLTPNFKSNFDLAEDAKLQLSKDTYDDDLDNLLAQIGDQYADLFLAAKNLSDAILLSDILRVNTEITKAPLSASMIKRYDEHHQDLTLLKALVRQQLPEKYKEIFFDQSKNGYAGYIDGGASQEEFYKFIKPILEKMDGTEELLVKLNREDLLRKQRTFDNGSIPHQIHLGELHAILRRQEDFYPFLKDNREKIEKILTFRIPYYVGPLARGNSRFAWMTRKSEETITPWNFEEVVDKGASAQSFIERMTNFDKNLPNEKVLPKHSLLYEYFTVYNELTKVKYVTEGMRKPAFLSGEQKKAIVDLLFKTNRKVTVKQLKEDYFKKIECFDSVEISGVEDRFNASLGTYHDLLKIIKDKDFLDNEENEDILEDIVLTLTLFEDREMIEERLKTYAHLFDDKVMKQLKRRRYTGWGRLSRKLINGIRDKQSGKTILDFLKSDGFANRNFMQLIHDDSLTFKEDIQKAQVSGQGDSLHEHIANLAGSPAIKKGILQTVKVVDELVKVMGRHKPENIVIEMARENQTTQKGQKNSRERMKRIEEGIKELGSQILKEHPVENTQLQNEKLYLYYLQNGRDMYVDQELDINRLSDYDVDHIVPQSFLKDDSIDNKVLTRSDKARGKSDNVPSEEVVKKMKNYWRQLLNAKLITQRKFDNLTKAERGGLSELDKAGFIKRQLVETRQITKHVAQILDSRMNTKYDENDKLIREVKVITLKSKLVSDFRKDFQFYKVREINNYHHAHDAYLNAVVGTALIKKYPKLESEFVYGDYKVYDVRKMIAKSEQEIGKATAKYFFYSNIMNFFKTEITLANGEIRKRPLIETNGETGEIVWDKGRDFATVRKVLSMPQVNIVKKTEVQTGGFSKESILPKRNSDKLIARKKDWDPKKYGGFDSPTVAYSVLVVAKVEKGKSKKLKSVKELLGITIMERSSFEKNPIDFLEAKGYKEVKKDLIIKLPKYSLFELENGRKRMLASAGELQKGNELALPSKYVNFLYLASHYEKLKGSPEDNEQKQLFVEQHKHYLDEIIEQISEFSKRVILADANLDKVLSAYNKHRDKPIREQAENIIHLFTLTNLGAPAAFKYFDTTIDRKRYTSTKEVLDATLIHQSITGLYETRIDLSQLGGDGGGGGGSGGGGSGGGGSGGGGSGGGGSGGTLGDQGSRGSDPLPEPRVTLTVEGIPTEFLVNTGAEHSVLTKPMGKMGSKRTVVAGATGSKVYPWTTKRLLKIGQKQVTHSFLVIPECPAPLLGRDLLTKLKAQIQFSTEGPQVTWEDRPAMCLVLNLEEEYRLHEKPVPPSIDPSWLQLFPMVWAEKAGMGLANQVPPVVVELKSDASPVAVRQYPMSKEAREGIRPHIQRFLDLGILVPCQSPWNTPLLPVKKPGTNDYRPVQDLREVNKRVQDIHPTVPNPYNLLSSLPPSHTWYSVLDLKDAFFCLKLHPNSQPLFAFEWRDPEKGNTGQLTWTRLPQGFKNSPTLFNEALHRDLASFRALNPQVVMLQYVDDLLVAAPTYRDCKEGTRRLLQELSKLGYRVSAKKAQLCREEVTYLGYLLKGGKRWLTPARKATVMKIPTPTTPRQVREFLGTAGFCRLWIPGFASLAAPLYPLTRPKVPFTWTEAHQEAFGRIKEALLSAPALALPDLTKPFALYVDEKEGVARGVLTQTLGPWRRPVAYLSKKLDPVASGWPTCLKAIAAVALLLKDADKLTLGQNVLVIAPHNLESIVRQPPDRWMTNARMTHYQSLLLNERVSFAPPAILNPATLLPVESDDTPIHICSEILAEETGTRPDLRDQPLPGVPAWYTDGSSFIMDGRRQAGAAIVDNKRTVWASNLPEGTSAQKAELIALTQALRLAEGKSINIYTDSRYAFATAHVHGAIYKQRGWLTSAGKDIKNKEEILALLEAIHLPKRVAIIHCPGHQRGTDPVATGNRKADEAAKQAAQSTRILTETTKNAGKRTADGSEFEKRTADGSEFESPKKKAKVE

SEQ ID NO: 6178 - protein, 2110 aa, synthetic construct
MPAAKRVKLDGGDKKYSIGLDIGTNSVGWAVITDEYKVPSKKFKVLGNTDRHSIKKNLIGALLFDSGETAEATRLKRTARRRYTRRKNRICYLQEIFSNEMAKVDDSFFHRLEESFLVEEDKKHERHPIFGNIVDEVAYHEKYPTIYHLRKKLVDSTDKADLRLIYLALAHMIKFRGHFLIEGDLNPDNSDVDKLFIQLVQTYNQLFEENPINASGVDAKAILSARLSKSRRLENLIAQLPGEKKNGLFGNLIALSLGLTPNFKSNFDLAEDAKLQLSKDTYDDDLDNLLAQIGDQYADLFLAAKNLSDAILLSDILRVNTEITKAPLSASMIKRYDEHHQDLTLLKALVRQQLPEKYKEIFFDQSKNGYAGYIDGGASQEEFYKFIKPILEKMDGTEELLVKLNREDLLRKQRTFDNGSIPHQIHLGELHAILRRQEDFYPFLKDNREKIEKILTFRIPYYVGPLARGNSRFAWMTRKSEETITPWNFEEVVDKGASAQSFIERMTNFDKNLPNEKVLPKHSLLYEYFTVYNELTKVKYVTEGMRKPAFLSGEQKKAIVDLLFKTNRKVTVKQLKEDYFKKIECFDSVEISGVEDRFNASLGTYHDLLKIIKDKDFLDNEENEDILEDIVLTLTLFEDREMIEERLKTYAHLFDDKVMKQLKRRRYTGWGRLSRKLINGIRDKQSGKTILDFLKSDGFANRNFMQLIHDDSLTFKEDIQKAQVSGQGDSLHEHIANLAGSPAIKKGILQTVKVVDELVKVMGRHKPENIVIEMARENQTTQKGQKNSRERMKRIEEGIKELGSQILKEHPVENTQLQNEKLYLYYLQNGRDMYVDQELDINRLSDYDVDHIVPQSFLKDDSIDNKVLTRSDKARGKSDNVPSEEVVKKMKNYWRQLLNAKLITQRKFDNLTKAERGGLSELDKAGFIKRQLVETRQITKHVAQILDSRMNTKYDENDKLIREVKVITLKSKLVSDFRKDFQFYKVREINNYHHAHDAYLNAVVGTALIKKYPKLESEFVYGDYKVYDVRKMIAKSEQEIGKATAKYFFYSNIMNFFKTEITLANGEIRKRPLIETNGETGEIVWDKGRDFATVRKVLSMPQVNIVKKTEVQTGGFSKESILPKRNSDKLIARKKDWDPKKYGGFDSPTVAYSVLVVAKVEKGKSKKLKSVKELLGITIMERSSFEKNPIDFLEAKGYKEVKKDLIIKLPKYSLFELENGRKRMLASAGELQKGNELALPSKYVNFLYLASHYEKLKGSPEDNEQKQLFVEQHKHYLDEIIEQISEFSKRVILADANLDKVLSAYNKHRDKPIREQAENIIHLFTLTNLGAPAAFKYFDTTIDRKRYTSTKEVLDATLIHQSITGLYETRIDLSQLGGDGGGGGGSGGGGSGGGGSGGGGSGGGGSGGTLNLEDEYRLYETSAEPEVSPGSTWLSDFPQAWAETGGMGLAVRQAPLIIPLKATSTPVSIKQYPMSQEAKLGIKPHIQRLLDQGILVPCQSPWNTPLLPVKKPGTNDYRPVQDLREVNKRVEDIHPTVPNPYNLLSGLPPSHRWYTVLDLKDAFFCLRLHPTSQPLFAFEWRDPGMGISGQLTWTRLPQGFKNSPTLFNEALHRDLADFRIQHPDLILLQYVDDILLAATSELDCQQGTRALLLTLGNLGYRASAKKAQLCQKQVKYLGYLLKEGQRWLTEARKETVMGQPTPKTPRQLREFLGKAGFCRLFIPGFAEMAAPLYPLTKPGTLFNWGPDQQKAYQEIKQALLTAPALGLPDLTKPFELFVDEKQGYAKGVLTQKLGPWRRPVAYLSKKLDPVAAGWPPCLRMVAAIAVLRKDAGKLTMGQPLVILAPHAVEALVKQPPDRWLSNARMTHYQAMLLDTDRVQFGPVVALNPATLLPLPEEGAPHDCLEILAETHGTRPDLTDQPIPDADHTWYTDGSSFLQEGQRKAGAAVTTETEVIWARALPAGTSAQRAELIALTQALKMAEGKRLNVYTDSRYAFATAHIHGEIYRRRGWLTSEGREIKNKSEILALLKALFLPKRLSIIHCLGHQKGDSAEARGNRLADQAAREAAIKTPPDTSTLLAGKRTADGSEFEKRTADGSEFESPKKKAKVE

SEQ ID NO: 6179 - protein, 2110 aa, synthetic construct
MPAAKRVKLDGGDKKYSIGLDIGTNSVGWAVITDEYKVPSKKFKVLGNTDRHSIKKNLIGALLFDSGETAEATRLKRTARRRYTRRKNRICYLQEIFSNEMAKVDDSFFHRLEESFLVEEDKKHERHPIFGNIVDEVAYHEKYPTIYHLRKKLVDSTDKADLRLIYLALAHMIKFRGHFLIEGDLNPDNSDVDKLFIQLVQTYNQLFEENPINASGVDAKAILSARLSKSRRLENLIAQLPGEKKNGLFGNLIALSLGLTPNFKSNFDLAEDAKLQLSKDTYDDDLDNLLAQIGDQYADLFLAAKNLSDAILLSDILRVNTEITKAPLSASMIKRYDEHHQDLTLLKALVRQQLPEKYKEIFFDQSKNGYAGYIDGGASQEEFYKFIKPILEKMDGTEELLVKLNREDLLRKQRTFDNGSIPHQIHLGELHAILRRQEDFYPFLKDNREKIEKILTFRIPYYVGPLARGNSRFAWMTRKSEETITPWNFEEVVDKGASAQSFIERMTNFDKNLPNEKVLPKHSLLYEYFTVYNELTKVKYVTEGMRKPAFLSGEQKKAIVDLLFKTNRKVTVKQLKEDYFKKIECFDSVEISGVEDRFNASLGTYHDLLKIIKDKDFLDNEENEDILEDIVLTLTLFEDREMIEERLKTYAHLFDDKVMKQLKRRRYTGWGRLSRKLINGIRDKQSGKTILDFLKSDGFANRNFMQLIHDDSLTFKEDIQKAQVSGQGDSLHEHIANLAGSPAIKKGILQTVKVVDELVKVMGRHKPENIVIEMARENQTTQKGQKNSRERMKRIEEGIKELGSQILKEHPVENTQLQNEKLYLYYLQNGRDMYVDQELDINRLSDYDVDHIVPQSFLKDDSIDNKVLTRSDKARGKSDNVPSEEVVKKMKNYWRQLLNAKLITQRKFDNLTKAERGGLSELDKAGFIKRQLVETRQITKHVAQILDSRMNTKYDENDKLIREVKVITLKSKLVSDFRKDFQFYKVREINNYHHAHDAYLNAVVGTALIKKYPKLESEFVYGDYKVYDVRKMIAKSEQEIGKATAKYFFYSNIMNFFKTEITLANGEIRKRPLIETNGETGEIVWDKGRDFATVRKVLSMPQVNIVKKTEVQTGGFSKESILPKRNSDKLIARKKDWDPKKYGGFDSPTVAYSVLVVAKVEKGKSKKLKSVKELLGITIMERSSFEKNPIDFLEAKGYKEVKKDLIIKLPKYSLFELENGRKRMLASAGELQKGNELALPSKYVNFLYLASHYEKLKGSPEDNEQKQLFVEQHKHYLDEIIEQISEFSKRVILADANLDKVLSAYNKHRDKPIREQAENIIHLFTLTNLGAPAAFKYFDTTIDRKRYTSTKEVLDATLIHQSITGLYETRIDLSQLGGDGGGGGGSGGGGSGGGGSGGGGSGGGGSGGTLNIEDEYRLHETSKGPDVPLGSTWLSDFPQAWAETGGMGLAFRQAPLIISLKATSTPVSIKQYPMSQEARLGIKPHIQRLLDQGILVPCQSPWNTPLLPVKKPGTNDYRPVQDLREVNKRVEDIHPTVPNPYNLLSGLPPSHQWYTVLDLKDAFFCLRLHPTSQSLFAFEWKDPEMGISGQLTWTRLPQGFKNSPTLFNEALHRDLADFRIQHPDLILLQYVDDLLLAATSELDCQQGTRALLQTLGDLGYRASAKKAQICQKQVKYLGYLLKEGQRWLTEARKETVMGQPTPKTPRQLREFLGTAGLCRLWIPGFAEMAAPLYPLTKPGTLFKWGPDQQKAYQEIKQALLTAPALGLPDLTKPFELFVDEKQGYAKGVLTQKLGPWRRPVAYLSKKLDPVAAGWPPCLRMVAAIAVLTKDVGKLTMGQPLVILAPHAVEALVKQPPDRWLSNARMTHYQALLLDTDRVQFGPIVALNPATLLPLPEEGLQHDCLDILAEAHGTRPDLTDQPLPDADHTWYTDGSSFLQEGQRRAGAAVTTETEVIWAKALPAGTSAQRAELIALTQALKMAAGKKLNVYTDSRYAFATAHIHGEIYRRRGWLTSEGKEIKNKDEILALLKALFLPKRLSIIHCPGHQKGNHAEARGNRMADQAAREVATRETPETSTLLAGKRTADGSEFEKRTADGSEFESPKKKAKVE

SEQ ID NO: 6180 - protein, 2110 aa, synthetic construct
MPAAKRVKLDGGDKKYSIGLDIGTNSVGWAVITDEYKVPSKKFKVLGNTDRHSIKKNLIGALLFDSGETAEATRLKRTARRRYTRRKNRICYLQEIFSNEMAKVDDSFFHRLEESFLVEEDKKHERHPIFGNIVDEVAYHEKYPTIYHLRKKLVDSTDKADLRLIYLALAHMIKFRGHFLIEGDLNPDNSDVDKLFIQLVQTYNQLFEENPINASGVDAKAILSARLSKSRRLENLIAQLPGEKKNGLFGNLIALSLGLTPNFKSNFDLAEDAKLQLSKDTYDDDLDNLLAQIGDQYADLFLAAKNLSDAILLSDILRVNTEITKAPLSASMIKRYDEHHQDLTLLKALVRQQLPEKYKEIFFDQSKNGYAGYIDGGASQEEFYKFIKPILEKMDGTEELLVKLNREDLLRKQRTFDNGSIPHQIHLGELHAILRRQEDFYPFLKDNREKIEKILTFRIPYYVGPLARGNSRFAWMTRKSEETITPWNFEEVVDKGASAQSFIERMTNFDKNLPNEKVLPKHSLLYEYFTVYNELTKVKYVTEGMRKPAFLSGEQKKAIVDLLFKTNRKVTVKQLKEDYFKKIECFDSVEISGVEDRFNASLGTYHDLLKIIKDKDFLDNEENEDILEDIVLTLTLFEDREMIEERLKTYAHLFDDKVMKQLKRRRYTGWGRLSRKLINGIRDKQSGKTILDFLKSDGFANRNFMQLIHDDSLTFKEDIQKAQVSGQGDSLHEHIANLAGSPAIKKGILQTVKVVDELVKVMGRHKPENIVIEMARENQTTQKGQKNSRERMKRIEEGIKELGSQILKEHPVENTQLQNEKLYLYYLQNGRDMYVDQELDINRLSDYDVDHIVPQSFLKDDSIDNKVLTRSDKARGKSDNVPSEEVVKKMKNYWRQLLNAKLITQRKFDNLTKAERGGLSELDKAGFIKRQLVETRQITKHVAQILDSRMNTKYDENDKLIREVKVITLKSKLVSDFRKDFQFYKVREINNYHHAHDAYLNAVVGTALIKKYPKLESEFVYGDYKVYDVRKMIAKSEQEIGKATAKYFFYSNIMNFFKTEITLANGEIRKRPLIETNGETGEIVWDKGRDFATVRKVLSMPQVNIVKKTEVQTGGFSKESILPKRNSDKLIARKKDWDPKKYGGFDSPTVAYSVLVVAKVEKGKSKKLKSVKELLGITIMERSSFEKNPIDFLEAKGYKEVKKDLIIKLPKYSLFELENGRKRMLASAGELQKGNELALPSKYVNFLYLASHYEKLKGSPEDNEQKQLFVEQHKHYLDEIIEQISEFSKRVILADANLDKVLSAYNKHRDKPIREQAENIIHLFTLTNLGAPAAFKYFDTTIDRKRYTSTKEVLDATLIHQSITGLYETRIDLSQLGGDGGGGGGSGGGGSGGGGSGGGGSGGGGSGGTLNIEDEHRLHETSKEPDVSLGSTWLSDFPQAWAETGGMGLAVRQAPLIIPLKATSTPVSIKQYPMSQEARLGIKPHIQRLLDQGILVPCQSPWNTPLLPVKKPGTNDYRPVQDLREVNKRVEDIHPTVPNPYNLLSGLPPSHQWYTVLDLKDAFFCLRLHPTSQPLFAFEWRDPEMGISGQLTWTRLPQGFKNSPTLFNEALHRDLADFRIQHPDLILLQYVDDLLLAATSELDCQQGTRALLQTLGNLGYRASAKKAQICQKQVKYLGYLLKEGQRWLTEARKETVMGQPTPKTPRQLREFLGTAGFCRLWIPGFAEMAAPLYPLTKPGTLFNWGPDQQKAYQEIKQALLTAPALGLPDLTKPFELFVDEKQGYAKGVLTQKLGPWRRPVAYLSKKLDPVAAGWPPCLRMVAAIAVLTKDAGKLTMGQPLVILAPHAVEALVKQPPDRWLSNARMTHYQALLLDTDRVQFGPVVALNPATLLPLPEEGLQHNCLDILAEAHGTRPDLTDQPLPDADHTWYTDGSSLLQEGQRKAGAAVTTETEVIWAKALPAGTSAQRAELIALTQALKMAEGKKLNVYTDSRYAFATAHIHGEIYRRRGWLTSEGKEIKNKDEILALLKALFLPKRLSIIHCPGHQKGHSAEARGNRMADQAARKAAITETPDTSTLLAGKRTADGSEFEKRTADGSEFESPKKKAKVE

SEQ ID NO: 6181 - protein, 2110 aa, synthetic construct; identical to SEQ ID NO: 4504

SEQ ID NO: 6182 - protein, 2110 aa, synthetic construct; identical to SEQ ID NO: 6180

SEQ ID NO: 6183 - protein, 2110 aa, synthetic construct; identical to SEQ ID NO: 4504

SEQ ID NO: 6184 - protein, 2130 aa, synthetic construct
MPAAKRVKLDGGDKKYSIGLDIGTNSVGWAVITDEYKVPSKKFKVLGNTDRHSIKKNLIGALLFDSGETAEATRLKRTARRRYTRRKNRICYLQEIFSNEMAKVDDSFFHRLEESFLVEEDKKHERHPIFGNIVDEVAYHEKYPTIYHLRKKLVDSTDKADLRLIYLALAHMIKFRGHFLIEGDLNPDNSDVDKLFIQLVQTYNQLFEENPINASGVDAKAILSARLSKSRRLENLIAQLPGEKKNGLFGNLIALSLGLTPNFKSNFDLAEDAKLQLSKDTYDDDLDNLLAQIGDQYADLFLAAKNLSDAILLSDILRVNTEITKAPLSASMIKRYDEHHQDLTLLKALVRQQLPEKYKEIFFDQSKNGYAGYIDGGASQEEFYKFIKPILEKMDGTEELLVKLNREDLLRKQRTFDNGSIPHQIHLGELHAILRRQEDFYPFLKDNREKIEKILTFRIPYYVGPLARGNSRFAWMTRKSEETITPWNFEEVVDKGASAQSFIERMTNFDKNLPNEKVLPKHSLLYEYFTVYNELTKVKYVTEGMRKPAFLSGEQKKAIVDLLFKTNRKVTVKQLKEDYFKKIECFDSVEISGVEDRFNASLGTYHDLLKIIKDKDFLDNEENEDILEDIVLTLTLFEDREMIEERLKTYAHLFDDKVMKQLKRRRYTGWGRLSRKLINGIRDKQSGKTILDFLKSDGFANRNFMQLIHDDSLTFKEDIQKAQVSGQGDSLHEHIANLAGSPAIKKGILQTVKVVDELVKVMGRHKPENIVIEMARENQTTQKGQKNSRERMKRIEEGIKELGSQILKEHPVENTQLQNEKLYLYYLQNGRDMYVDQELDINRLSDYDVDHIVPQSFLKDDSIDNKVLTRSDKARGKSDNVPSEEVVKKMKNYWRQLLNAKLITQRKFDNLTKAERGGLSELDKAGFIKRQLVETRQITKHVAQILDSRMNTKYDENDKLIREVKVITLKSKLVSDFRKDFQFYKVREINNYHHAHDAYLNAVVGTALIKKYPKLESEFVYGDYKVYDVRKMIAKSEQEIGKATAKYFFYSNIMNFFKTEITLANGEIRKRPLIETNGETGEIVWDKGRDFATVRKVLSMPQVNIVKKTEVQTGGFSKESILPKRNSDKLIARKKDWDPKKYGGFDSPTVAYSVLVVAKVEKGKSKKLKSVKELLGITIMERSSFEKNPIDFLEAKGYKEVKKDLIIKLPKYSLFELENGRKRMLASAGELQKGNELALPSKYVNFLYLASHYEKLKGSPEDNEQKQLFVEQHKHYLDEIIEQISEFSKRVILADANLDKVLSAYNKHRDKPIREQAENIIHLFTLTNLGAPAAFKYFDTTIDRKRYTSTKEVLDATLIHQSITGLYETRIDLSQLGGDGGGGGGSGGGGSGGGGSGGGGSGGGGSGGVQEISDSRPMLHIYLNGRRFLGLLDTGADKTCIAGRDWPANWPIHQTESSLQGLGMACGVARSSQPLRWQHEDKSGIIHPFVIPTLPFTLWGRDIMKDIKVRLMTDSPDDSQDLMIGAIESNLFADQISWKSDQPVWLNQWPLKQEKLQALQQLVTEQLQLGHLEESNSPWNTPVFVIKKKSGKWRLLQDLRAVNATMHDMGALQPGLPSPVAVPKGWEIIIIDLQDCFFNIKLHPEDCKRFAFSVPSPNFKRPYQRFQWKVLPQGMKNSPTLCQKFVDKAILTVRDKYQDSYIVHYMDDILLAHPSRSIVDEILTSMIQALNKHGLVVSTEKIQKYDNLKYLGTHIQGDSVSYQKLQIRTDKLRTLNDFQKLLGNINWIRPFLKLTTGELKPLFEILNGDSNPISTRKLTPEACKALQLMNERLSTARVKRLDLSQPWSLCILKTEYTPTACLWQDGVVEWIHLPHISPKVITPYDIFCTQLIIKGRHRSKELFSKDPDYIVVPYTKVQFDLLLQEKEDWPISLLGFLGEVHFHLPKDPLLTFTLQTAIIFPHMTSTTPLEKGIVIFTDGSANGRSVTYIQGREPIIKENTQNTAQQAEIVAVITAFEEVSQPFNLYTDSKYVTGLFPEIETATLSPRTKIYTELKHLQRLIHKRQEKFYIGHIRGHTGLPGPLAQGNAYADSLTRILTAAGKRTADGSEFEKRTADGSEFESPKKKAKVE

SEQ ID NO: 6185 - protein, 2130 aa, synthetic construct
MPAAKRVKLDGGDKKYSIGLDIGTNSVGWAVITDEYKVPSKKFKVLGNTDRHSIKKNLIGALLFDSGETAEATRLKRTARRRYTRRKNRICYLQEIFSNEMAKVDDSFFHRLEESFLVEEDKKHERHPIFGNIVDEVAYHEKYPTIYHLRKKLVDSTDKADLRLIYLALAHMIKFRGHFLIEGDLNPDNSDVDKLFIQLVQTYNQLFEENPINASGVDAKAILSARLSKSRRLENLIAQLPGEKKNGLFGNLIALSLGLTPNFKSNFDLAEDAKLQLSKDTYDDDLDNLLAQIGDQYADLFLAAKNLSDAILLSDILRVNTEITKAPLSASMIKRYDEHHQDLTLLKALVRQQLPEKYKEIFFDQSKNGYAGYIDGGASQEEFYKFIKPILEKMDGTEELLVKLNREDLLRKQRTFDNGSIPHQIHLGELHAILRRQEDFYPFLKDNREKIEKILTFRIPYYVGPLARGNSRFAWMTRKSEETITPWNFEEVVDKGASAQSFIERMTNFDKNLPNEKVLPKHSLLYEYFTVYNELTKVKYVTEGMRKPAFLSGEQKKAIVDLLFKTNRKVTVKQLKEDYFKKIECFDSVEISGVEDRFNASLGTYHDLLKIIKDKDFLDNEENEDILEDIVLTLTLFEDREMIEERLKTYAHLFDDKVMKQLKRRRYTGWGRLSRKLINGIRDKQSGKTILDFLKSDGFANRNFMQLIHDDSLTFKEDIQKAQVSGQGDSLHEHIANLAGSPAIKKGILQTVKVVDELVKVMGRHKPENIVIEMARENQTTQKGQKNSRERMKRIEEGIKELGSQILKEHPVENTQLQNEKLYLYYLQNGRDMYVDQELDINRLSDYDVDHIVPQSFLKDDSIDNKVLTRSDKARGKSDNVPSEEVVKKMKNYWRQLLNAKLITQRKFDNLTKAERGGLSELDKAGFIKRQLVETRQITKHVAQILDSRMNTKYDENDKLIREVKVITLKSKLVSDFRKDFQFYKVREINNYHHAHDAYLNAVVGTALIKKYPKLESEFVYGDYKVYDVRKMIAKSEQEIGKATAKYFFYSNIMNFFKTEITLANGEIRKRPLIETNGETGEIVWDKGRDFATVRKVLSMPQVNIVKKTEVQTGGFSKESILPKRNSDKLIARKKDWDPKKYGGFDSPTVAYSVLVVAKVEKGKSKKLKSVKELLGITIMERSSFEKNPIDFLEAKGYKEVKKDLIIKLPKYSLFELENGRKRMLASAGELQKGNELALPSKYVNFLYLASHYEKLKGSPEDNEQKQLFVEQHKHYLDEIIEQISEFSKRVILADANLDKVLSAYNKHRDKPIREQAENIIHLFTLTNLGAPAAFKYFDTTIDRKRYTSTKEVLDATLIHQSITGLYETRIDLSQLGGDGGGGGGSGGGGSGGGGSGGGGSGGGGSGGWVQEISDSRPMLHIYLNGRRFLGLLNTGADKTCIAGRDWPANWPIHQTESSLQGLGMACGVARSSQPLRWQHEDKSGIIHPFVIPTLPFTLWGRDIMKDIKVRLMTDSPDDSQDLMIGAIESNLFADQISWKSDQPVWLNQWPLKQEKLQALQQLVTEQLQLGHLEESNSPWNTPVFVIKKKSGKWRLLQDLRAVNATMHDMGALQPGLPSPVAVPKGWEIIIIDLQDCFFNIKLHPEDCKRFAFSVPSPNFKRPYQRFQWKVLPQGMKNSPTLCQKFVDKAILTVRDKYQDSYIVHYMDDILLAHPSRSIVDEILTSMIQALNKHGLVVSTEKIQKYDNLKYLGTHIQGDSVSYQKLQIRTDKLRTLNDFQKLLGNINWIRPFLKLTTGELKPLFEILNGDSNPISTRKLTPEACKALQLMNERLSTARVKRLDLSQPWSLCILKTEYTPTACLWQDGVVEWIHLPHISPKVITPYDIFCTQLIIKGRHRSKELFSKDPDYIVVPYTKVQFDLLLQEKEDWPISLLGFLGEVHFHLPKDPLLTFTLQTAIIFPHMTSTTPLEKGIVIFTDGSANGRSVTYIQGREPIIKENTQNTAQQAEIVAVITAFEEVSQPFNLYTDSKYVTGLFPEIETATLSPRTKIYTELKHLQRLIHKRQEKFYIGHIRGHTGLPGPLAQGNAYADSLTRILTAGKRTADGSEFEKRTADGSEFESPKKKAKVE

SEQ ID NO: 6186 - protein, 2130 aa, synthetic construct; identical to SEQ ID NO: 6185

SEQ ID NO: 6187 - protein, 2038 aa, synthetic construct
MPAAKRVKLDGGDKKYSIGLDIGTNSVGWAVITDEYKVPSKKFKVLGNTDRHSIKKNLIGALLFDSGETAEATRLKRTARRRYTRRKNRICYLQEIFSNEMAKVDDSFFHRLEESFLVEEDKKHERHPIFGNIVDEVAYHEKYPTIYHLRKKLVDSTDKADLRLIYLALAHMIKFRGHFLIEGDLNPDNSDVDKLFIQLVQTYNQLFEENPINASGVDAKAILSARLSKSRRLENLIAQLPGEKKNGLFGNLIALSLGLTPNFKSNFDLAEDAKLQLSKDTYDDDLDNLLAQIGDQYADLFLAAKNLSDAILLSDILRVNTEITKAPLSASMIKRYDEHHQDLTLLKALVRQQLPEKYKEIFFDQSKNGYAGYIDGGASQEEFYKFIKPILEKMDGTEELLVKLNREDLLRKQRTFDNGSIPHQIHLGELHAILRRQEDFYPFLKDNREKIEKILTFRIPYYVGPLARGNSRFAWMTRKSEETITPWNFEEVVDKGASAQSFIERMTNFDKNLPNEKVLPKHSLLYEYFTVYNELTKVKYVTEGMRKPAFLSGEQKKAIVDLLFKTNRKVTVKQLKEDYFKKIECFDSVEISGVEDRFNASLGTYHDLLKIIKDKDFLDNEENEDILEDIVLTLTLFEDREMIEERLKTYAHLFDDKVMKQLKRRRYTGWGRLSRKLINGIRDKQSGKTILDFLKSDGFANRNFMQLIHDDSLTFKEDIQKAQVSGQGDSLHEHIANLAGSPAIKKGILQTVKVVDELVKVMGRHKPENIVIEMARENQTTQKGQKNSRERMKRIEEGIKELGSQILKEHPVENTQLQNEKLYLYYLQNGRDMYVDQELDINRLSDYDVDHIVPQSFLKDDSIDNKVLTRSDKARGKSDNVPSEEVVKKMKNYWRQLLNAKLITQRKFDNLTKAERGGLSELDKAGFIKRQLVETRQITKHVAQILDSRMNTKYDENDKLIREVKVITLKSKLVSDFRKDFQFYKVREINNYHHAHDAYLNAVVGTALIKKYPKLESEFVYGDYKVYDVRKMIAKSEQEIGKATAKYFFYSNIMNFFKTEITLANGEIRKRPLIETNGETGEIVWDKGRDFATVRKVLSMPQVNIVKKTEVQTGGFSKESILPKRNSDKLIARKKDWDPKKYGGFDSPTVAYSVLVVAKVEKGKSKKLKSVKELLGITIMERSSFEKNPIDFLEAKGYKEVKKDLIIKLPKYSLFELENGRKRMLASAGELQKGNELALPSKYVNFLYLASHYEKLKGSPEDNEQKQLFVEQHKHYLDEIIEQISEFSKRVILADANLDKVLSAYNKHRDKPIREQAENIIHLFTLTNLGAPAAFKYFDTTIDRKRYTSTKEVLDATLIHQSITGLYETRIDLSQLGGDGGGGGGSGGGGSGGGGSGGGGSGGGGSGGGRDIMKDIKVRLMTDSPDDSQDLMIGAIESNLFADQISWKSDQPVWLNQWPLKQEKLQALQQLVTEQLQLGHLEESNSPWNTPVFVIKKKSGKWRLLQDLRAVNATMHDMGALQPGLPSPVAVPKGWEIIIIDLQDCFFNIKLHPEDCKRFAFSVPSPNFKRPYQRFQWKVLPQGMKNSPTLCQKFVDKAILTVRDKYQDSYIVHYMDDILLAHPSRSIVDEILTSMIQALNKHGLVVSTEKIQKYDNLKYLGTHIQGDSVSYQKLQIRTDKLRTLNDFQKLLGNINWIRPFLKLTTGELKPLFEILNGDSNPISTRKLTPEACKALQLMNERLSTARVKRLDLSQPWSLCILKTEYTPTACLWQDGVVEWIHLPHISPKVITPYDIFCTQLIIKGRHRSKELFSKDPDYIVVPYTKVQFDLLLQEKEDWPISLLGFLGEVHFHLPKDPLLTFTLQTAIIFPHMTSTTPLEKGIVIFTDGSANGRSVTYIQGREPIIKENTQNTAQQAEIVAVITAFEEVSQPFNLYTDSKYVTGLFPEIETATLSPRTKIYTELKHLQRLIHKRQEKFYIGHIRGHTGLPGPLAQGNAYADSLTRILTAGKRTADGSEFEKRTADGSEFESPKKKAKVE

SEQ ID NO: 6188 - protein, 2102 aa, synthetic construct
MPAAKRVKLDGGDKKYSIGLDIGTNSVGWAVITDEYKVPSKKFKVLGNTDRHSIKKNLIGALLFDSGETAEATRLKRTARRRYTRRKNRICYLQEIFSNEMAKVDDSFFHRLEESFLVEEDKKHERHPIFGNIVDEVAYHEKYPTIYHLRKKLVDSTDKADLRLIYLALAHMIKFRGHFLIEGDLNPDNSDVDKLFIQLVQTYNQLFEENPINASGVDAKAILSARLSKSRRLENLIAQLPGEKKNGLFGNLIALSLGLTPNFKSNFDLAEDAKLQLSKDTYDDDLDNLLAQIGDQYADLFLAAKNLSDAILLSDILRVNTEITKAPLSASMIKRYDEHHQDLTLLKALVRQQLPEKYKEIFFDQSKNGYAGYIDGGASQEEFYKFIKPILEKMDGTEELLVKLNREDLLRKQRTFDNGSIPHQIHLGELHAILRRQEDFYPFLKDNREKIEKILTFRIPYYVGPLARGNSRFAWMTRKSEETITPWNFEEVVDKGASAQSFIERMTNFDKNLPNEKVLPKHSLLYEYFTVYNELTKVKYVTEGMRKPAFLSGEQKKAIVDLLFKTNRKVTVKQLKEDYFKKIECFDSVEISGVEDRFNASLGTYHDLLKIIKDKDFLDNEENEDILEDIVLTLTLFEDREMIEERLKTYAHLFDDKVMKQLKRRRYTGWGRLSRKLINGIRDKQSGKTILDFLKSDGFANRNFMQLIHDDSLTFKEDIQKAQVSGQGDSLHEHIANLAGSPAIKKGILQTVKVVDELVKVMGRHKPENIVIEMARENQTTQKGQKNSRERMKRIEEGIKELGSQILKEHPVENTQLQNEKLYLYYLQNGRDMYVDQELDINRLSDYDVDHIVPQSFLKDDSIDNKVLTRSDKARGKSDNVPSEEVVKKMKNYWRQLLNAKLITQRKFDNLTKAERGGLSELDKAGFIKRQLVETRQITKHVAQILDSRMNTKYDENDKLIREVKVITLKSKLVSDFRKDFQFYKVREINNYHHAHDAYLNAVVGTALIKKYPKLESEFVYGDYKVYDVRKMIAKSEQEIGKATAKYFFYSNIMNFFKTEITLANGEIRKRPLIETNGETGEIVWDKGRDFATVRKVLSMPQVNIVKKTEVQTGGFSKESILPKRNSDKLIARKKDWDPKKYGGFDSPTVAYSVLVVAKVEKGKSKKLKSVKELLGITIMERSSFEKNPIDFLEAKGYKEVKKDLIIKLPKYSLFELENGRKRMLASAGELQKGNELALPSKYVNFLYLASHYEKLKGSPEDNEQKQLFVEQHKHYLDEIIEQISEFSKRVILADANLDKVLSAYNKHRDKPIREQAENIIHLFTLTNLGAPAAFKYFDTTIDRKRYTSTKEVLDATLIHQSITGLYETRIDLSQLGGDGGGGGGSGGGGSGGGGSGGGGSGGGGSGGLDDEYRLYSPLVKPDQNIQFWLEQFPQAWAETAGMGLAKQVPPQVIQLKASATPVSVRQYPLSKEAQEGIRPHVQRLIQQGILVPVQSPWNTPLLPVRKPGTNDYRPVQDLREVNKRVQDIHPTVPNPYNLLCALPPQRSWYTVLDLKDAFFCLRLHPTSQPLFAFEWRDPGTGRTGQLTWTRLPQGFKNSPTIFNEALHRDLANFRIQHPQVTLLQYVDDLLLAGATKQDCLEGTKALLLELSDLGYRASAKKAQICRREVTYLGYSLRDGQRWLTEARKKTVVQIPAPTTAKQVREFLGKAGFCRLFIPGFATLAAPLYPLTKPKGEFSWAPEHQKAFDAIKKALLSAPALALPDVTKPFTLYVDERKGVARGVLTQTLGPWRRPVAYLSKKLDPVASGWPVCLKAIAAVAILVKDADKLTLGQNITVIAPHALENIVRQPPDRWMTNARMTHYQSLLLTERVTFAPPAALNPATLLPEETDEPVTHDCHQLLIEETGVRKDLTDIPLTGEVLTWFTDGSSYVVEGKRMAGAAVVDGTRTIWASSLPEGTSAQKAELMALTQALRLAEGKSINIYTDSRYAFATAHVHGAIYKQRGWLTSAGREIKNKEEILSLLEALHLPKRLAIIHCPGHQKAKDPISRGNQMADRVAKQAAQGVNLLPAGKRTADGSEFEKRTADGSEFESPKKKAKVE

SEQ ID NO: 6189 - protein, 2104 aa, synthetic construct
MPAAKRVKLDGGDKKYSIGLDIGTNSVGWAVITDEYKVPSKKFKVLGNTDRHSIKKNLIGALLFDSGETAEATRLKRTARRRYTRRKNRICYLQEIFSNEMAKVDDSFFHRLEESFLVEEDKKHERHPIFGNIVDEVAYHEKYPTIYHLRKKLVDSTDKADLRLIYLALAHMIKFRGHFLIEGDLNPDNSDVDKLFIQLVQTYNQLFEENPINASGVDAKAILSARLSKSRRLENLIAQLPGEKKNGLFGNLIALSLGLTPNFKSNFDLAEDAKLQLSKDTYDDDLDNLLAQIGDQYADLFLAAKNLSDAILLSDILRVNTEITKAPLSASMIKRYDEHHQDLTLLKALVRQQLPEKYKEIFFDQSKNGYAGYIDGGASQEEFYKFIKPILEKMDGTEELLVKLNREDLLRKQRTFDNGSIPHQIHLGELHAILRRQEDFYPFLKDNREKIEKILTFRIPYYVGPLARGNSRFAWMTRKSEETITPWNFEEVVDKGASAQSFIERMTNFDKNLPNEKVLPKHSLLYEYFTVYNELTKVKYVTEGMRKPAFLSGEQKKAIVDLLFKTNRKVTVKQLKEDYFKKIECFDSVEISGVEDRFNASLGTYHDLLKIIKDKDFLDNEENEDILEDIVLTLTLFEDREMIEERLKTYAHLFDDKVMKQLKRRRYTGWGRLSRKLINGIRDKQSGKTILDFLKSDGFANRNFMQLIHDDSLTFKEDIQKAQVSGQGDSLHEHIANLAGSPAIKKGILQTVKVVDELVKVMGRHKPENIVIEMARENQTTQKGQKNSRERMKRIEEGIKELGSQILKEHPVENTQLQNEKLYLYYLQNGRDMYVDQELDINRLSDYDVDHIVPQSFLKDDSIDNKVLTRSDKARGKSDNVPSEEVVKKMKNYWRQLLNAKLITQRKFDNLTKAERGGLSELDKAGFIKRQLVETRQITKHVAQILDSRMNTKYDENDKLIREVKVITLKSKLVSDFRKDFQFYKVREINNYHHAHDAYLNAVVGTALIKKYPKLESEFVYGDYKVYDVRKMIAKSEQEIGKATAKYFFYSNIMNFFKTEITLANGEIRKRPLIETNGETGEIVWDKGRDFATVRKVLSMPQVNIVKKTEVQTGGFSKESILPKRNSDKLIARKKDWDPKKYGGFDSPTVAYSVLVVAKVEKGKSKKLKSVKELLGITIMERSSFEKNPIDFLEAKGYKEVKKDLIIKLPKYSLFELENGRKRMLASAGELQKGNELALPSKYVNFLYLASHYEKLKGSPEDNEQKQLFVEQHKHYLDEIIEQISEFSKRVILADANLDKVLSAYNKHRDKPIREQAENIIHLFTLTNLGAPAAFKYFDTTIDRKRYTSTKEVLDATLIHQSITGLYETRIDLSQLGGDGGGGGGSGGGGSGGGGSGGGGSGGGGSGGTLQLDDEYRLYSPLVKPDQNIQFWLEQFPQAWAETAGMGLAKQVPPQVIQLKASATPVSVRQYPLSKEAQEGIRPHVQRLIQQGILVPVQSPWNTPLLPVRKPGTNDYRPVQDLREVNKRVQDIHPTVPNPYNLLCALPPQRSWYTVLDLKDAFFCLRLHPTSQPLFAFEWRDPGTGRTGQLTWTRLPQGFKNSPTIFDEALHRDLANFRIQHPQVTLLQYVDDLLLAGATKQDCLEGTKALLLELSDLGYRASAKKAQICRREVTYLGYSLRDGQRWLTEARKKTVVQIPAPTTAKQVREFLGTAGFCRLWIPGFATLAAPLYPLTKEKGEFSWAPEHQKAFDAIKKALLSAPALALPDVTKPFTLYVDERKGVARGVLTQTLGPWRRPVAYLSKKLDPVASGWPVCLKAIAAVAILVKDADKLTLGQNITVIAPHALENIVRQPPDRWMTNARMTHYQSLLLTERVTFAPPAALNPATLLPEETDEPVTHDCHQLLIEETGVRKDLTDIPLTGEVLTWFTDGSSYVVEGKRMAGAAVVDGTRTIWASSLPEGTSAQKAELMALTQALRLAEGKSINIYTDSRYAFATAHVHGAIYKQRGLLTSAGREIKNKEEILSLLEALHLPKRLAIIHCPGHQKAKDPISRGNQMADRVAKQAAQGVNLLAGKRTADGSEFEKRTADGSEFESPKKKAKVE

SEQ ID NO: 6190 - protein, 2104 aa, synthetic construct
MPAAKRVKLDGGDKKYSIGLDIGTNSVGWAVITDEYKVPSKKFKVLGNTDRHSIKKNLIGALLFDSGETAEATRLKRTARRRYTRRKNRICYLQEIFSNEMAKVDDSFFHRLEESFLVEEDKKHERHPIFGNIVDEVAYHEKYPTIYHLRKKLVDSTDKADLRLIYLALAHMIKFRGHFLIEGDLNPDNSDVDKLFIQLVQTYNQLFEENPINASGVDAKAILSARLSKSRRLENLIAQLPGEKKNGLFGNLIALSLGLTPNFKSNFDLAEDAKLQLSKDTYDDDLDNLLAQIGDQYADLFLAAKNLSDAILLSDILRVNTEITKAPLSASMIKRYDEHHQDLTLLKALVRQQLPEKYKEIFFDQSKNGYAGYIDGGASQEEFYKFIKPILEKMDGTEELLVKLNREDLLRKQRTFDNGSIPHQIHLGELHAILRRQEDFYPFLKDNREKIEKILTFRIPYYVGPLARGNSRFAWMTRKSEETITPWNFEEVVDKGASAQSFIERMTNFDKNLPNEKVLPKHSLLYEYFTVYNELTKVKYVTEGMRKPAFLSGEQKKAIVDLLFKTNRKVTVKQLKEDYFKKIECFDSVEISGVEDRFNASLGTYHDLLKIIKDKDFLDNEENEDILEDIVLTLTLFEDREMIEERLKTYAHLFDDKVMKQLKRRRYTGWGRLSRKLINGIRDKQSGKTILDFLKSDGFANRNFMQLIHDDSLTFKEDIQKAQVSGQGDSLHEHIANLAGSPAIKKGILQTVKVVDELVKVMGRHKPENIVIEMARENQTTQKGQKNSRERMKRIEEGIKELGSQILKEHPVENTQLQNEKLYLYYLQNGRDMYVDQELDINRLSDYDVDHIVPQSFLKDDSIDNKVLTRSDKARGKSDNVPSEEVVKKMKNYWRQLLNAKLITQRKFDNLTKAERGGLSELDKAGFIKRQLVETRQITKHVAQILDSRMNTKYDENDKLIREVKVITLKSKLVSDFRKDFQFYKVREINNYHHAHDAYLNAVVGTALIKKYPKLESEFVYGDYKVYDVRKMIAKSEQEIGKATAKYFFYSNIMNFFKTEITLANGEIRKRPLIETNGETGEIVWDKGRDFATVRKVLSMPQVNIVKKTEVQTGGFSKESILPKRNSDKLIARKKDWDPKKYGGFDSPTVAYSVLVVAKVEKGKSKKLKSVKELLGITIMERSSFEKNPIDFLEAKGYKEVKKDLIIKLPKYSLFELENGRKRMLASAGELQKGNELALPSKYVNFLYLASHYEKLKGSPEDNEQKQLFVEQHKHYLDEIIEQISEFSKRVILADANLDKVLSAYNKHRDKPIREQAENIIHLFTLTNLGAPAAFKYFDTTIDRKRYTSTKEVLDATLIHQSITGLYETRIDLSQLGGDGGGGGGSGGGGSGGGGSGGGGSGGGGSGGTLQLDDEYRLYSPLVKPDQNIQFWLEQFPQAWAETAGMGLAKQVPPQVIQLKASATPVSVRQYPLSKEAQEGIRPHVQRLIQQGILVPVQSPWNTPLLPVRKPGTNDYRPVQDLREVNKRVQDIHPTVPNPYNLLCALPPQRSWYTVLDLKDAFFCLRLHPTSQPLFAFEWRDPGTGRTGQLTWTRLPQGFKNSPTIFNEALHRDLANFRIQHPQVTLLQYVDDLLLAGATKQDCLEGTKALLLELSDLGYRASAKKAQICRREVTYLGYSLRDGQRWLTEARKKTVVQIPAPTTAKQVREFLGTAGFCRLWIPGFATLAAPLYPLTKPKGEFSWAPEHQKAFDAIKKALLSAPALALPDVTKPFTLYVDERKGVARGVLTQTLGPWRRPVAYLSKKLDPVASGWPVCLKAIAAVAILVKDADKLTLGQNITVIAPHALENIVRQPPDRWMTNARMTHYQSLLLTERVTFAPPAALNPATLLPEETDEPVTHDCHQLLIEETGVRKDLTDIPLTGEVLTWFTDGSSYVVEGKRMAGAAVVDGTRTIWASSLPEGTSAQKAELMALTQALRLAEGKSINIYTDSRYAFATAHVHGAIYKQRGWLTSAGREIKNKEEILSLLEALHLPKRLAIIHCPGHQKAKDPISRGNQMADRVAKQAAQGVNLLAGKRTADGSEFEKRTADGSEFESPKKKAKVE

SEQ ID NO: 6191 - protein, 2190 aa, synthetic construct
MPAAKRVKLDGGDKKYSIGLDIGTNSVGWAVITDEYKVPSKKFKVLGNTDRHSIKKNLIGALLFDSGETAEATRLKRTARRRYTRRKNRICYLQEIFSNEMAKVDDSFFHRLEESFLVEEDKKHERHPIFGNIVDEVAYHEKYPTIYHLRKKLVDSTDKADLRLIYLALAHMIKFRGHFLIEGDLNPDNSDVDKLFIQLVQTYNQLFEENPINASGVDAKAILSARLSKSRRLENLIAQLPGEKKNGLFGNLIALSLGLTPNFKSNFDLAEDAKLQLSKDTYDDDLDNLLAQIGDQYADLFLAAKNLSDAILLSDILRVNTEITKAPLSASMIKRYDEHHQDLTLLKALVRQQLPEKYKEIFFDQSKNGYAGYIDGGASQEEFYKFIKPILEKMDGTEELLVKLNREDLLRKQRTFDNGSIPHQIHLGELHAILRRQEDFYPFLKDNREKIEKILTFRIPYYVGPLARGNSRFAWMTRKSEETITPWNFEEVVDKGASAQSFIERMTNFDKNLPNEKVLPKHSLLYEYFTVYNELTKVKYVTEGMRKPAFLSGEQKKAIVDLLFKTNRKVTVKQLKEDYFKKIECFDSVEISGVEDRFNASLGTYHDLLKIIKDKDFLDNEENEDILEDIVLTLTLFEDREMIEERLKTYAHLFDDKVMKQLKRRRYTGWGRLSRKLINGIRDKQSGKTILDFLKSDGFANRNFMQLIHDDSLTFKEDIQKAQVSGQGDSLHEHIANLAGSPAIKKGILQTVKVVDELVKVMGRHKPENIVIEMARENQTTQKGQKNSRERMKRIEEGIKELGSQILKEHPVENTQLQNEKLYLYYLQNGRDMYVDQELDINRLSDYDVDHIVPQSFLKDDSIDNKVLTRSDKARGKSDNVPSEEVVKKMKNYWRQLLNAKLITQRKFDNLTKAERGGLSELDKAGFIKRQLVETRQITKHVAQILDSRMNTKYDENDKLIREVKVITLKSKLVSDFRKDFQFYKVREINNYHHAHDAYLNAVVGTALIKKYPKLESEFVYGDYKVYDVRKMIAKSEQEIGKATAKYFFYSNIMNFFKTEITLANGEIRKRPLIETNGETGEIVWDKGRDFATVRKVLSMPQVNIVKKTEVQTGGFSKESILPKRNSDKLIARKKDWDPKKYGGFDSPTVAYSVLVVAKVEKGKSKKLKSVKELLGITIMERSSFEKNPIDFLEAKGYKEVKKDLIIKLPKYSLFELENGRKRMLASAGELQKGNELALPSKYVNFLYLASHYEKLKGSPEDNEQKQLFVEQHKHYLDEIIEQISEFSKRVILADANLDKVLSAYNKHRDKPIREQAENIIHLFTLTNLGAPAAFKYFDTTIDRKRYTSTKEVLDATLIHQSITGLYETRIDLSQLGGDGGGGGGSGGGGSGGGGSGGGGSGGGGSGGMDPLQLLQPLEAEIKGTKLKAHWNSGATITCVPEAFLEDERPIQTMLIKTIHGEKQQDVYYLTFKVQGRKVEAEVLASPYDYILLNPSDVPWLMKKPLQLTVLVPLHEYQERLLQQTALPKEQKELLQKLFLKYDALWQHWENQVGHRRIKPHNIATGTLAPRPQKQYPINPKAKPSIQIVIDDLLKQGVLIQQNSTMNTPVYPVPKPDGKWRMVLDYREVNKTIPLIAAQNQHSAGILSSIYRGKYKTTLDLTNGFWAHPITPESYWLTAFTWQGKQYCWTRLPQGFLNSPALFTADVVDLLKEIPNVQAYVDDIYISHDDPQEHLEQLEKIFSILLNAGYVVSLKKSEIAQREVEFLGFNITKEGRGLTDTFKQKLLNITPPKDLKQLQSILGLLNFARNFIPNYSELVKPLYTIVANANGKFISWTEDNSNQLQHIISVLNQADNLEERNPETRLIIKVNSSPSAGYIRYYNEGSKRPIMYVNYIFSKAEAKFTQTEKLLTTMHKGLIKAMDLAMGQEILVYSPIVSMTKIQRTPLPERKALPVRWITWMTYLEDPRIQFHYDKSLPELQQIPNVTEDVIAKTKHPSEFAMVFYTDGSAIKHPDVNKSHSAGMGIAQVQFIPEYKIVHQWSIPLGDHTAQLAEIAAVEFACKKALKISGPVLIVTDSFYVAESANKELPYWKSNGFLNNKKKPLRHVSKWKSIAECLQLKPDIIIMHEKGHQQPMTTLHTEGNNLADKLATQGSYVVHAGKRTADGSEFEKRTADGSEFESPKKKAKVE

SEQ ID NO: 6192 - protein, 2101 aa, synthetic construct
MPAAKRVKLDGGDKKYSIGLDIGTNSVGWAVITDEYKVPSKKFKVLGNTDRHSIKKNLIGALLFDSGETAEATRLKRTARRRYTRRKNRICYLQEIFSNEMAKVDDSFFHRLEESFLVEEDKKHERHPIFGNIVDEVAYHEKYPTIYHLRKKLVDSTDKADLRLIYLALAHMIKFRGHFLIEGDLNPDNSDVDKLFIQLVQTYNQLFEENPINASGVDAKAILSARLSKSRRLENLIAQLPGEKKNGLFGNLIALSLGLTPNFKSNFDLAEDAKLQLSKDTYDDDLDNLLAQIGDQYADLFLAAKNLSDAILLSDILRVNTEITKAPLSASMIKRYDEHHQDLTLLKALVRQQLPEKYKEIFFDQSKNGYAGYIDGGASQEEFYKFIKPILEKMDGTEELLVKLNREDLLRKQRTFDNGSIPHQIHLGELHAILRRQEDFYPFLKDNREKIEKILTFRIPYYVGPLARGNSRFAWMTRKSEETITPWNFEEVVDKGASAQSFIERMTNFDKNLPNEKVLPKHSLLYEYFTVYNELTKVKYVTEGMRKPAFLSGEQKKAIVDLLFKTNRKVTVKQLKEDYFKKIECFDSVEISGVEDRFNASLGTYHDLLKIIKDKDFLDNEENEDILEDIVLTLTLFEDREMIEERLKTYAHLFDDKVMKQLKRRRYTGWGRLSRKLINGIRDKQSGKTILDFLKSDGFANRNFMQLIHDDSLTFKEDIQKAQVSGQGDSLHEHIANLAGSPAIKKGILQTVKVVDELVKVMGRHKPENIVIEMARENQTTQKGQKNSRERMKRIEEGIKELGSQILKEHPVENTQLQNEKLYLYYLQNGRDMYVDQELDINRLSDYDVDHIVPQSFLKDDSIDNKVLTRSDKARGKSDNVPSEEVVKKMKNYWRQLLNAKLITQRKFDNLTKAERGGLSELDKAGFIKRQLVETRQITKHVAQILDSRMNTKYDENDKLIREVKVITLKSKLVSDFRKDFQFYKVREINNYHHAHDAYLNAVVGTALIKKYPKLESEFVYGDYKVYDVRKMIAKSEQEIGKATAKYFFYSNIMNFFKTEITLANGEIRKRPLIETNGETGEIVWDKGRDFATVRKVLSMPQVNIVKKTEVQTGGFSKESILPKRNSDKLIARKKDWDPKKYGGFDSPTVAYSVLVVAKVEKGKSKKLKSVKELLGITIMERSSFEKNPIDFLEAKGYKEVKKDLIIKLPKYSLFELENGRKRMLASAGELQKGNELALPSKYVNFLYLASHYEKLKGSPEDNEQKQLFVEQHKHYLDEIIEQISEFSKRVILADANLDKVLSAYNKHRDKPIREQAENIIHLFTLTNLGAPAAFKYFDTTIDRKRYTSTKEVLDATLIHQSITGLYETRIDLSQLGGDGGGGGGSGGGGSGGGGSGGGGSGGGGSGGVPWLMKKPLQLTVLVPLHEYQERLLQQTALPKEQKELLQKLFLKYDALWQHWENQVGHRRIKPHNIATGTLAPRPQKQYPINPKAKPSIQIVIDDLLKQGVLIQQNSTMNTPVYPVPKPDGKWRMVLDYREVNKTIPLIAAQNQHSAGILSSIYRGKYKTTLDLTNGFWAHPITPESYWLTAFTWQGKQYCWTRLPQGFLNSPALFNADVVDLLKEIPNVQAYVDDIYISHDDPQEHLEQLEKIFSILLNAGYVVSLKKSEIAQREVEFLGFNITKEGRGLTDTFKQKLLNITPPKDLKQLQSILGKLNFARNFIPNYSELVKPLYTIVAPANGKFISWTEDNSNQLQHIISVLNQADNLEERNPETRLIIKVNSSPSAGYIRYYNEGSKRPIMYVNYIFSKAEAKFTQTEKLLTTMHKGLIKAMDLAMGQEILVYSPIVSMTKIQRTPLPERKALPVRWITWMTYLEDPRIQFHYDKSLPELQQIPNVTEDVIAKTKHPSEFAMVFYTDGSAIKHPDVNKSHSAGMGIAQVQFIPEYKIVHQWSIPLGDHTAQLAEIAAVEFACKKALKISGPVLIVTDSFYVAESANKELPYWKSNGFLNNKKKPLRHVSKWKSIAECLQLKPDIIIMHEKGHQQPMTTLHTEGNNLADKLATQGSYVVHAGKRTADGSEFEKRTADGSEFESPKKKAKVE

SEQ ID NO: 6193 - protein, 2190 aa, synthetic construct
MPAAKRVKLDGGDKKYSIGLDIGTNSVGWAVITDEYKVPSKKFKVLGNTDRHSIKKNLIGALLFDSGETAEATRLKRTARRRYTRRKNRICYLQEIFSNEMAKVDDSFFHRLEESFLVEEDKKHERHPIFGNIVDEVAYHEKYPTIYHLRKKLVDSTDKADLRLIYLALAHMIKFRGHFLIEGDLNPDNSDVDKLFIQLVQTYNQLFEENPINASGVDAKAILSARLSKSRRLENLIAQLPGEKKNGLFGNLIALSLGLTPNFKSNFDLAEDAKLQLSKDTYDDDLDNLLAQIGDQYADLFLAAKNLSDAILLSDILRVNTEITKAPLSASMIKRYDEHHQDLTLLKALVRQQLPEKYKEIFFDQSKNGYAGYIDGGASQEEFYKFIKPILEKMDGTEELLVKLNREDLLRKQRTFDNGSIPHQIHLGELHAILRRQEDFYPFLKDNREKIEKILTFRIPYYVGPLARGNSRFAWMTRKSEETITPWNFEEVVDKGASAQSFIERMTNFDKNLPNEKVLPKHSLLYEYFTVYNELTKVKYVTEGMRKPAFLSGEQKKAIVDLLFKTNRKVTVKQLKEDYFKKIECFDSVEISGVEDRFNASLGTYHDLLKIIKDKDFLDNEENEDILEDIVLTLTLFEDREMIEERLKTYAHLFDDKVMKQLKRRRYTGWGRLSRKLINGIRDKQSGKTILDFLKSDGFANRNFMQLIHDDSLTFKEDIQKAQVSGQGDSLHEHIANLAGSPAIKKGILQTVKVVDELVKVMGRHKPENIVIEMARENQTTQKGQKNSRERMKRIEEGIKELGSQILKEHPVENTQLQNEKLYLYYLQNGRDMYVDQELDINRLSDYDVDHIVPQSFLKDDSIDNKVLTRSDKARGKSDNVPSEEVVKKMKNYWRQLLNAKLITQRKFDNLTKAERGGLSELDKAGFIKRQLVETRQITKHVAQILDSRMNTKYDENDKLIREVKVITLKSKLVSDFRKDFQFYKVREINNYHHAHDAYLNAVVGTALIKKYPKLESEFVYGDYKVYDVRKMIAKSEQEIGKATAKYFFYSNIMNFFKTEITLANGEIRKRPLIETNGETGEIVWDKGRDFATVRKVLSMPQVNIVKKTEVQTGGFSKESILPKRNSDKLIARKKDWDPKKYGGFDSPTVAYSVLVVAKVEKGKSKKLKSVKELLGITIMERSSFEKNPIDFLEAKGYKEVKKDLIIKLPKYSLFELENGRKRMLASAGELQKGNELALPSKYVNFLYLASHYEKLKGSPEDNEQKQLFVEQHKHYLDEIIEQISEFSKRVILADANLDKVLSAYNKHRDKPIREQAENIIHLFTLTNLGAPAAFKYFDTTIDRKRYTSTKEVLDATLIHQSITGLYETRIDLSQLGGDGGGGGGSGGGGSGGGGSGGGGSGGGGSGGMDPLQLLQPLEAEIKGTKLKAHWNSGATITCVPEAFLEDERPIQTMLIKTIHGEKQQDVYYLTFKVQGRKVEAEVLASPYDYILLNPSDVPWLMKKPLQLTVLVPLHEYQERLLQQTALPKEQKELLQKLFLKYDALWQHWENQVGHRRIKPHNIATGTLAPRPQKQYPINPKAKPSIQIVIDDLLKQGVLIQQNSTMNTPVYPVPKPDGKWRMVLDYREVNKTIPLIAAQNQHSAGILSSIYRGKYKTTLDLTNGFWAHPITPESYWLTAFTWQGKQYCWTRLPQGFLNSPALFNADVVDLLKEIPNVQAYVDDIYISHDDPQEHLEQLEKIFSILLNAGYVVSLKKSEIAQREVEFLGFNITKEGRGLTDTFKQKLLNITPPKDLKQLQSILGLLNFARNFIPNYSELVKPLYTIVAPANGKFISWTEDNSNQLQHIISVLNQADNLEERNPETRLIIKVNSSPSAGYIRYYNEGSKRPIMYVNYIFSKAEAKFTQTEKLLTTMHKGLIKAMDLAMGQEILVYSPIVSMTKIQRTPLPERKALPVRWITWMTYLEDPRIQFHYDKSLPELQQIPNVTEDVIAKTKHPSEFAMVFYTDGSAIKHPDVNKSHSAGMGIAQVQFIPEYKIVHQWSIPLGDHTAQLAEIAAVEFACKKALKISGPVLIVTDSFYVAESANKELPYWKSNGFLNNKKKPLRHVSKWKSIAECLQLKPDIIIMHEKGHQQPMTTLHTEGNNLADKLATQGSYVVHAGKRTADGSEFEKRTADGSEFESPKKKAKVE

SEQ ID NO: 6194 - protein, 2190 aa, synthetic construct
MPAAKRVKLDGGDKKYSIGLDIGTNSVGWAVITDEYKVPSKKFKVLGNTDRHSIKKNLIGALLFDSGETAEATRLKRTARRRYTRRKNRICYLQEIFSNEMAKVDDSFFHRLEESFLVEEDKKHERHPIFGNIVDEVAYHEKYPTIYHLRKKLVDSTDKADLRLIYLALAHMIKFRGHFLIEGDLNPDNSDVDKLFIQLVQTYNQLFEENPINASGVDAKAILSARLSKSRRLENLIAQLPGEKKNGLFGNLIALSLGLTPNFKSNFDLAEDAKLQLSKDTYDDDLDNLLAQIGDQYADLFLAAKNLSDAILLSDILRVNTEITKAPLSASMIKRYDEHHQDLTLLKALVRQQLPEKYKEIFFDQSKNGYAGYIDGGASQEEFYKFIKPILEKMDGTEELLVKLNREDLLRKQRTFDNGSIPHQIHLGELHAILRRQEDFYPFLKDNREKIEKILTFRIPYYVGPLARGNSRFAWMTRKSEETITPWNFEEVVDKGASAQSFIERMTNFDKNLPNEKVLPKHSLLYEYFTVYNELTKVKYVTEGMRKPAFLSGEQKKAIVDLLFKTNRKVTVKQLKEDYFKKIECFDSVEISGVEDRFNASLGTYHDLLKIIKDKDFLDNEENEDILEDIVLTLTLFEDREMIEERLKTYAHLFDDKVMKQLKRRRYTGWGRLSRKLINGIRDKQSGKTILDFLKSDGFANRNFMQLIHDDSLTFKEDIQKAQVSGQGDSLHEHIANLAGSPAIKKGILQTVKVVDELVKVMGRHKPENIVIEMARENQTTQKGQKNSRERMKRIEEGIKELGSQILKEHPVENTQLQNEKLYLYYLQNGRDMYVDQELDINRLSDYDVDHIVPQSFLKDDSIDNKVLTRSDKARGKSDNVPSEEVVKKMKNYWRQLLNAKLITQRKFDNLTKAERGGLSELDKAGFIKRQLVETRQITKHVAQILDSRMNTKYDENDKLIREVKVITLKSKLVSDFRKDFQFYKVREINNYHHAHDAYLNAVVGTALIKKYPKLESEFVYGDYKVYDVRKMIAKSEQEIGKATAKYFFYSNIMNFFKTEITLANGEIRKRPLIETNGETGEIVWDKGRDFATVRKVLSMPQVNIVKKTEVQTGGFSKESILPKRNSDKLIARKKDWDPKKYGGFDSPTVAYSVLVVAKVEKGKSKKLKSVKELLGITIMERSSFEKNPIDFLEAKGYKEVKKDLIIKLPKYSLFELENGRKRMLASAGELQKGNELALPSKYVNFLYLASHYEKLKGSPEDNEQKQLFVEQHKHYLDEIIEQISEFSKRVILADANLDKVLSAYNKHRDKPIREQAENIIHLFTLTNLGAPAAFKYFDTTIDRKRYTSTKEVLDATLIHQSITGLYETRIDLSQLGGDGGGGGGSGGGGSGGGGSGGGGSGGGGSGGMDPLQLLQPLEAEIKGTKLKAHWNSGATITCVPEAFLEDERPIQTMLIKTIHGEKQQDVYYLTFKVQGRKVEAEVLASPYDYILLNPSDVPWLMKKPLQLTVLVPLHEYQERLLQQTALPKEQKELLQKLFLKYDALWQHWENQVGHRRIKPHNIATGTLAPRPQKQYPINPKAKPSIQIVIDDLLKQGVLIQQNSTMNTPVYPVPKPDGKWRMVLDYREVNKTIPLIAAQNQHSAGILSSIYRGKYKTTLDLTNGFWAHPITPESYWLTAFTWQGKQYCWTRLPQGFLNSPALFNADVVDLLKEIPNVQAYVDDIYISHDDPQEHLEQLEKIFSILLNAGYVVSLKKSEIAQREVEFLGFNITKEGRGLTDTFKQKLLNITPPKDLKQLQSILGKLNFARNFIPNYSELVKPLYTIVAPANGKFISWTEDNSNQLQHIISVLNQADNLEERNPETRLIIKVNSSPSAGYIRYYNEGSKRPIMYVNYIFSKAEAKFTQTEKLLTTMHKGLIKAMDLAMGQEILVYSPIVSMTKIQRTPLPERKALPVRWITWMTYLEDPRIQFHYDKSLPELQQIPNVTEDVIAKTKHPSEFAMVFYTDGSAIKHPDVNKSHSAGMGIAQVQFIPEYKIVHQWSIPLGDHTAQLAEIAAVEFACKKALKISGPVLIVTDSFYVAESANKELPYWKSNGFLNNKKKPLRHVSKWKSIAECLQLKPDIIIMHEKGHQQPMTTLHTEGNNLADKLATQGSYVVHAGKRTADGSEFEKRTADGSEFESPKKKAKVE

SEQ ID NO: 6195 - protein, 2101 aa, synthetic construct
MPAAKRVKLDGGDKKYSIGLDIGTNSVGWAVITDEYKVPSKKFKVLGNTDRHSIKKNLIGALLFDSGETAEATRLKRTARRRYTRRKNRICYLQEIFSNEMAKVDDSFFHRLEESFLVEEDKKHERHPIFGNIVDEVAYHEKYPTIYHLRKKLVDSTDKADLRLIYLALAHMIKFRGHFLIEGDLNPDNSDVDKLFIQLVQTYNQLFEENPINASGVDAKAILSARLSKSRRLENLIAQLPGEKKNGLFGNLIALSLGLTPNFKSNFDLAEDAKLQLSKDTYDDDLDNLLAQIGDQYADLFLAAKNLSDAILLSDILRVNTEITKAPLSASMIKRYDEHHQDLTLLKALVRQQLPEKYKEIFFDQSKNGYAGYIDGGASQEEFYKFIKPILEKMDGTEELLVKLNREDLLRKQRTFDNGSIPHQIHLGELHAILRRQEDFYPFLKDNREKIEKILTFRIPYYVGPLARGNSRFAWMTRKSEETITPWNFEEVVDKGASAQSFIERMTNFDKNLPNEKVLPKHSLLYEYFTVYNELTKVKYVTEGMRKPAFLSGEQKKAIVDLLFKTNRKVTVKQLKEDYFKKIECFDSVEISGVEDRFNASLGTYHDLLKIIKDKDFLDNEENEDILEDIVLTLTLFEDREMIEERLKTYAHLFDDKVMKQLKRRRYTGWGRLSRKLINGIRDKQSGKTILDFLKSDGFANRNFMQLIHDDSLTFKEDIQKAQVSGQGDSLHEHIANLAGSPAIKKGILQTVKVVDELVKVMGRHKPENIVIEMARENQTTQKGQKNSRERMKRIEEGIKELGSQILKEHPVENTQLQNEKLYLYYLQNGRDMYVDQELDINRLSDYDVDHIVPQSFLKDDSIDNKVLTRSDKARGKSDNVPSEEVVKKMKNYWRQLLNAKLITQRKFDNLTKAERGGLSELDKAGFIKRQLVETRQITKHVAQILDSRMNTKYDENDKLIREVKVITLKSKLVSDFRKDFQFYKVREINNYHHAHDAYLNAVVGTALIKKYPKLESEFVYGDYKVYDVRKMIAKSEQEIGKATAKYFFYSNIMNFFKTEITLANGEIRKRPLIETNGETGEIVWDKGRDFATVRKVLSMPQVNIVKKTEVQTGGFSKESILPKRNSDKLIARKKDWDPKKYGGFDSPTVAYSVLVVAKVEKGKSKKLKSVKELLGITIMERSSFEKNPIDFLEAKGYKEVKKDLIIKLPKYSLFELENGRKRMLASAGELQKGNELALPSKYVNFLYLASHYEKLKGSPEDNEQKQLFVEQHKHYLDEIIEQISEFSKRVILADANLDKVLSAYNKHRDKPIREQAENIIHLFTLTNLGAPAAFKYFDTTIDRKRYTSTKEVLDATLIHQSITGLYETRIDLSQLGGDGGGGGGSGGGGSGGGGSGGGGSGGGGSGGIPWLMKKPLQLTTLVPLQEYEERLLKQTMLTGSYKEKLQSLFLKYDALWQHWENQVGHRRIKPHHIATGTVNPRPQKQYPINPKAKASIQTVINDLLKQGVLIQQNSIMNTPVYPVPKPDGKWRMVLDYREVNKTIPLIAAQNQHSAGILSSIFRGKYKTTLDLSNGFWAHSITPESYWLTAFTWLGQQYCWTRLPQGFLNSPALFNADVVDLLKEVPNVQVYVDDIYISHDDPREHLEQLEKVFSLLLNAGYVVSLKKSEIAQHEVEFLGFNITKEGRGLTETFKQKLLNITPPRDLKQLQSILGKLNFARNFIPNFSELVKPLYNIIATAPGKYITWTTDNSQQLQNIISMLNSAENLEERNPEVRLIMKVNTSPSAGYIRFYNEFAKRPIMYLNYVYTKAEVKFTNTEKLLTTIHKGLIKALDLGMGQEILVYSPIVSMTKIQKTPLPERKALPIRWITWMSYLEDPRIQFHYDKTLPELQQVPTVTDDIIAKIKHPSEFSMVFYTDGSAIKHPNVNKSHNAGMGIAQVQFKPEFTVINTWSIPLGDHTAQLAEVAAVEFACKKALKIDGPVLIVTDSFYVAESVNKELPYWQSNGFFNNKKKPLKHVSKWKSIADCIQLKPDIIIIHEKGHQPTASTFHTEGNNLADKLATQGSYVVNAGKRTADGSEFEKRTADGSEFESPKKKAKVE

SEQ ID NO: 6196 - protein, 2190 aa, synthetic construct
MPAAKRVKLDGGDKKYSIGLDIGTNSVGWAVITDEYKVPSKKFKVLGNTDRHSIKKNLIGALLFDSGETAEATRLKRTARRRYTRRKNRICYLQEIFSNEMAKVDDSFFHRLEESFLVEEDKKHERHPIFGNIVDEVAYHEKYPTIYHLRKKLVDSTDKADLRLIYLALAHMIKFRGHFLIEGDLNPDNSDVDKLFIQLVQTYNQLFEENPINASGVDAKAILSARLSKSRRLENLIAQLPGEKKNGLFGNLIALSLGLTPNFKSNFDLAEDAKLQLSKDTYDDDLDNLLAQIGDQYADLFLAAKNLSDAILLSDILRVNTEITKAPLSASMIKRYDEHHQDLTLLKALVRQQLPEKYKEIFFDQSKNGYAGYIDGGASQEEFYKFIKPILEKMDGTEELLVKLNREDLLRKQRTFDNGSIPHQIHLGELHAILRRQEDFYPFLKDNREKIEKILTFRIPYYVGPLARGNSRFAWMTRKSEETITPWNFEEVVDKGASAQSFIERMTNFDKNLPNEKVLPKHSLLYEYFTVYNELTKVKYVTEGMRKPAFLSGEQKKAIVDLLFKTNRKVTVKQLKEDYFKKIECFDSVEISGVEDRFNASLGTYHDLLKIIKDKDFLDNEENEDILEDIVLTLTLFEDREMIEERLKTYAHLFDDKVMKQLKRRRYTGWGRLSRKLINGIRDKQSGKTILDFLKSDGFANRNFMQLIHDDSLTFKEDIQKAQVSGQGDSLHEHIANLAGSPAIKKGILQTVKVVDELVKVMGRHKPENIVIEMARENQTTQKGQKNSRERMKRIEEGIKELGSQILKEHPVENTQLQNEKLYLYYLQNGRDMYVDQELDINRLSDYDVDHIVPQSFLKDDSIDNKVLTRSDKARGKSDNVPSEEVVKKMKNYWRQLLNAKLITQRKFDNLTKAERGGLSELDKAGFIKRQLVETRQITKHVAQILDSRMNTKYDENDKLIREVKVITLKSKLVSDFRKDFQFYKVREINNYHHAHDAYLNAVVGTALIKKYPKLESEFVYGDYKVYDVRKMIAKSEQEIGKATAKYFFYSNIMNFFKTEITLANGEIRKRPLIETNGETGEIVWDKGRDFATVRKVLSMPQVNIVKKTEVQTGGFSKESILPKRNSDKLIARKKDWDPKKYGGFDSPTVAYSVLVVAKVEKGKSKKLKSVKELLGITIMERSSFEKNPIDFLEAKGYKEVKKDLIIKLPKYSLFELENGRKRMLASAGELQKGNELALPSKYVNFLYLASHYEKLKGSPEDNEQKQLFVEQHKHYLDEIIEQISEFSKRVILADANLDKVLSAYNKHRDKPIREQAENIIHLFTLTNLGAPAAFKYFDTTIDRKRYTSTKEVLDATLIHQSITGLYETRIDLSQLGGDGGGGGGSGGGGSGGGGSGGGGSGGGGSGGMDPLQLLQPLEAEIKGTKLKAHWNSGATITCVPQAFLEEEVPIKNIWIKTIHGEKEQPVYYLTFKIQGRKVEAEVISSPYDYILVSPSDIPWLMKKPLQLTTLVPLQEYEERLLKQTMLTGSYKEKLQSLFLKYDALWQHWENQVGHRRIKPHHIATGTVNPRPQKQYPINPKAKASIQTVINDLLKQGVLIQQNSIMNTPVYPVPKPDGKWRMVLDYREVNKTIPLIAAQNQHSAGILSSIFRGKYKTTLDLSNGFWAHSITPESYWLTAFTWLGQQYCWTRLPQGFLNSPALFNADVVDLLKEVPNVQVYVDDIYISHDDPREHLEQLEKVFSLLLNAGYVVSLKKSEIAQHEVEFLGFNITKEGRGLTETFKQKLLNITPPRDLKQLQSILGLLNFARNFIPNFSELVKPLYNIIATAPGKYITWTTDNSQQLQNIISMLNSAENLEERNPEVRLIMKVNTSPSAGYIRFYNEFAKRPIMYLNYVYTKAEVKFTNTEKLLTTIHKGLIKALDLGMGQEILVYSPIVSMTKIQKTPLPERKALPIRWITWMSYLEDPRIQFHYDKTLPELQQVPTVTDDIIAKIKHPSEFSMVFYTDGSAIKHPNVNKSHNAGMGIAQVQFKPEFTVINTWSIPLGDHTAQLAEVAAVEFACKKALKIDGPVLIVTDSFYVAESVNKELPYWQSNGFFNNKKKPLKHVSKWKSIADCIQLKPDIIIIHEKGHQPTASTFHTEGNNLADKLATQGSYVVNAGKRTADGSEFEKRTADGSEFESPKKKAKVE

SEQ ID NO: 6197 - protein, 2190 aa, synthetic construct
MPAAKRVKLDGGDKKYSIGLDIGTNSVGWAVITDEYKVPSKKFKVLGNTDRHSIKKNLIGALLFDSGETAEATRLKRTARRRYTRRKNRICYLQEIFSNEMAKVDDSFFHRLEESFLVEEDKKHERHPIFGNIVDEVAYHEKYPTIYHLRKKLVDSTDKADLRLIYLALAHMIKFRGHFLIEGDLNPDNSDVDKLFIQLVQTYNQLFEENPINASGVDAKAILSARLSKSRRLENLIAQLPGEKKNGLFGNLIALSLGLTPNFKSNFDLAEDAKLQLSKDTYDDDLDNLLAQIGDQYADLFLAAKNLSDAILLSDILRVNTEITKAPLSASMIKRYDEHHQDLTLLKALVRQQLPEKYKEIFFDQSKNGYAGYIDGGASQEEFYKFIKPILEKMDGTEELLVKLNREDLLRKQRTFDNGSIPHQIHLGELHAILRRQEDFYPFLKDNREKIEKILTFRIPYYVGPLARGNSRFAWMTRKSEETITPWNFEEVVDKGASAQSFIERMTNFDKNLPNEKVLPKHSLLYEYFTVYNELTKVKYVTEGMRKPAFLSGEQKKAIVDLLFKTNRKVTVKQLKEDYFKKIECFDSVEISGVEDRFNASLGTYHDLLKIIKDKDFLDNEENEDILEDIVLTLTLFEDREMIEERLKTYAHLFDDKVMKQLKRRRYTGWGRLSRKLINGIRDKQSGKTILDFLKSDGFANRNFMQLIHDDSLTFKEDIQKAQVSGQGDSLHEHIANLAGSPAIKKGILQTVKVVDELVKVMGRHKPENIVIEMARENQTTQKGQKNSRERMKRIEEGIKELGSQILKEHPVENTQLQNEKLYLYYLQNGRDMYVDQELDINRLSDYDVDHIVPQSFLKDDSIDNKVLTRSDKARGKSDNVPSEEVVKKMKNYWRQLLNAKLITQRKFDNLTKAERGGLSELDKAGFIKRQLVETRQITKHVAQILDSRMNTKYDENDKLIREVKVITLKSKLVSDFRKDFQFYKVREINNYHHAHDAYLNAVVGTALIKKYPKLESEFVYGDYKVYDVRKMIAKSEQEIGKATAKYFFYSNIMNFFKTEITLANGEIRKRPLIETNGETGEIVWDKGRDFATVRKVLSMPQVNIVKKTEVQTGGFSKESILPKRNSDKLIARKKDWDPKKYGGFDSPTVAYSVLVVAKVEKGKSKKLKSVKELLGITIMERSSFEKNPIDFLEAKGYKEVKKDLIIKLPKYSLFELENGRKRMLASAGELQKGNELALPSKYVNFLYLASHYEKLKGSPEDNEQKQLFVEQHKHYLDEIIEQISEFSKRVILADANLDKVLSAYNKHRDKPIREQAENIIHLFTLTNLGAPAAFKYFDTTIDRKRYTSTKEVLDATLIHQSITGLYETRIDLSQLGGDGGGGGGSGGGGSGGGGSGGGGSGGGGSGGMDPLQLLQPLEAEIKGTKLKAHWNSGATITCVPQAFLEEEVPIKNIWIKTIHGEKEQPVYYLTFKIQGRKVEAEVISSPYDYILVSPSDIPWLMKKPLQLTTLVPLQEYEERLLKQTMLTGSYKEKLQSLFLKYDALWQHWENQVGHRRIKPHHIATGTVNPRPQKQYPINPKAKASIQTVINDLLKQGVLIQQNSIMNTPVYPVPKPDGKWRMVLDYREVNKTIPLIAAQNQHSAGILSSIFRGKYKTTLDLSNGFWAHSITPESYWLTAFTWLGQQYCWTRLPQGFLNSPALFNADVVDLLKEVPNVQVYVDDIYISHDDPREHLEQLEKVFSLLLNAGYVVSLKKSEIAQHEVEFLGFNITKEGRGLTETFKQKLLNITPPRDLKQLQSILGKLNFARNFIPNFSELVKPLYNIIATAPGKYITWTTDNSQQLQNIISMLNSAENLEERNPEVRLIMKVNTSPSAGYIRFYNEFAKRPIMYLNYVYTKAEVKFTNTEKLLTTIHKGLIKALDLGMGQEILVYSPIVSMTKIQKTPLPERKALPIRWITWMSYLEDPRIQFHYDKTLPELQQVPTVTDDIIAKIKHPSEFSMVFYTDGSAIKHPNVNKSHNAGMGIAQVQFKPEFTVINTWSIPLGDHTAQLAEVAAVEFACKKALKIDGPVLIVTDSFYVAESVNKELPYWQSNGFFNNKKKPLKHVSKWKSIADCIQLKPDIIIIHEKGHQPTASTFHTEGNNLADKLATQGSYVVNAGKRTADGSEFEKRTADGSEFESPKKKAKVE

SEQ ID NO: 6198 - protein, 2108 aa, synthetic construct
MPAAKRVKLDGGDKKYSIGLDIGTNSVGWAVITDEYKVPSKKFKVLGNTDRHSIKKNLIGALLFDSGETAEATRLKRTARRRYTRRKNRICYLQEIFSNEMAKVDDSFFHRLEESFLVEEDKKHERHPIFGNIVDEVAYHEKYPTIYHLRKKLVDSTDKADLRLIYLALAHMIKFRGHFLIEGDLNPDNSDVDKLFIQLVQTYNQLFEENPINASGVDAKAILSARLSKSRRLENLIAQLPGEKKNGLFGNLIALSLGLTPNFKSNFDLAEDAKLQLSKDTYDDDLDNLLAQIGDQYADLFLAAKNLSDAILLSDILRVNTEITKAPLSASMIKRYDEHHQDLTLLKALVRQQLPEKYKEIFFDQSKNGYAGYIDGGASQEEFYKFIKPILEKMDGTEELLVKLNREDLLRKQRTFDNGSIPHQIHLGELHAILRRQEDFYPFLKDNREKIEKILTFRIPYYVGPLARGNSRFAWMTRKSEETITPWNFEEVVDKGASAQSFIERMTNFDKNLPNEKVLPKHSLLYEYFTVYNELTKVKYVTEGMRKPAFLSGEQKKAIVDLLFKTNRKVTVKQLKEDYFKKIECFDSVEISGVEDRFNASLGTYHDLLKIIKDKDFLDNEENEDILEDIVLTLTLFEDREMIEERLKTYAHLFDDKVMKQLKRRRYTGWGRLSRKLINGIRDKQSGKTILDFLKSDGFANRNFMQLIHDDSLTFKEDIQKAQVSGQGDSLHEHIANLAGSPAIKKGILQTVKVVDELVKVMGRHKPENIVIEMARENQTTQKGQKNSRERMKRIEEGIKELGSQILKEHPVENTQLQNEKLYLYYLQNGRDMYVDQELDINRLSDYDVDHIVPQSFLKDDSIDNKVLTRSDKARGKSDNVPSEEVVKKMKNYWRQLLNAKLITQRKFDNLTKAERGGLSELDKAGFIKRQLVETRQITKHVAQILDSRMNTKYDENDKLIREVKVITLKSKLVSDFRKDFQFYKVREINNYHHAHDAYLNAVVGTALIKKYPKLESEFVYGDYKVYDVRKMIAKSEQEIGKATAKYFFYSNIMNFFKTEITLANGEIRKRPLIETNGETGEIVWDKGRDFATVRKVLSMPQVNIVKKTEVQTGGFSKESILPKRNSDKLIARKKDWDPKKYGGFDSPTVAYSVLVVAKVEKGKSKKLKSVKELLGITIMERSSFEKNPIDFLEAKGYKEVKKDLIIKLPKYSLFELENGRKRMLASAGELQKGNELALPSKYVNFLYLASHYEKLKGSPEDNEQKQLFVEQHKHYLDEIIEQISEFSKRVILADANLDKVLSAYNKHRDKPIREQAENIIHLFTLTNLGAPAAFKYFDTTIDRKRYTSTKEVLDATLIHQSITGLYETRIDLSQLGGDGGGGGGSGGGGSGGGGSGGGGSGGGGSGGVLNLEEEYRLHEKPVPSSIDPSWLQLFPTVWAERAGMGLANQVPPVVVELRSGASPVAVRQYPMSKEAREGIRPHIQRFLDLGVLVPCQSPWNTPLLPVKKPGTNDYRPVQDLREINKRVQDIHPTVPNPYNLLSSLPPSHTWYSVLDLKDAFFCLKLHPNSQPLFAFEWRDPEKGNTGQLTWTRLPQGFKNSPTLFNEALHRDLAPFRALNPQVVLLQYVDDLLVAAPTYRDCKEGTQKLLQELSKLGYRVSAKKAQLCQKEVTYLGYLLKEGKRWLTPARKATVMKIPPPTTPRQVREFLGTAGFCRLWIPGFASLAAPLYPLTKPSIPFIWTEEHQKAFDRIKEALLSAPALALPDLTKPFTLYVDERAGVARGVLTQTLGPWRRPVAYLSKKLDPVASGWPTCLKAVAAVALLLKDADKLTLGQNVTVIASHSLESIVRQPPDRWMTNARMTHYQSLLLNERVSFAPPAVLNPATLLPVESEATPVHRCSEILAEETGTRRDLKDQPLPGVPAWYTDGSSFIAEGKRRAGAAIVDGKRTVWASSLPEGTSAQKAELVALTQALRLAEGKDINIYTDSRYAFATAHIHGAIYKQRGWLTSAGKDIKNKEEILALLEAIHLPKRVAIIHCPGHQKGNDPVATGNRRADEAAKQAALSTRVLAETTKPAGKRTADGSEFEKRTADGSEFESPKKKAKVE

SEQ ID NO: 6199 - protein, 2110 aa, synthetic construct
MPAAKRVKLDGGDKKYSIGLDIGTNSVGWAVITDEYKVPSKKFKVLGNTDRHSIKKNLIGALLFDSGETAEATRLKRTARRRYTRRKNRICYLQEIFSNEMAKVDDSFFHRLEESFLVEEDKKHERHPIFGNIVDEVAYHEKYPTIYHLRKKLVDSTDKADLRLIYLALAHMIKFRGHFLIEGDLNPDNSDVDKLFIQLVQTYNQLFEENPINASGVDAKAILSARLSKSRRLENLIAQLPGEKKNGLFGNLIALSLGLTPNFKSNFDLAEDAKLQLSKDTYDDDLDNLLAQIGDQYADLFLAAKNLSDAILLSDILRVNTEITKAPLSASMIKRYDEHHQDLTLLKALVRQQLPEKYKEIFFDQSKNGYAGYIDGGASQEEFYKFIKPILEKMDGTEELLVKLNREDLLRKQRTFDNGSIPHQIHLGELHAILRRQEDFYPFLKDNREKIEKILTFRIPYYVGPLARGNSRFAWMTRKSEETITPWNFEEVVDKGASAQSFIERMTNFDKNLPNEKVLPKHSLLYEYFTVYNELTKVKYVTEGMRKPAFLSGEQKKAIVDLLFKTNRKVTVKQLKEDYFKKIECFDSVEISGVEDRFNASLGTYHDLLKIIKDKDFLDNEENEDILEDIVLTLTLFEDREMIEERLKTYAHLFDDKVMKQLKRRRYTGWGRLSRKLINGIRDKQSGKTILDFLKSDGFANRNFMQLIHDDSLTFKEDIQKAQVSGQGDSLHEHIANLAGSPAIKKGILQTVKVVDELVKVMGRHKPENIVIEMARENQTTQKGQKNSRERMKRIEEGIKELGSQILKEHPVENTQLQNEKLYLYYLQNGRDMYVDQELDINRLSDYDVDHIVPQSFLKDDSIDNKVLTRSDKARGKSDNVPSEEVVKKMKNYWRQLLNAKLITQRKFDNLTKAERGGLSELDKAGFIKRQLVETRQITKHVAQILDSRMNTKYDENDKLIREVKVITLKSKLVSDFRKDFQFYKVREINNYHHAHDAYLNAVVGTALIKKYPKLESEFVYGDYKVYDVRKMIAKSEQEIGKATAKYFFYSNIMNFFKTEITLANGEIRKRPLIETNGETGEIVWDKGRDFATVRKVLSMPQVNIVKKTEVQTGGFSKESILPKRNSDKLIARKKDWDPKKYGGFDSPTVAYSVLVVAKVEKGKSKKLKSVKELLGITIMERSSFEKNPIDFLEAKGYKEVKKDLIIKLPKYSLFELENGRKRMLASAGELQKGNELALPSKYVNFLYLASHYEKLKGSPEDNEQKQLFVEQHKHYLDEIIEQISEFSKRVILADANLDKVLSAYNKHRDKPIREQAENIIHLFTLTNLGAPAAFKYFDTTIDRKRYTSTKEVLDATLIHQSITGLYETRIDLSQLGGDGGGGGGSGGGGSGGGGSGGGGSGGGGSGGTLNIEDEYRLHETSKEPDVPLGSTWLSDFPQAWAETGGMGLAVRQAPLIIPLKATSTPVSIKQYPMSQEARLGIKPHIQRLLDQGILVPCQSPWNTPLLPVKKPGTNDYRPVQDLREVNKRVEDIHPTVPNPYNLLSGLPPSHQWYTVLDLKDAFFCLRLHPTSQPLFAFEWRDPEMGISGQLTWTRLPQGFKNSPTLFNEALHRDLADFRIQHPDLILLQYVDDLLLAATSEQDCQRGTRALLQTLGNLGYRASAKKAQICQKQVKYLGYLLKEGQRWLTEARKETVMGQPTPKTPRQLREFLGTAGFCRLWIPGFAEMAAPLYPLTKPGTLFNWGPDQQKAYQEIKQALLTAPALGLPDLTKPFELFVDEKQGYAKGVLTQKLGPWRRPVAYLSKKLDPVAAGWPPCLRMVAAIAVLTKDAGKLTMGQPLVILAPHAVEALVKQPPDRWLSNARMTHYQAMLLDTDRVQFGPVVALNPATLLPLPEKEAPHDCLEILAETHGTRPDLTDQPIPDADYTWYTDGSSFLQEGQRRAGAAVTTETEVIWARALPAGTSAQRAELIALTQALKMAEGKKLNVYTDSRYAFATAHVHGEIYRRRGWLTSEGREIKNKNEILALLKALFLPKRLSIIHCPGHQKGNSAEARGNRMADQAAREAAMKAVLETSTLLAGKRTADGSEFEKRTADGSEFESPKKKAKVE

SEQ ID NO: 6200 - protein, 2117 aa, synthetic construct
MPAAKRVKLDGGDKKYSIGLDIGTNSVGWAVITDEYKVPSKKFKVLGNTDRHSIKKNLIGALLFDSGETAEATRLKRTARRRYTRRKNRICYLQEIFSNEMAKVDDSFFHRLEESFLVEEDKKHERHPIFGNIVDEVAYHEKYPTIYHLRKKLVDSTDKADLRLIYLALAHMIKFRGHFLIEGDLNPDNSDVDKLFIQLVQTYNQLFEENPINASGVDAKAILSARLSKSRRLENLIAQLPGEKKNGLFGNLIALSLGLTPNFKSNFDLAEDAKLQLSKDTYDDDLDNLLAQIGDQYADLFLAAKNLSDAILLSDILRVNTEITKAPLSASMIKRYDEHHQDLTLLKALVRQQLPEKYKEIFFDQSKNGYAGYIDGGASQEEFYKFIKPILEKMDGTEELLVKLNREDLLRKQRTFDNGSIPHQIHLGELHAILRRQEDFYPFLKDNREKIEKILTFRIPYYVGPLARGNSRFAWMTRKSEETITPWNFEEVVDKGASAQSFIERMTNFDKNLPNEKVLPKHSLLYEYFTVYNELTKVKYVTEGMRKPAFLSGEQKKAIVDLLFKTNRKVTVKQLKEDYFKKIECFDSVEISGVEDRFNASLGTYHDLLKIIKDKDFLDNEENEDILEDIVLTLTLFEDREMIEERLKTYAHLFDDKVMKQLKRRRYTGWGRLSRKLINGIRDKQSGKTILDFLKSDGFANRNFMQLIHDDSLTFKEDIQKAQVSGQGDSLHEHIANLAGSPAIKKGILQTVKVVDELVKVMGRHKPENIVIEMARENQTTQKGQKNSRERMKRIEEGIKELGSQILKEHPVENTQLQNEKLYLYYLQNGRDMYVDQELDINRLSDYDVDHIVPQSFLKDDSIDNKVLTRSDKARGKSDNVPSEEVVKKMKNYWRQLLNAKLITQRKFDNLTKAERGGLSELDKAGFIKRQLVETRQITKHVAQILDSRMNTKYDENDKLIREVKVITLKSKLVSDFRKDFQFYKVREINNYHHAHDAYLNAVVGTALIKKYPKLESEFVYGDYKVYDVRKMIAKSEQEIGKATAKYFFYSNIMNFFKTEITLANGEIRKRPLIETNGETGEIVWDKGRDFATVRKVLSMPQVNIVKKTEVQTGGFSKESILPKRNSDKLIARKKDWDPKKYGGFDSPTVAYSVLVVAKVEKGKSKKLKSVKELLGITIMERSSFEKNPIDFLEAKGYKEVKKDLIIKLPKYSLFELENGRKRMLASAGELQKGNELALPSKYVNFLYLASHYEKLKGSPEDNEQKQLFVEQHKHYLDEIIEQISEFSKRVILADANLDKVLSAYNKHRDKPIREQAENIIHLFTLTNLGAPAAFKYFDTTIDRKRYTSTKEVLDATLIHQSITGLYETRIDLSQLGGDGGGGGGSGGGGSGGGGSGGGGSGGGGSGGGGSGGTAPLEEEYRLFLEAPIQNVTLLEQWKREIPKVWAEINPPGLASTQAPIHVQLLSTALPVRVRQYPITLEAKRSLRETIRKFRAAGILRPVHSPWNTPLLPVRKSGTSEYRMVQDLREVNKRVETIHPTVPNPYTLLSLLPPDRIWYSVLDLKDAFFCIPLAPESQLIFAFEWADAEEGESGQLTWTRLPQGFKNSPTLFDEALNRDLQGFRLDHPSVSLLQYVDDLLIAADTQAACLSATRDLLMTLAELGYRVSGKKAQLCQEEVTYLGFKIHKGSRSLSNSRTQAILQIPVPKTKRQVREFLGTIGYCRLWIPGFAELAQPLYAATRGGNDPLVWGEKEEEAFQSLKLALTQPPALALPSLDKPFQLFVEETSGAAKGVLTQALGPWKRPVAYLSKRLDPVAAGWPRCLRAIAAAALLTREASKLTFGQDIEITSSHNLESLLRSPPDKWLTNARITQYQVLLLDPPRVRFKQTAALNPATLLPETDDTLPIHHCLDTLDSLTSTRPDLTDQPLAQAEATLFTDGSSYIRDGKRYAGAAVVTLDSVIWAEPLPIGTSAQKAELIALTKALEWSKDKSVNIYTDSRYAFATLHVHGMIYRERGLLTAGGKAIKNAPEILALLTAVWLPKRVAVMHCKGHQKDDAPTSTGNRRADEVAREVAIRPLSTQATISAGKRTADGSEFEKRTADGSEFESPKKKAKVE

SEQ ID NO: 6201 - protein, 2117 aa, synthetic construct
MPAAKRVKLDGGDKKYSIGLDIGTNSVGWAVITDEYKVPSKKFKVLGNTDRHSIKKNLIGALLFDSGETAEATRLKRTARRRYTRRKNRICYLQEIFSNEMAKVDDSFFHRLEESFLVEEDKKHERHPIFGNIVDEVAYHEKYPTIYHLRKKLVDSTDKADLRLIYLALAHMIKFRGHFLIEGDLNPDNSDVDKLFIQLVQTYNQLFEENPINASGVDAKAILSARLSKSRRLENLIAQLPGEKKNGLFGNLIALSLGLTPNFKSNFDLAEDAKLQLSKDTYDDDLDNLLAQIGDQYADLFLAAKNLSDAILLSDILRVNTEITKAPLSASMIKRYDEHHQDLTLLKALVRQQLPEKYKEIFFDQSKNGYAGYIDGGASQEEFYKFIKPILEKMDGTEELLVKLNREDLLRKQRTFDNGSIPHQIHLGELHAILRRQEDFYPFLKDNREKIEKILTFRIPYYVGPLARGNSRFAWMTRKSEETITPWNFEEVVDKGASAQSFIERMTNFDKNLPNEKVLPKHSLLYEYFTVYNELTKVKYVTEGMRKPAFLSGEQKKAIVDLLFKTNRKVTVKQLKEDYFKKIECFDSVEISGVEDRFNASLGTYHDLLKIIKDKDFLDNEENEDILEDIVLTLTLFEDREMIEERLKTYAHLFDDKVMKQLKRRRYTGWGRLSRKLINGIRDKQSGKTILDFLKSDGFANRNFMQLIHDDSLTFKEDIQKAQVSGQGDSLHEHIANLAGSPAIKKGILQTVKVVDELVKVMGRHKPENIVIEMARENQTTQKGQKNSRERMKRIEEGIKELGSQILKEHPVENTQLQNEKLYLYYLQNGRDMYVDQELDINRLSDYDVDHIVPQSFLKDDSIDNKVLTRSDKARGKSDNVPSEEVVKKMKNYWRQLLNAKLITQRKFDNLTKAERGGLSELDKAGFIKRQLVETRQITKHVAQILDSRMNTKYDENDKLIREVKVITLKSKLVSDFRKDFQFYKVREINNYHHAHDAYLNAVVGTALIKKYPKLESEFVYGDYKVYDVRKMIAKSEQEIGKATAKYFFYSNIMNFFKTEITLANGEIRKRPLIETNGETGEIVWDKGRDFATVRKVLSMPQVNIVKKTEVQTGGFSKESILPKRNSDKLIARKKDWDPKKYGGFDSPTVAYSVLVVAKVEKGKSKKLKSVKELLGITIMERSSFEKNPIDFLEAKGYKEVKKDLIIKLPKYSLFELENGRKRMLASAGELQKGNELALPSKYVNFLYLASHYEKLKGSPEDNEQKQLFVEQHKHYLDEIIEQISEFSKRVILADANLDKVLSAYNKHRDKPIREQAENIIHLFTLTNLGAPAAFKYFDTTIDRKRYTSTKEVLDATLIHQSITGLYETRIDLSQLGGDGGGGGGSGGGGSGGGGSGGGGSGGGGSGGGGSGGTAPLEEEYRLFLEAPIQNVTLLEQWKREIPKVWAEINPPGLASTQAPIHVQLLSTALPVRVRQYPITLEAKRSLRETIRKFRAAGILRPVHSPWNTPLLPVRKSGTSEYRMVQDLREVNKRVETIHPTVPNPYTLLSLLPPDRIWYSVLDLKDAFFCIPLAPESQLIFAFEWADAEEGESGQLTWTRLPQGFKNSPTLFNEALNRDLQGFRLDHPSVSLLQYVDDLLIAADTQAACLSATRDLLMTLAELGYRVSGKKAQLCQEEVTYLGFKIHKGSRSLSNSRTQAILQIPVPKTKRQVREFLGTIGYCRLWIPGFAELAQPLYAATRPGNDPLVWGEKEEEAFQSLKLALTQPPALALPSLDKPFQLFVEETSGAAKGVLTQALGPWKRPVAYLSKRLDPVAAGWPRCLRAIAAAALLTREASKLTFGQDIEITSSHNLESLLRSPPDKWLTNARITQYQVLLLDPPRVRFKQTAALNPATLLPETDDTLPIHHCLDTLDSLTSTRPDLTDQPLAQAEATLFTDGSSYIRDGKRYAGAAVVTLDSVIWAEPLPIGTSAQKAELIALTKALEWSKDKSVNIYTDSRYAFATLHVHGMIYRERGWLTAGGKAIKNAPEILALLTAVWLPKRVAVMHCKGHQKDDAPTSTGNRRADEVAREVAIRPLSTQATISAGKRTADGSEFEKRTADGSEFESPKKKAKVE

SEQ ID NO: 6202 - protein, 2121 aa, synthetic construct
MPAAKRVKLDGGDKKYSIGLDIGTNSVGWAVITDEYKVPSKKFKVLGNTDRHSIKKNLIGALLFDSGETAEATRLKRTARRRYTRRKNRICYLQEIFSNEMAKVDDSFFHRLEESFLVEEDKKHERHPIFGNIVDEVAYHEKYPTIYHLRKKLVDSTDKADLRLIYLALAHMIKFRGHFLIEGDLNPDNSDVDKLFIQLVQTYNQLFEENPINASGVDAKAILSARLSKSRRLENLIAQLPGEKKNGLFGNLIALSLGLTPNFKSNFDLAEDAKLQLSKDTYDDDLDNLLAQIGDQYADLFLAAKNLSDAILLSDILRVNTEITKAPLSASMIKRYDEHHQDLTLLKALVRQQLPEKYKEIFFDQSKNGYAGYIDGGASQEEFYKFIKPILEKMDGTEELLVKLNREDLLRKQRTFDNGSIPHQIHLGELHAILRRQEDFYPFLKDNREKIEKILTFRIPYYVGPLARGNSRFAWMTRKSEETITPWNFEEVVDKGASAQSFIERMTNFDKNLPNEKVLPKHSLLYEYFTVYNELTKVKYVTEGMRKPAFLSGEQKKAIVDLLFKTNRKVTVKQLKEDYFKKIECFDSVEISGVEDRFNASLGTYHDLLKIIKDKDFLDNEENEDILEDIVLTLTLFEDREMIEERLKTYAHLFDDKVMKQLKRRRYTGWGRLSRKLINGIRDKQSGKTILDFLKSDGFANRNFMQLIHDDSLTFKEDIQKAQVSGQGDSLHEHIANLAGSPAIKKGILQTVKVVDELVKVMGRHKPENIVIEMARENQTTQKGQKNSRERMKRIEEGIKELGSQILKEHPVENTQLQNEKLYLYYLQNGRDMYVDQELDINRLSDYDVDHIVPQSFLKDDSIDNKVLTRSDKARGKSDNVPSEEVVKKMKNYWRQLLNAKLITQRKFDNLTKAERGGLSELDKAGFIKRQLVETRQITKHVAQILDSRMNTKYDENDKLIREVKVITLKSKLVSDFRKDFQFYKVREINNYHHAHDAYLNAVVGTALIKKYPKLESEFVYGDYKVYDVRKMIAKSEQEIGKATAKYFFYSNIMNFFKTEITLANGEIRKRPLIETNGETGEIVWDKGRDFATVRKVLSMPQVNIVKKTEVQTGGFSKESILPKRNSDKLIARKKDWDPKKYGGFDSPTVAYSVLVVAKVEKGKSKKLKSVKELLGITIMERSSFEKNPIDFLEAKGYKEVKKDLIIKLPKYSLFELENGRKRMLASAGELQKGNELALPSKYVNFLYLASHYEKLKGSPEDNEQKQLFVEQHKHYLDEIIEQISEFSKRVILADANLDKVLSAYNKHRDKPIREQAENIIHLFTLTNLGAPAAFKYFDTTIDRKRYTSTKEVLDATLIHQSITGLYETRIDLSQLGGDGGGGGGSGGGGSGGGGSGGGGSGGGGSGGGGSGGTVSLQDEHRLFDIPVTTSLPDVWLQDFPQAWAETGGLGRAKCQAPIIIDLKPTAVPVSIKQYPMSLEAHMGIRQHIIKFLELGVLRPCRSPWNTPLLPVKKPGTQDYRPVQDLREINKRTVDIHPTVPNPYNLLSTLKPDYSWYTVLDLKDAFFCLPLAPQSQELFAFEWKDPERGISGQLTWTRLPQGFKNSPTLFDEALHRDLTDFRTQHPEVTLLQYVDDLLLAAPTKKACTQGTRHLLQELGEKGYRASAKKAQICQTKVTYLGYILSEGKRWLTPGRIETVARIPPPRNPREVREFLGTAGFCRLWIPGFAELAAPLYALTKESTPFTWQTEHQLAFEALKKALLSAPALGLPDTSKPFTLFLDERQGIAKGVLTQKLGPWKRPVAYLSKKLDPVAAGWPPCLRIMAATAMLVKDSAKLTLGQPLTVITPHTLEAIVRQPPDRWITNARLTHYQALLLDTDRVQFGPPVTLNPATLLPVPENQPSPHDCRQVLAETHGTREDLKDQELPDADHTWYTDGSSYLDSGTRRAGAAVVDGHNTIWAQSLPPGTSAQKAELIALTKALELSKGKKANIYTDSRYAFATAHTHGSIYERRGLLTSEGKEIKNKAEIIALLKALFLPQEVAIIHCPGHQKGQDPVAVGNRQADRVARQAAMAEVLTLATEPDNTSHITAGKRTADGSEFEKRTADGSEFESPKKKAKVE

SEQ ID NO: 6203 - protein, 2121 aa, synthetic construct
MPAAKRVKLDGGDKKYSIGLDIGTNSVGWAVITDEYKVPSKKFKVLGNTDRHSIKKNLIGALLFDSGETAEATRLKRTARRRYTRRKNRICYLQEIFSNEMAKVDDSFFHRLEESFLVEEDKKHERHPIFGNIVDEVAYHEKYPTIYHLRKKLVDSTDKADLRLIYLALAHMIKFRGHFLIEGDLNPDNSDVDKLFIQLVQTYNQLFEENPINASGVDAKAILSARLSKSRRLENLIAQLPGEKKNGLFGNLIALSLGLTPNFKSNFDLAEDAKLQLSKDTYDDDLDNLLAQIGDQYADLFLAAKNLSDAILLSDILRVNTEITKAPLSASMIKRYDEHHQDLTLLKALVRQQLPEKYKEIFFDQSKNGYAGYIDGGASQEEFYKFIKPILEKMDGTEELLVKLNREDLLRKQRTFDNGSIPHQIHLGELHAILRRQEDFYPFLKDNREKIEKILTFRIPYYVGPLARGNSRFAWMTRKSEETITPWNFEEVVDKGASAQSFIERMTNFDKNLPNEKVLPKHSLLYEYFTVYNELTKVKYVTEGMRKPAFLSGEQKKAIVDLLFKTNRKVTVKQLKEDYFKKIECFDSVEISGVEDRFNASLGTYHDLLKIIKDKDFLDNEENEDILEDIVLTLTLFEDREMIEERLKTYAHLFDDKVMKQLKRRRYTGWGRLSRKLINGIRDKQSGKTILDFLKSDGFANRNFMQLIHDDSLTFKEDIQKAQVSGQGDSLHEHIANLAGSPAIKKGILQTVKVVDELVKVMGRHKPENIVIEMARENQTTQKGQKNSRERMKRIEEGIKELGSQILKEHPVENTQLQNEKLYLYYLQNGRDMYVDQELDINRLSDYDVDHIVPQSFLKDDSIDNKVLTRSDKARGKSDNVPSEEVVKKMKNYWRQLLNAKLITQRKFDNLTKAERGGLSELDKAGFIKRQLVETRQITKHVAQILDSRMNTKYDENDKLIREVKVITLKSKLVSDFRKDFQFYKVREINNYHHAHDAYLNAVVGTALIKKYPKLESEFVYGDYKVYDVRKMIAKSEQEIGKATAKYFFYSNIMNFFKTEITLANGEIRKRPLIETNGETGEIVWDKGRDFATVRKVLSMPQVNIVKKTEVQTGGFSKESILPKRNSDKLIARKKDWDPKKYGGFDSPTVAYSVLVVAKVEKGKSKKLKSVKELLGITIMERSSFEKNPIDFLEAKGYKEVKKDLIIKLPKYSLFELENGRKRMLASAGELQKGNELALPSKYVNFLYLASHYEKLKGSPEDNEQKQLFVEQHKHYLDEIIEQISEFSKRVILADANLDKVLSAYNKHRDKPIREQAENIIHLFTLTNLGAPAAFKYFDTTIDRKRYTSTKEVLDATLIHQSITGLYETRIDLSQLGGDGGGGGGSGGGGSGGGGSGGGGSGGGGSGGGGSGGTVSLQDEHRLFDIPVTTSLPDVWLQDFPQAWAETGGLGRAKCQAPIIIDLKPTAVPVSIKQYPMSLEAHMGIRQHIIKFLELGVLRPCRSPWNTPLLPVKKPGTQDYRPVQDLREINKRTVDIHPTVPNPYNLLSTLKPDYSWYTVLDLKDAFFCLPLAPQSQELFAFEWKDPERGISGQLTWTRLPQGFKNSPTLFNEALHRDLTDFRTQHPEVTLLQYVDDLLLAAPTKKACTQGTRHLLQELGEKGYRASAKKAQICQTKVTYLGYILSEGKRWLTPGRIETVARIPPPRNPREVREFLGTAGFCRLWIPGFAELAAPLYALTKPSTPFTWQTEHQLAFEALKKALLSAPALGLPDTSKPFTLFLDERQGIAKGVLTQKLGPWKRPVAYLSKKLDPVAAGWPPCLRIMAATAMLVKDSAKLTLGQPLTVITPHTLEAIVRQPPDRWITNARLTHYQALLLDTDRVQFGPPVTLNPATLLPVPENQPSPHDCRQVLAETHGTREDLKDQELPDADHTWYTDGSSYLDSGTRRAGAAVVDGHNTIWAQSLPPGTSAQKAELIALTKALELSKGKKANIYTDSRYAFATAHTHGSIYERRGWLTSEGKEIKNKAEIIALLKALFLPQEVAIIHCPGHQKGQDPVAVGNRQADRVARQAAMAEVLTLATEPDNTSHITAGKRTADGSEFEKRTADGSEFESPKKKAKVE

SEQ ID NO: 6204 - protein, 2106 aa, synthetic construct
MPAAKRVKLDGGDKKYSIGLDIGTNSVGWAVITDEYKVPSKKFKVLGNTDRHSIKKNLIGALLFDSGETAEATRLKRTARRRYTRRKNRICYLQEIFSNEMAKVDDSFFHRLEESFLVEEDKKHERHPIFGNIVDEVAYHEKYPTIYHLRKKLVDSTDKADLRLIYLALAHMIKFRGHFLIEGDLNPDNSDVDKLFIQLVQTYNQLFEENPINASGVDAKAILSARLSKSRRLENLIAQLPGEKKNGLFGNLIALSLGLTPNFKSNFDLAEDAKLQLSKDTYDDDLDNLLAQIGDQYADLFLAAKNLSDAILLSDILRVNTEITKAPLSASMIKRYDEHHQDLTLLKALVRQQLPEKYKEIFFDQSKNGYAGYIDGGASQEEFYKFIKPILEKMDGTEELLVKLNREDLLRKQRTFDNGSIPHQIHLGELHAILRRQEDFYPFLKDNREKIEKILTFRIPYYVGPLARGNSRFAWMTRKSEETITPWNFEEVVDKGASAQSFIERMTNFDKNLPNEKVLPKHSLLYEYFTVYNELTKVKYVTEGMRKPAFLSGEQKKAIVDLLFKTNRKVTVKQLKEDYFKKIECFDSVEISGVEDRFNASLGTYHDLLKIIKDKDFLDNEENEDILEDIVLTLTLFEDREMIEERLKTYAHLFDDKVMKQLKRRRYTGWGRLSRKLINGIRDKQSGKTILDFLKSDGFANRNFMQLIHDDSLTFKEDIQKAQVSGQGDSLHEHIANLAGSPAIKKGILQTVKVVDELVKVMGRHKPENIVIEMARENQTTQKGQKNSRERMKRIEEGIKELGSQILKEHPVENTQLQNEKLYLYYLQNGRDMYVDQELDINRLSDYDVDHIVPQSFLKDDSIDNKVLTRSDKARGKSDNVPSEEVVKKMKNYWRQLLNAKLITQRKFDNLTKAERGGLSELDKAGFIKRQLVETRQITKHVAQILDSRMNTKYDENDKLIREVKVITLKSKLVSDFRKDFQFYKVREINNYHHAHDAYLNAVVGTALIKKYPKLESEFVYGDYKVYDVRKMIAKSEQEIGKATAKYFFYSNIMNFFKTEITLANGEIRKRPLIETNGETGEIVWDKGRDFATVRKVLSMPQVNIVKKTEVQTGGFSKESILPKRNSDKLIARKKDWDPKKYGGFDSPTVAYSVLVVAKVEKGKSKKLKSVKELLGITIMERSSFEKNPIDFLEAKGYKEVKKDLIIKLPKYSLFELENGRKRMLASAGELQKGNELALPSKYVNFLYLASHYEKLKGSPEDNEQKQLFVEQHKHYLDEIIEQISEFSKRVILADANLDKVLSAYNKHRDKPIREQAENIIHLFTLTNLGAPAAFKYFDTTIDRKRYTSTKEVLDATLIHQSITGLYETRIDLSQLGGDGGGGGGSGGGGSGGGGSGGGGSGGGGSGGGGSGGVPWILKKPLELTIKLDLEEQQGTLLNNSILSKKGKEELKQLFEKYSALWQSWENQVGHRRIRPHKIATGTVKPTPQKQYHINPKAKPDIQIVINDLLKQGVLIQKESTMNTPVYPVPKPNGRWRMVLDYRAVNKVTPLIAVQNQHSYGILGSLFKGRYKTTIDLSNGFWAHPIVPEDYWITAFTWQGKQYCWTVLPQGFLNSPGLFNGDVVDLLQGIPNVEVYVDDVYISHDSEKEHLEYLDILFNRLKEAGYIISLKKSNIANSIVDFLGFQITNEGRGLTDTFKEKLENITAPTTLKQLQSILGLLNFARNFIPDFTELIAPLYALIPKSPKNYVPWQIEHSTTLETLITKLNGAEYLQGRKGDKTLIMKVNASYTTGYIRYYNEGEKKPISYVSIVFSKTELKFTELEKLLTTVHKGLLKALDLSMGQNIHVYSPIVSMQNIQKTPQTAKKALASRWLSWLSYLEDPRIRFFYDPQMPALKDLPAVDTGKDNKKHPSNFQHIFYTDGSAITSPTKEGHLNAGMGIVYFINKDGNLQKQQEWSISLGNHTAQFAEIAAFEFALKKCLPLGGNILVVTDSNYVAKAYNEELDVWASNGFVNNRKKPLKHISKWKSVADLKRLRPDVVVTHEPGHQKLDSSPHAYGNNLADQLATQASFKVHAGKRTADGSEFEKRTADGSEFESPKKKAKVE

SEQ ID NO: 6205 - protein, 2114 aa, synthetic construct
MPAAKRVKLDGGDKKYSIGLDIGTNSVGWAVITDEYKVPSKKFKVLGNTDRHSIKKNLIGALLFDSGETAEATRLKRTARRRYTRRKNRICYLQEIFSNEMAKVDDSFFHRLEESFLVEEDKKHERHPIFGNIVDEVAYHEKYPTIYHLRKKLVDSTDKADLRLIYLALAHMIKFRGHFLIEGDLNPDNSDVDKLFIQLVQTYNQLFEENPINASGVDAKAILSARLSKSRRLENLIAQLPGEKKNGLFGNLIALSLGLTPNFKSNFDLAEDAKLQLSKDTYDDDLDNLLAQIGDQYADLFLAAKNLSDAILLSDILRVNTEITKAPLSASMIKRYDEHHQDLTLLKALVRQQLPEKYKEIFFDQSKNGYAGYIDGGASQEEFYKFIKPILEKMDGTEELLVKLNREDLLRKQRTFDNGSIPHQIHLGELHAILRRQEDFYPFLKDNREKIEKILTFRIPYYVGPLARGNSRFAWMTRKSEETITPWNFEEVVDKGASAQSFIERMTNFDKNLPNEKVLPKHSLLYEYFTVYNELTKVKYVTEGMRKPAFLSGEQKKAIVDLLFKTNRKVTVKQLKEDYFKKIECFDSVEISGVEDRFNASLGTYHDLLKIIKDKDFLDNEENEDILEDIVLTLTLFEDREMIEERLKTYAHLFDDKVMKQLKRRRYTGWGRLSRKLINGIRDKQSGKTILDFLKSDGFANRNFMQLIHDDSLTFKEDIQKAQVSGQGDSLHEHIANLAGSPAIKKGILQTVKVVDELVKVMGRHKPENIVIEMARENQTTQKGQKNSRERMKRIEEGIKELGSQILKEHPVENTQLQNEKLYLYYLQNGRDMYVDQELDINRLSDYDVDHIVPQSFLKDDSIDNKVLTRSDKARGKSDNVPSEEVVKKMKNYWRQLLNAKLITQRKFDNLTKAERGGLSELDKAGFIKRQLVETRQITKHVAQILDSRMNTKYDENDKLIREVKVITLKSKLVSDFRKDFQFYKVREINNYHHAHDAYLNAVVGTALIKKYPKLESEFVYGDYKVYDVRKMIAKSEQEIGKATAKYFFYSNIMNFFKTEITLANGEIRKRPLIETNGETGEIVWDKGRDFATVRKVLSMPQVNIVKKTEVQTGGFSKESILPKRNSDKLIARKKDWDPKKYGGFDSPTVAYSVLVVAKVEKGKSKKLKSVKELLGITIMERSSFEKNPIDFLEAKGYKEVKKDLIIKLPKYSLFELENGRKRMLASAGELQKGNELALPSKYVNFLYLASHYEKLKGSPEDNEQKQLFVEQHKHYLDEIIEQISEFSKRVILADANLDKVLSAYNKHRDKPIREQAENIIHLFTLTNLGAPAAFKYFDTTIDRKRYTSTKEVLDATLIHQSITGLYETRIDLSQLGGDGGGGGGSGGGGSGGGGSGGGGSGGGGSGGGGSGGTLQLEEEYRLFEPESTQKQEMDIWLKNFPQAWAETGGMGTAHCQAPVLIQLKATATPISIRQYPMPHEAYQGIKPHIRRMLDQGILKPCQSPWNTPLLPVKKPGTEDYRPVQDLREVNKRVEDIHPTVPNPYNLLSTLPPSHPWYTVLDLKDAFFCLRLHSESQLLFAFEWRDPEIGLSGQLTWTRLPQGFKNSPTLFNEALHSDLADFRVRYPALVLLQYVDDLLLAAATRTECLEGTKALLETLGNKGYRASAKKAQICLQEVTYLGYSLKDGQRWLTKARKEAILSIPVPKNSRQVREFLGTAGYCRLWIPGFAELAAPLYPLTRPGTLFQWGTEQQLAFEDIKKALLSSPALGLPDITKPFELFIDENSGFAKGVLVQKLGPWKRPVAYLSKKLDTVASGWPPCLRMVAAIAILVKDAGKLTLGQPLTILTSHPVEALVRQPPNKWLSNARMTHYQAMLLDAERVHFGPTVSLNPATLLPLPSGGNHHDCLQILAETHGTRPDLTDQPLPDADLTWYTDGSSFIRNGEREAGAAVTTESEVIWAAPLPPGTSAQRAELIALTQALKMAEGKKLTVYTDSRYAFATTHVHGEIYRRRGWLTSEGKEIKNKNEILALLEALFLPKRLSIIHCPGHQKGDSPQAKGNRLADDTAKKAATETHSSLTVLPAGKRTADGSEFEKRTADGSEFESPKKKAKVE

SEQ ID NO: 6206 - protein, 2106 aa, synthetic construct
MPAAKRVKLDGGDKKYSIGLDIGTNSVGWAVITDEYKVPSKKFKVLGNTDRHSIKKNLIGALLFDSGETAEATRLKRTARRRYTRRKNRICYLQEIFSNEMAKVDDSFFHRLEESFLVEEDKKHERHPIFGNIVDEVAYHEKYPTIYHLRKKLVDSTDKADLRLIYLALAHMIKFRGHFLIEGDLNPDNSDVDKLFIQLVQTYNQLFEENPINASGVDAKAILSARLSKSRRLENLIAQLPGEKKNGLFGNLIALSLGLTPNFKSNFDLAEDAKLQLSKDTYDDDLDNLLAQIGDQYADLFLAAKNLSDAILLSDILRVNTEITKAPLSASMIKRYDEHHQDLTLLKALVRQQLPEKYKEIFFDQSKNGYAGYIDGGASQEEFYKFIKPILEKMDGTEELLVKLNREDLLRKQRTFDNGSIPHQIHLGELHAILRRQEDFYPFLKDNREKIEKILTFRIPYYVGPLARGNSRFAWMTRKSEETITPWNFEEVVDKGASAQSFIERMTNFDKNLPNEKVLPKHSLLYEYFTVYNELTKVKYVTEGMRKPAFLSGEQKKAIVDLLFKTNRKVTVKQLKEDYFKKIECFDSVEISGVEDRFNASLGTYHDLLKIIKDKDFLDNEENEDILEDIVLTLTLFEDREMIEERLKTYAHLFDDKVMKQLKRRRYTGWGRLSRKLINGIRDKQSGKTILDFLKSDGFANRNFMQLIHDDSLTFKEDIQKAQVSGQGDSLHEHIANLAGSPAIKKGILQTVKVVDELVKVMGRHKPENIVIEMARENQTTQKGQKNSRERMKRIEEGIKELGSQILKEHPVENTQLQNEKLYLYYLQNGRDMYVDQELDINRLSDYDVDHIVPQSFLKDDSIDNKVLTRSDKARGKSDNVPSEEVVKKMKNYWRQLLNAKLITQRKFDNLTKAERGGLSELDKAGFIKRQLVETRQITKHVAQILDSRMNTKYDENDKLIREVKVITLKSKLVSDFRKDFQFYKVREINNYHHAHDAYLNAVVGTALIKKYPKLESEFVYGDYKVYDVRKMIAKSEQEIGKATAKYFFYSNIMNFFKTEITLANGEIRKRPLIETNGETGEIVWDKGRDFATVRKVLSMPQVNIVKKTEVQTGGFSKESILPKRNSDKLIARKKDWDPKKYGGFDSPTVAYSVLVVAKVEKGKSKKLKSVKELLGITIMERSSFEKNPIDFLEAKGYKEVKKDLIIKLPKYSLFELENGRKRMLASAGELQKGNELALPSKYVNFLYLASHYEKLKGSPEDNEQKQLFVEQHKHYLDEIIEQISEFSKRVILADANLDKVLSAYNKHRDKPIREQAENIIHLFTLTNLGAPAAFKYFDTTIDRKRYTSTKEVLDATLIHQSITGLYETRIDLSQLGGDGGGGGGSGGGGSGGGGSGGGGSGGGGSGGGGSGGVPWLTQQPLQLTILVPLQEYQEKILSKTALPEDQKQQLKTLFVKYDNLWQHWENQVGHRKIRPHNIATGDYPPRPQKQYPINPKAKPSIQIVIDDLLKQGVLTPQNSTMNTPVYPVPKPDGRWRMVLDYREVNKTIPLTAAQNQHSAGILATIVRQKYKTTLDLANGFWAHPITPESYWLTAFTWQGKQYCWTRLPQGFLNSPALFNADVVDLLKEIPNVQVYVDDIYLSHDDPKEHVQQLEKVFQILLQAGYVVSLKKSEIGQKTVEFLGFNITKEGRGLTDTFKTKLLNITPPKDLKQLQSILGLLNFARNFIPNFAELVQPLYNLIAPAKGKYIEWSEENTKQLNMVIEALNTASNLEERLPEQRLVIKVNTSPSAGYVRYYNETGKKPIMYLNYVFSKAELKFSMLEKLLTTMHKALIKAMDLAMGQEILVYSPIVSMTKIQKTPLPERKALPIRWITWMTYLEDPRIQFHYDKTLPELKHIPDVYTSSQSPVKHPSQYEGVFYTDGSAIKSPDPTKSNNAGMGIVHATYKPEYQVLNQWSIPLGNHTAQMAEIAAVEFACKKALKIPGPVLVITDSFYVAESANKELPYWKSNGFVNNKKKPLKHISKWKSIAECLSMKPDITIQHEKGISLQIPVFILKGNALADKLATQGSYVVNAGKRTADGSEFEKRTADGSEFESPKKKAKVE

SEQ ID NO: 6207 - protein, 2106 aa, synthetic construct
MPAAKRVKLDGGDKKYSIGLDIGTNSVGWAVITDEYKVPSKKFKVLGNTDRHSIKKNLIGALLFDSGETAEATRLKRTARRRYTRRKNRICYLQEIFSNEMAKVDDSFFHRLEESFLVEEDKKHERHPIFGNIVDEVAYHEKYPTIYHLRKKLVDSTDKADLRLIYLALAHMIKFRGHFLIEGDLNPDNSDVDKLFIQLVQTYNQLFEENPINASGVDAKAILSARLSKSRRLENLIAQLPGEKKNGLFGNLIALSLGLTPNFKSNFDLAEDAKLQLSKDTYDDDLDNLLAQIGDQYADLFLAAKNLSDAILLSDILRVNTEITKAPLSASMIKRYDEHHQDLTLLKALVRQQLPEKYKEIFFDQSKNGYAGYIDGGASQEEFYKFIKPILEKMDGTEELLVKLNREDLLRKQRTFDNGSIPHQIHLGELHAILRRQEDFYPFLKDNREKIEKILTFRIPYYVGPLARGNSRFAWMTRKSEETITPWNFEEVVDKGASAQSFIERMTNFDKNLPNEKVLPKHSLLYEYFTVYNELTKVKYVTEGMRKPAFLSGEQKKAIVDLLFKTNRKVTVKQLKEDYFKKIECFDSVEISGVEDRFNASLGTYHDLLKIIKDKDFLDNEENEDILEDIVLTLTLFEDREMIEERLKTYAHLFDDKVMKQLKRRRYTGWGRLSRKLINGIRDKQSGKTILDFLKSDGFANRNFMQLIHDDSLTFKEDIQKAQVSGQGDSLHEHIANLAGSPAIKKGILQTVKVVDELVKVMGRHKPENIVIEMARENQTTQKGQKNSRERMKRIEEGIKELGSQILKEHPVENTQLQNEKLYLYYLQNGRDMYVDQELDINRLSDYDVDHIVPQSFLKDDSIDNKVLTRSDKARGKSDNVPSEEVVKKMKNYWRQLLNAKLITQRKFDNLTKAERGGLSELDKAGFIKRQLVETRQITKHVAQILDSRMNTKYDENDKLIREVKVITLKSKLVSDFRKDFQFYKVREINNYHHAHDAYLNAVVGTALIKKYPKLESEFVYGDYKVYDVRKMIAKSEQEIGKATAKYFFYSNIMNFFKTEITLANGEIRKRPLIETNGETGEIVWDKGRDFATVRKVLSMPQVNIVKKTEVQTGGFSKESILPKRNSDKLIARKKDWDPKKYGGFDSPTVAYSVLVVAKVEKGKSKKLKSVKELLGITIMERSSFEKNPIDFLEAKGYKEVKKDLIIKLPKYSLFELENGRKRMLASAGELQKGNELALPSKYVNFLYLASHYEKLKGSPEDNEQKQLFVEQHKHYLDEIIEQISEFSKRVILADANLDKVLSAYNKHRDKPIREQAENIIHLFTLTNLGAPAAFKYFDTTIDRKRYTSTKEVLDATLIHQSITGLYETRIDLSQLGGDGGGGGGSGGGGSGGGGSGGGGSGGGGSGGGGSGGVPWLTQQPLQLTILVPLQEYQEKILSKTALPEDQKQQLKTLFVKYDNLWQHWENQVGHRKIRPHNIATGDYPPRPQKQYPINPKAKPSIQIVIDDLLKQGVLTPQNSTMNTPVYPVPKPDGRWRMVLDYREVNKTIPLTAAQNQHSAGILATIVRQKYKTTLDLANGFWAHPITPESYWLTAFTWQGKQYCWTRLPQGFLNSPALFNADVVDLLKEIPNVQVYVDDIYLSHDDPKEHVQQLEKVFQILLQAGYVVSLKKSEIGQKTVEFLGFNITKEGRGLTDTFKTKLLNITPPKDLKQLQSILGKLNFARNFIPNFAELVQPLYNLIAPAKGKYIEWSEENTKQLNMVIEALNTASNLEERLPEQRLVIKVNTSPSAGYVRYYNETGKKPIMYLNYVFSKAELKFSMLEKLLTTMHKALIKAMDLAMGQEILVYSPIVSMTKIQKTPLPERKALPIRWITWMTYLEDPRIQFHYDKTLPELKHIPDVYTSSQSPVKHPSQYEGVFYTDGSAIKSPDPTKSNNAGMGIVHATYKPEYQVLNQWSIPLGNHTAQMAEIAAVEFACKKALKIPGPVLVITDSFYVAESANKELPYWKSNGFVNNKKKPLKHISKWKSIAECLSMKPDITIQHEKGISLQIPVFILKGNALADKLATQGSYVVNAGKRTADGSEFEKRTADGSEFESPKKKAKVE

SEQ ID NO: 6208 - protein, 2195 aa, synthetic construct
MPAAKRVKLDGGDKKYSIGLDIGTNSVGWAVITDEYKVPSKKFKVLGNTDRHSIKKNLIGALLFDSGETAEATRLKRTARRRYTRRKNRICYLQEIFSNEMAKVDDSFFHRLEESFLVEEDKKHERHPIFGNIVDEVAYHEKYPTIYHLRKKLVDSTDKADLRLIYLALAHMIKFRGHFLIEGDLNPDNSDVDKLFIQLVQTYNQLFEENPINASGVDAKAILSARLSKSRRLENLIAQLPGEKKNGLFGNLIALSLGLTPNFKSNFDLAEDAKLQLSKDTYDDDLDNLLAQIGDQYADLFLAAKNLSDAILLSDILRVNTEITKAPLSASMIKRYDEHHQDLTLLKALVRQQLPEKYKEIFFDQSKNGYAGYIDGGASQEEFYKFIKPILEKMDGTEELLVKLNREDLLRKQRTFDNGSIPHQIHLGELHAILRRQEDFYPFLKDNREKIEKILTFRIPYYVGPLARGNSRFAWMTRKSEETITPWNFEEVVDKGASAQSFIERMTNFDKNLPNEKVLPKHSLLYEYFTVYNELTKVKYVTEGMRKPAFLSGEQKKAIVDLLFKTNRKVTVKQLKEDYFKKIECFDSVEISGVEDRFNASLGTYHDLLKIIKDKDFLDNEENEDILEDIVLTLTLFEDREMIEERLKTYAHLFDDKVMKQLKRRRYTGWGRLSRKLINGIRDKQSGKTILDFLKSDGFANRNFMQLIHDDSLTFKEDIQKAQVSGQGDSLHEHIANLAGSPAIKKGILQTVKVVDELVKVMGRHKPENIVIEMARENQTTQKGQKNSRERMKRIEEGIKELGSQILKEHPVENTQLQNEKLYLYYLQNGRDMYVDQELDINRLSDYDVDHIVPQSFLKDDSIDNKVLTRSDKARGKSDNVPSEEVVKKMKNYWRQLLNAKLITQRKFDNLTKAERGGLSELDKAGFIKRQLVETRQITKHVAQILDSRMNTKYDENDKLIREVKVITLKSKLVSDFRKDFQFYKVREINNYHHAHDAYLNAVVGTALIKKYPKLESEFVYGDYKVYDVRKMIAKSEQEIGKATAKYFFYSNIMNFFKTEITLANGEIRKRPLIETNGETGEIVWDKGRDFATVRKVLSMPQVNIVKKTEVQTGGFSKESILPKRNSDKLIARKKDWDPKKYGGFDSPTVAYSVLVVAKVEKGKSKKLKSVKELLGITIMERSSFEKNPIDFLEAKGYKEVKKDLIIKLPKYSLFELENGRKRMLASAGELQKGNELALPSKYVNFLYLASHYEKLKGSPEDNEQKQLFVEQHKHYLDEIIEQISEFSKRVILADANLDKVLSAYNKHRDKPIREQAENIIHLFTLTNLGAPAAFKYFDTTIDRKRYTSTKEVLDATLIHQSITGLYETRIDLSQLGGDGGGGGGSGGGGSGGGGSGGGGSGGGGSGGGGSGGMNPLQLLQPLPAEIKGTKLLAHWNSGATITCIPESFLEDEQPIKKTLIKTIHGEKQQNVYYVTFKVKGRKVEAEVIASPYEYILLSPTDVPWLTQQPLQLTILVPLQEYQEKILSKTALPEDQKQQLKTLFVKYDNLWQHWENQVGHRKIRPHNIATGDYPPRPQKQYPINPKAKPSIQIVIDDLLKQGVLTPQNSTMNTPVYPVPKPDGRWRMVLDYREVNKTIPLTAAQNQHSAGILATIVRQKYKTTLDLANGFWAHPITPESYWLTAFTWQGKQYCWTRLPQGFLNSPALFNADVVDLLKEIPNVQVYVDDIYLSHDDPKEHVQQLEKVFQILLQAGYVVSLKKSEIGQKTVEFLGFNITKEGRGLTDTFKTKLLNITPPKDLKQLQSILGLLNFARNFIPNFAELVQPLYNLIAPAKGKYIEWSEENTKQLNMVIEALNTASNLEERLPEQRLVIKVNTSPSAGYVRYYNETGKKPIMYLNYVFSKAELKFSMLEKLLTTMHKALIKAMDLAMGQEILVYSPIVSMTKIQKTPLPERKALPIRWITWMTYLEDPRIQFHYDKTLPELKHIPDVYTSSQSPVKHPSQYEGVFYTDGSAIKSPDPTKSNNAGMGIVHATYKPEYQVLNQWSIPLGNHTAQMAEIAAVEFACKKALKIPGPVLVITDSFYVAESANKELPYWKSNGFVNNKKKPLKHISKWKSIAECLSMKPDITIQHEKGISLQIPVFILKGNALADKLATQGSYVVNAGKRTADGSEFEKRTADGSEFESPKKKAKVE

SEQ ID NO: 6209 - protein, 2195 aa, synthetic construct
MPAAKRVKLDGGDKKYSIGLDIGTNSVGWAVITDEYKVPSKKFKVLGNTDRHSIKKNLIGALLFDSGETAEATRLKRTARRRYTRRKNRICYLQEIFSNEMAKVDDSFFHRLEESFLVEEDKKHERHPIFGNIVDEVAYHEKYPTIYHLRKKLVDSTDKADLRLIYLALAHMIKFRGHFLIEGDLNPDNSDVDKLFIQLVQTYNQLFEENPINASGVDAKAILSARLSKSRRLENLIAQLPGEKKNGLFGNLIALSLGLTPNFKSNFDLAEDAKLQLSKDTYDDDLDNLLAQIGDQYADLFLAAKNLSDAILLSDILRVNTEITKAPLSASMIKRYDEHHQDLTLLKALVRQQLPEKYKEIFFDQSKNGYAGYIDGGASQEEFYKFIKPILEKMDGTEELLVKLNREDLLRKQRTFDNGSIPHQIHLGELHAILRRQEDFYPFLKDNREKIEKILTFRIPYYVGPLARGNSRFAWMTRKSEETITPWNFEEVVDKGASAQSFIERMTNFDKNLPNEKVLPKHSLLYEYFTVYNELTKVKYVTEGMRKPAFLSGEQKKAIVDLLFKTNRKVTVKQLKEDYFKKIECFDSVEISGVEDRFNASLGTYHDLLKIIKDKDFLDNEENEDILEDIVLTLTLFEDREMIEERLKTYAHLFDDKVMKQLKRRRYTGWGRLSRKLINGIRDKQSGKTILDFLKSDGFANRNFMQLIHDDSLTFKEDIQKAQVSGQGDSLHEHIANLAGSPAIKKGILQTVKVVDELVKVMGRHKPENIVIEMARENQTTQKGQKNSRERMKRIEEGIKELGSQILKEHPVENTQLQNEKLYLYYLQNGRDMYVDQELDINRLSDYDVDHIVPQSFLKDDSIDNKVLTRSDKARGKSDNVPSEEVVKKMKNYWRQLLNAKLITQRKFDNLTKAERGGLSELDKAGFIKRQLVETRQITKHVAQILDSRMNTKYDENDKLIREVKVITLKSKLVSDFRKDFQFYKVREINNYHHAHDAYLNAVVGTALIKKYPKLESEFVYGDYKVYDVRKMIAKSEQEIGKATAKYFFYSNIMNFFKTEITLANGEIRKRPLIETNGETGEIVWDKGRDFATVRKVLSMPQVNIVKKTEVQTGGFSKESILPKRNSDKLIARKKDWDPKKYGGFDSPTVAYSVLVVAKVEKGKSKKLKSVKELLGITIMERSSFEKNPIDFLEAKGYKEVKKDLIIKLPKYSLFELENGRKRMLASAGELQKGNELALPSKYVNFLYLASHYEKLKGSPEDNEQKQLFVEQHKHYLDEIIEQISEFSKRVILADANLDKVLSAYNKHRDKPIREQAENIIHLFTLTNLGAPAAFKYFDTTIDRKRYTSTKEVLDATLIHQSITGLYETRIDLSQLGGDGGGGGGSGGGGSGGGGSGGGGSGGGGSGGGGSGGMNPLQLLQPLPAEIKGTKLLAHWNSGATITCIPESFLEDEQPIKKTLIKTIHGEKQQNVYYVTFKVKGRKVEAEVIASPYEYILLSPTDVPWLTQQPLQLTILVPLQEYQEKILSKTALPEDQKQQLKTLFVKYDNLWQHWENQVGHRKIRPHNIATGDYPPRPQKQYPINPKAKPSIQIVIDDLLKQGVLTPQNSTMNTPVYPVPKPDGRWRMVLDYREVNKTIPLTAAQNQHSAGILATIVRQKYKTTLDLANGFWAHPITPESYWLTAFTWQGKQYCWTRLPQGFLNSPALFNADVVDLLKEIPNVQVYVDDIYLSHDDPKEHVQQLEKVFQILLQAGYVVSLKKSEIGQKTVEFLGFNITKEGRGLTDTFKTKLLNITPPKDLKQLQSILGKLNFARNFIPNFAELVQPLYNLIAPAKGKYIEWSEENTKQLNMVIEALNTASNLEERLPEQRLVIKVNTSPSAGYVRYYNETGKKPIMYLNYVFSKAELKFSMLEKLLTTMHKALIKAMDLAMGQEILVYSPIVSMTKIQKTPLPERKALPIRWITWMTYLEDPRIQFHYDKTLPELKHIPDVYTSSQSPVKHPSQYEGVFYTDGSAIKSPDPTKSNNAGMGIVHATYKPEYQVLNQWSIPLGNHTAQMAEIAAVEFACKKALKIPGPVLVITDSFYVAESANKELPYWKSNGFVNNKKKPLKHISKWKSIAECLSMKPDITIQHEKGISLQIPVFILKGNALADKLATQGSYVVNAGKRTADGSEFEKRTADGSEFESPKKKAKVE

SEQ ID NO: 6210 - protein, 2113 aa, synthetic construct
MPAAKRVKLDGGDKKYSIGLDIGTNSVGWAVITDEYKVPSKKFKVLGNTDRHSIKKNLIGALLFDSGETAEATRLKRTARRRYTRRKNRICYLQEIFSNEMAKVDDSFFHRLEESFLVEEDKKHERHPIFGNIVDEVAYHEKYPTIYHLRKKLVDSTDKADLRLIYLALAHMIKFRGHFLIEGDLNPDNSDVDKLFIQLVQTYNQLFEENPINASGVDAKAILSARLSKSRRLENLIAQLPGEKKNGLFGNLIALSLGLTPNFKSNFDLAEDAKLQLSKDTYDDDLDNLLAQIGDQYADLFLAAKNLSDAILLSDILRVNTEITKAPLSASMIKRYDEHHQDLTLLKALVRQQLPEKYKEIFFDQSKNGYAGYIDGGASQEEFYKFIKPILEKMDGTEELLVKLNREDLLRKQRTFDNGSIPHQIHLGELHAILRRQEDFYPFLKDNREKIEKILTFRIPYYVGPLARGNSRFAWMTRKSEETITPWNFEEVVDKGASAQSFIERMTNFDKNLPNEKVLPKHSLLYEYFTVYNELTKVKYVTEGMRKPAFLSGEQKKAIVDLLFKTNRKVTVKQLKEDYFKKIECFDSVEISGVEDRFNASLGTYHDLLKIIKDKDFLDNEENEDILEDIVLTLTLFEDREMIEERLKTYAHLFDDKVMKQLKRRRYTGWGRLSRKLINGIRDKQSGKTILDFLKSDGFANRNFMQLIHDDSLTFKEDIQKAQVSGQGDSLHEHIANLAGSPAIKKGILQTVKVVDELVKVMGRHKPENIVIEMARENQTTQKGQKNSRERMKRIEEGIKELGSQILKEHPVENTQLQNEKLYLYYLQNGRDMYVDQELDINRLSDYDVDHIVPQSFLKDDSIDNKVLTRSDKARGKSDNVPSEEVVKKMKNYWRQLLNAKLITQRKFDNLTKAERGGLSELDKAGFIKRQLVETRQITKHVAQILDSRMNTKYDENDKLIREVKVITLKSKLVSDFRKDFQFYKVREINNYHHAHDAYLNAVVGTALIKKYPKLESEFVYGDYKVYDVRKMIAKSEQEIGKATAKYFFYSNIMNFFKTEITLANGEIRKRPLIETNGETGEIVWDKGRDFATVRKVLSMPQVNIVKKTEVQTGGFSKESILPKRNSDKLIARKKDWDPKKYGGFDSPTVAYSVLVVAKVEKGKSKKLKSVKELLGITIMERSSFEKNPIDFLEAKGYKEVKKDLIIKLPKYSLFELENGRKRMLASAGELQKGNELALPSKYVNFLYLASHYEKLKGSPEDNEQKQLFVEQHKHYLDEIIEQISEFSKRVILADANLDKVLSAYNKHRDKPIREQAENIIHLFTLTNLGAPAAFKYFDTTIDRKRYTSTKEVLDATLIHQSITGLYETRIDLSQLGGDGGGGGGSGGGGSGGGGSGGGGSGGGGSGGGGSGGVLNLEEEYRLHEKPVPSSIDPSWLQLFPTVWAERAGMGLANQVPPVVVELRSGASPVAVRQYPMSKEAREGIRPHIQKFLDLGVLVPCRSPWNTPLLPVKKPGTNDYRPVQDLREINKRVQDIHPTVPNPYNLLSSLPPSYTWYSVLDLKDAFFCLRLHPNSQPLFAFEWKDPEKGNTGQLTWTRLPQGFKNSPTLFDEALHRDLAPFRALNPQVVLLQYVDDLLVAAPTYEDCKKGTQKLLQELSKLGYRVSAKKAQLCQREVTYLGYLLKEGKRWLTPARKATVMKIPVPTTPRQVREFLGTAGFCRLWIPGFASLAAPLYPLTKESIPFIWTEEHQQAFDHIKKALLSAPALALPDLTKPFTLYIDERAGVARGVLTQTLGPWRRPVAYLSKKLDPVASGWPTCLKAVAAVALLLKDADKLTLGQNVTVIASHSLESIVRQPPDRWMTNARMTHYQSLLLNERVSFAPPAVLNPATLLPVESEATPVHRCSEILAEETGTRRDLEDQPLPGVPTWYTDGSSFITEGKRRAGAPIVDGKRTVWASSLPEGTSAQKAELVALTQALRLAEGKNINIYTDSRYAFATAHIHGAIYKQRGLLTSAGKDIKNKEEILALLEAIHLPRRVAIIHCPGHQRGSNPVATGNRRADEAAKQAALSTRVLAGTTKPAGKRTADGSEFEKRTADGSEFESPKKKAKVE

SEQ ID NO: 6211 - protein, 2113 aa, synthetic construct
MPAAKRVKLDGGDKKYSIGLDIGTNSVGWAVITDEYKVPSKKFKVLGNTDRHSIKKNLIGALLFDSGETAEATRLKRTARRRYTRRKNRICYLQEIFSNEMAKVDDSFFHRLEESFLVEEDKKHERHPIFGNIVDEVAYHEKYPTIYHLRKKLVDSTDKADLRLIYLALAHMIKFRGHFLIEGDLNPDNSDVDKLFIQLVQTYNQLFEENPINASGVDAKAILSARLSKSRRLENLIAQLPGEKKNGLFGNLIALSLGLTPNFKSNFDLAEDAKLQLSKDTYDDDLDNLLAQIGDQYADLFLAAKNLSDAILLSDILRVNTEITKAPLSASMIKRYDEHHQDLTLLKALVRQQLPEKYKEIFFDQSKNGYAGYIDGGASQEEFYKFIKPILEKMDGTEELLVKLNREDLLRKQRTFDNGSIPHQIHLGELHAILRRQEDFYPFLKDNREKIEKILTFRIPYYVGPLARGNSRFAWMTRKSEETITPWNFEEVVDKGASAQSFIERMTNFDKNLPNEKVLPKHSLLYEYFTVYNELTKVKYVTEGMRKPAFLSGEQKKAIVDLLFKTNRKVTVKQLKEDYFKKIECFDSVEISGVEDRFNASLGTYHDLLKIIKDKDFLDNEENEDILEDIVLTLTLFEDREMIEERLKTYAHLFDDKVMKQLKRRRYTGWGRLSRKLINGIRDKQSGKTILDFLKSDGFANRNFMQLIHDDSLTFKEDIQKAQVSGQGDSLHEHIANLAGSPAIKKGILQTVKVVDELVKVMGRHKPENIVIEMARENQTTQKGQKNSRERMKRIEEGIKELGSQILKEHPVENTQLQNEKLYLYYLQNGRDMYVDQELDINRLSDYDVDHIVPQSFLKDDSIDNKVLTRSDKARGKSDNVPSEEVVKKMKNYWRQLLNAKLITQRKFDNLTKAERGGLSELDKAGFIKRQLVETRQITKHVAQILDSRMNTKYDENDKLIREVKVITLKSKLVSDFRKDFQFYKVREINNYHHAHDAYLNAVVGTALIKKYPKLESEFVYGDYKVYDVRKMIAKSEQEIGKATAKYFFYSNIMNFFKTEITLANGEIRKRPLIETNGETGEIVWDKGRDFATVRKVLSMPQVNIVKKTEVQTGGFSKESILPKRNSDKLIARKKDWDPKKYGGFDSPTVAYSVLVVAKVEKGKSKKLKSVKELLGITIMERSSFEKNPIDFLEAKGYKEVKKDLIIKLPKYSLFELENGRKRMLASAGELQKGNELALPSKYVNFLYLASHYEKLKGSPEDNEQKQLFVEQHKHYLDEIIEQISEFSKRVILADANLDKVLSAYNKHRDKPIREQAENIIHLFTLTNLGAPAAFKYFDTTIDRKRYTSTKEVLDATLIHQSITGLYETRIDLSQLGGDGGGGGGSGGGGSGGGGSGGGGSGGGGSGGGGSGGVLNLEEEYRLHEKPVPSSIDPSWLQLFPTVWAERAGMGLANQVPPVVVELRSGASPVAVRQYPMSKEAREGIRPHIQKFLDLGVLVPCRSPWNTPLLPVKKPGTNDYRPVQDLREINKRVQDIHPTVPNPYNLLSSLPPSYTWYSVLDLKDAFFCLRLHPNSQPLFAFEWKDPEKGNTGQLTWTRLPQGFKNSPTLFNEALHRDLAPFRALNPQVVLLQYVDDLLVAAPTYEDCKKGTQKLLQELSKLGYRVSAKKAQLCQREVTYLGYLLKEGKRWLTPARKATVMKIPVPTTPRQVREFLGKAGFCRLFIPGFASLAAPLYPLTKPSIPFIWTEEHQQAFDHIKKALLSAPALALPDLTKPFTLYIDERAGVARGVLTQTLGPWRRPVAYLSKKLDPVASGWPTCLKAVAAVALLLKDADKLTLGQNVTVIASHSLESIVRQPPDRWMTNARMTHYQSLLLNERVSFAPPAVLNPATLLPVESEATPVHRCSEILAEETGTRRDLEDQPLPGVPTWYTDGSSFITEGKRRAGAPIVDGKRTVWASSLPEGTSAQKAELVALTQALRLAEGKNINIYTDSRYAFATAHIHGAIYKQRGWLTSAGKDIKNKEEILALLEAIHLPRRVAIIHCPGHQRGSNPVATGNRRADEAAKQAALSTRVLAGTTKPAGKRTADGSEFEKRTADGSEFESPKKKAKVE

SEQ ID NO: 6212 - protein, 2146 aa, synthetic construct
MPAAKRVKLDGGDKKYSIGLDIGTNSVGWAVITDEYKVPSKKFKVLGNTDRHSIKKNLIGALLFDSGETAEATRLKRTARRRYTRRKNRICYLQEIFSNEMAKVDDSFFHRLEESFLVEEDKKHERHPIFGNIVDEVAYHEKYPTIYHLRKKLVDSTDKADLRLIYLALAHMIKFRGHFLIEGDLNPDNSDVDKLFIQLVQTYNQLFEENPINASGVDAKAILSARLSKSRRLENLIAQLPGEKKNGLFGNLIALSLGLTPNFKSNFDLAEDAKLQLSKDTYDDDLDNLLAQIGDQYADLFLAAKNLSDAILLSDILRVNTEITKAPLSASMIKRYDEHHQDLTLLKALVRQQLPEKYKEIFFDQSKNGYAGYIDGGASQEEFYKFIKPILEKMDGTEELLVKLNREDLLRKQRTFDNGSIPHQIHLGELHAILRRQEDFYPFLKDNREKIEKILTFRIPYYVGPLARGNSRFAWMTRKSEETITPWNFEEVVDKGASAQSFIERMTNFDKNLPNEKVLPKHSLLYEYFTVYNELTKVKYVTEGMRKPAFLSGEQKKAIVDLLFKTNRKVTVKQLKEDYFKKIECFDSVEISGVEDRFNASLGTYHDLLKIIKDKDFLDNEENEDILEDIVLTLTLFEDREMIEERLKTYAHLFDDKVMKQLKRRRYTGWGRLSRKLINGIRDKQSGKTILDFLKSDGFANRNFMQLIHDDSLTFKEDIQKAQVSGQGDSLHEHIANLAGSPAIKKGILQTVKVVDELVKVMGRHKPENIVIEMARENQTTQKGQKNSRERMKRIEEGIKELGSQILKEHPVENTQLQNEKLYLYYLQNGRDMYVDQELDINRLSDYDVDHIVPQSFLKDDSIDNKVLTRSDKARGKSDNVPSEEVVKKMKNYWRQLLNAKLITQRKFDNLTKAERGGLSELDKAGFIKRQLVETRQITKHVAQILDSRMNTKYDENDKLIREVKVITLKSKLVSDFRKDFQFYKVREINNYHHAHDAYLNAVVGTALIKKYPKLESEFVYGDYKVYDVRKMIAKSEQEIGKATAKYFFYSNIMNFFKTEITLANGEIRKRPLIETNGETGEIVWDKGRDFATVRKVLSMPQVNIVKKTEVQTGGFSKESILPKRNSDKLIARKKDWDPKKYGGFDSPTVAYSVLVVAKVEKGKSKKLKSVKELLGITIMERSSFEKNPIDFLEAKGYKEVKKDLIIKLPKYSLFELENGRKRMLASAGELQKGNELALPSKYVNFLYLASHYEKLKGSPEDNEQKQLFVEQHKHYLDEIIEQISEFSKRVILADANLDKVLSAYNKHRDKPIREQAENIIHLFTLTNLGAPAAFKYFDTTIDRKRYTSTKEVLDATLIHQSITGLYETRIDLSQLGGDGGGGGGSGGGGSGGGGSGGGGSGGGGSGGGGSGGLLGRDLLTKLKAQIQFSTEGPQVTWEDRPAMCLVLNLEEEYRLHEKPVPPSIDPSWLQLFPMVWAEKAGMGLANQVPPVVVELKSDASPVAVRQYPMSKEAREGIRPHIQRFLDLGILVPCQSPWNTPLLPVKKPGTNDYRPVQDLREVNKRVQDIHPTVPNPYNLLSSLPPSHTWYSVLDLKDAFFCLKLHPNSQPLFAFEWRDPEKGNTGQLTWTRLPQGFKNSPTLFNEALHRDLASFRALNPQVVMLQYVDDLLVAAPTYRDCKEGTRRLLQELSKLGYRVSAKKAQLCREEVTYLGYLLKGGKRWLTPARKATVMKIPTPTTPRQVREFLGTAGFCRLWIPGFASLAAPLYPLTRPKVPFTWTEAHQEAFGRIKEALLSAPALALPDLTKPFALYVDEKEGVARGVLTQTLGPWRRPVAYLSKKLDPVASGWPTCLKAIAAVALLLKDADKLTLGQNVLVIAPHNLESIVRQPPDRWMTNARMTHYQSLLLNERVSFAPPAILNPATLLPVESDDTPIHICSEILAEETGTRPDLRDQPLPGVPAWYTDGSSFIMDGRRQAGAAIVDNKRTVWASNLPEGTSAQKAELIALTQALRLAEGKSINIYTDSRYAFATAHVHGAIYKQRGWLTSAGKDIKNKEEILALLEAIHLPKRVAIIHCPGHQRGTDPVATGNRKADEAAKQAAQSTRILTETTKNAGKRTADGSEFEKRTADGSEFESPKKKAKVE

SEQ ID NO: 6213 - protein, 2115 aa, synthetic construct
MPAAKRVKLDGGDKKYSIGLDIGTNSVGWAVITDEYKVPSKKFKVLGNTDRHSIKKNLIGALLFDSGETAEATRLKRTARRRYTRRKNRICYLQEIFSNEMAKVDDSFFHRLEESFLVEEDKKHERHPIFGNIVDEVAYHEKYPTIYHLRKKLVDSTDKADLRLIYLALAHMIKFRGHFLIEGDLNPDNSDVDKLFIQLVQTYNQLFEENPINASGVDAKAILSARLSKSRRLENLIAQLPGEKKNGLFGNLIALSLGLTPNFKSNFDLAEDAKLQLSKDTYDDDLDNLLAQIGDQYADLFLAAKNLSDAILLSDILRVNTEITKAPLSASMIKRYDEHHQDLTLLKALVRQQLPEKYKEIFFDQSKNGYAGYIDGGASQEEFYKFIKPILEKMDGTEELLVKLNREDLLRKQRTFDNGSIPHQIHLGELHAILRRQEDFYPFLKDNREKIEKILTFRIPYYVGPLARGNSRFAWMTRKSEETITPWNFEEVVDKGASAQSFIERMTNFDKNLPNEKVLPKHSLLYEYFTVYNELTKVKYVTEGMRKPAFLSGEQKKAIVDLLFKTNRKVTVKQLKEDYFKKIECFDSVEISGVEDRFNASLGTYHDLLKIIKDKDFLDNEENEDILEDIVLTLTLFEDREMIEERLKTYAHLFDDKVMKQLKRRRYTGWGRLSRKLINGIRDKQSGKTILDFLKSDGFANRNFMQLIHDDSLTFKEDIQKAQVSGQGDSLHEHIANLAGSPAIKKGILQTVKVVDELVKVMGRHKPENIVIEMARENQTTQKGQKNSRERMKRIEEGIKELGSQILKEHPVENTQLQNEKLYLYYLQNGRDMYVDQELDINRLSDYDVDHIVPQSFLKDDSIDNKVLTRSDKARGKSDNVPSEEVVKKMKNYWRQLLNAKLITQRKFDNLTKAERGGLSELDKAGFIKRQLVETRQITKHVAQILDSRMNTKYDENDKLIREVKVITLKSKLVSDFRKDFQFYKVREINNYHHAHDAYLNAVVGTALIKKYPKLESEFVYGDYKVYDVRKMIAKSEQEIGKATAKYFFYSNIMNFFKTEITLANGEIRKRPLIETNGETGEIVWDKGRDFATVRKVLSMPQVNIVKKTEVQTGGFSKESILPKRNSDKLIARKKDWDPKKYGGFDSPTVAYSVLVVAKVEKGKSKKLKSVKELLGITIMERSSFEKNPIDFLEAKGYKEVKKDLIIKLPKYSLFELENGRKRMLASAGELQKGNELALPSKYVNFLYLASHYEKLKGSPEDNEQKQLFVEQHKHYLDEIIEQISEFSKRVILADANLDKVLSAYNKHRDKPIREQAENIIHLFTLTNLGAPAAFKYFDTTIDRKRYTSTKEVLDATLIHQSITGLYETRIDLSQLGGDGGGGGGSGGGGSGGGGSGGGGSGGGGSGGGGSGGTLNLEDEYRLYETSAEPEVSPGSTWLSDFPQAWAETGGMGLAVRQAPLIIPLKATSTPVSIKQYPMSQEAKLGIKPHIQRLLDQGILVPCQSPWNTPLLPVKKPGTNDYRPVQDLREVNKRVEDIHPTVPNPYNLLSGLPPSHRWYTVLDLKDAFFCLRLHPTSQPLFAFEWRDPGMGISGQLTWTRLPQGFKNSPTLFNEALHRDLADFRIQHPDLILLQYVDDILLAATSELDCQQGTRALLLTLGNLGYRASAKKAQLCQKQVKYLGYLLKEGQRWLTEARKETVMGQPTPKTPRQLREFLGKAGFCRLFIPGFAEMAAPLYPLTKPGTLFNWGPDQQKAYQEIKQALLTAPALGLPDLTKPFELFVDEKQGYAKGVLTQKLGPWRRPVAYLSKKLDPVAAGWPPCLRMVAAIAVLRKDAGKLTMGQPLVILAPHAVEALVKQPPDRWLSNARMTHYQAMLLDTDRVQFGPVVALNPATLLPLPEEGAPHDCLEILAETHGTRPDLTDQPIPDADHTWYTDGSSFLQEGQRKAGAAVTTETEVIWARALPAGTSAQRAELIALTQALKMAEGKRLNVYTDSRYAFATAHIHGEIYRRRGWLTSEGREIKNKSEILALLKALFLPKRLSIIHCLGHQKGDSAEARGNRLADQAAREAAIKTPPDTSTLLAGKRTADGSEFEKRTADGSEFESPKKKAKVE

SEQ ID NO: 6214 - protein, 2115 aa, synthetic construct
MPAAKRVKLDGGDKKYSIGLDIGTNSVGWAVITDEYKVPSKKFKVLGNTDRHSIKKNLIGALLFDSGETAEATRLKRTARRRYTRRKNRICYLQEIFSNEMAKVDDSFFHRLEESFLVEEDKKHERHPIFGNIVDEVAYHEKYPTIYHLRKKLVDSTDKADLRLIYLALAHMIKFRGHFLIEGDLNPDNSDVDKLFIQLVQTYNQLFEENPINASGVDAKAILSARLSKSRRLENLIAQLPGEKKNGLFGNLIALSLGLTPNFKSNFDLAEDAKLQLSKDTYDDDLDNLLAQIGDQYADLFLAAKNLSDAILLSDILRVNTEITKAPLSASMIKRYDEHHQDLTLLKALVRQQLPEKYKEIFFDQSKNGYAGYIDGGASQEEFYKFIKPILEKMDGTEELLVKLNREDLLRKQRTFDNGSIPHQIHLGELHAILRRQEDFYPFLKDNREKIEKILTFRIPYYVGPLARGNSRFAWMTRKSEETITPWNFEEVVDKGASAQSFIERMTNFDKNLPNEKVLPKHSLLYEYFTVYNELTKVKYVTEGMRKPAFLSGEQKKAIVDLLFKTNRKVTVKQLKEDYFKKIECFDSVEISGVEDRFNASLGTYHDLLKIIKDKDFLDNEENEDILEDIVLTLTLFEDREMIEERLKTYAHLFDDKVMKQLKRRRYTGWGRLSRKLINGIRDKQSGKTILDFLKSDGFANRNFMQLIHDDSLTFKEDIQKAQVSGQGDSLHEHIANLAGSPAIKKGILQTVKVVDELVKVMGRHKPENIVIEMARENQTTQKGQKNSRERMKRIEEGIKELGSQILKEHPVENTQLQNEKLYLYYLQNGRDMYVDQELDINRLSDYDVDHIVPQSFLKDDSIDNKVLTRSDKARGKSDNVPSEEVVKKMKNYWRQLLNAKLITQRKFDNLTKAERGGLSELDKAGFIKRQLVETRQITKHVAQILDSRMNTKYDENDKLIREVKVITLKSKLVSDFRKDFQFYKVREINNYHHAHDAYLNAVVGTALIKKYPKLESEFVYGDYKVYDVRKMIAKSEQEIGKATAKYFFYSNIMNFFKTEITLANGEIRKRPLIETNGETGEIVWDKGRDFATVRKVLSMPQVNIVKKTEVQTGGFSKESILPKRNSDKLIARKKDWDPKKYGGFDSPTVAYSVLVVAKVEKGKSKKLKSVKELLGITIMERSSFEKNPIDFLEAKGYKEVKKDLIIKLPKYSLFELENGRKRMLASAGELQKGNELALPSKYVNFLYLASHYEKLKGSPEDNEQKQLFVEQHKHYLDEIIEQISEFSKRVILADANLDKVLSAYNKHRDKPIREQAENIIHLFTLTNLGAPAAFKYFDTTIDRKRYTSTKEVLDATLIHQSITGLYETRIDLSQLGGDGGGGGGSGGGGSGGGGSGGGGSGGGGSGGGGSGGTLNIEDEYRLHETSKGPDVPLGSTWLSDFPQAWAETGGMGLAVRQAPLIIPLKATSTPVSIKQYPMSQEARLGIKPHIQRLLDQGILVPCQSPWNTPLLPVKKPGTNDYRPVQDLREVNKRVEDIHPTVPNPYNLLSGLPPSHQWYTVLDLKDAFFCLRLHPTSQSLFAFEWRDPEMGISGQLTWTRLPQGFKNSPTLFNEALHRDLADFRIQHPDLILLQYVDDLLLAATSELDCQQGTRALLQTLGDLGYRASAKKAQICQKQVKYLGYLLKEGQRWLTEARKETVMGQPTPKTPRQLREFLGTAGFCRLWIPGFAEMAAPLYPLTKPGTLFEWGPDQQKAYQEIKQALLTAPALGLPDLTKPFELFVDEKQGYAKGVLTQKLGPWRRPVAYLSKKLDPVAAGWPPCLRMVAAIAVLTKDAGKLTMGQPLVILAPHAVEALVKQPPDRWLSNARMTHYQALLLDTDRVQFGPIVALNPATLLPLPEEGLQHDCLDILAEAHGTRPDLTDQPLPDADHTWYTDGSSFLQEGQRKAGAAVTTETEVVWAKALPAGTSAQRAELIALTQALKMAEGKKLNVYTDSRYAFATAHIHGEIYRRRGWLTSEGKEIKNKDEILALLKALFLPKRLSIIHCPGHQKGNRAEARGNRMADQAAREVATRETPETSTLLAGKRTADGSEFEKRTADGSEFESPKKKAKVE

SEQ ID NO: 6215 - protein, 2115 aa, synthetic construct
MPAAKRVKLDGGDKKYSIGLDIGTNSVGWAVITDEYKVPSKKFKVLGNTDRHSIKKNLIGALLFDSGETAEATRLKRTARRRYTRRKNRICYLQEIFSNEMAKVDDSFFHRLEESFLVEEDKKHERHPIFGNIVDEVAYHEKYPTIYHLRKKLVDSTDKADLRLIYLALAHMIKFRGHFLIEGDLNPDNSDVDKLFIQLVQTYNQLFEENPINASGVDAKAILSARLSKSRRLENLIAQLPGEKKNGLFGNLIALSLGLTPNFKSNFDLAEDAKLQLSKDTYDDDLDNLLAQIGDQYADLFLAAKNLSDAILLSDILRVNTEITKAPLSASMIKRYDEHHQDLTLLKALVRQQLPEKYKEIFFDQSKNGYAGYIDGGASQEEFYKFIKPILEKMDGTEELLVKLNREDLLRKQRTFDNGSIPHQIHLGELHAILRRQEDFYPFLKDNREKIEKILTFRIPYYVGPLARGNSRFAWMTRKSEETITPWNFEEVVDKGASAQSFIERMTNFDKNLPNEKVLPKHSLLYEYFTVYNELTKVKYVTEGMRKPAFLSGEQKKAIVDLLFKTNRKVTVKQLKEDYFKKIECFDSVEISGVEDRFNASLGTYHDLLKIIKDKDFLDNEENEDILEDIVLTLTLFEDREMIEERLKTYAHLFDDKVMKQLKRRRYTGWGRLSRKLINGIRDKQSGKTILDFLKSDGFANRNFMQLIHDDSLTFKEDIQKAQVSGQGDSLHEHIANLAGSPAIKKGILQTVKVVDELVKVMGRHKPENIVIEMARENQTTQKGQKNSRERMKRIEEGIKELGSQILKEHPVENTQLQNEKLYLYYLQNGRDMYVDQELDINRLSDYDVDHIVPQSFLKDDSIDNKVLTRSDKARGKSDNVPSEEVVKKMKNYWRQLLNAKLITQRKFDNLTKAERGGLSELDKAGFIKRQLVETRQITKHVAQILDSRMNTKYDENDKLIREVKVITLKSKLVSDFRKDFQFYKVREINNYHHAHDAYLNAVVGTALIKKYPKLESEFVYGDYKVYDVRKMIAKSEQEIGKATAKYFFYSNIMNFFKTEITLANGEIRKRPLIETNGETGEIVWDKGRDFATVRKVLSMPQVNIVKKTEVQTGGFSKESILPKRNSDKLIARKKDWDPKKYGGFDSPTVAYSVLVVAKVEKGKSKKLKSVKELLGITIMERSSFEKNPIDFLEAKGYKEVKKDLIIKLPKYSLFELENGRKRMLASAGELQKGNELALPSKYVNFLYLASHYEKLKGSPEDNEQKQLFVEQHKHYLDEIIEQISEFSKRVILADANLDKVLSAYNKHRDKPIREQAENIIHLFTLTNLGAPAAFKYFDTTIDRKRYTSTKEVLDATLIHQSITGLYETRIDLSQLGGDGGGGGGSGGGGSGGGGSGGGGSGGGGSGGGGSGGTLNIEDEHRLHETSKEPDVSLGSTWLSDFPQAWAETGGMGLAVRQAPLIIPLKATSTPVSIKQYPMSQEARLGIKPHIQRLLDQGILVPCQSPWNTPLLPVKKPGTNDYRPVQDLREVNKRVEDIHPTVPNPYNLLSGLPPSHQWYTVLDLKDAFFCLRLHPTSQPLFAFEWRDPEMGISGQLTWTRLPQGFKNSPTLFDEALHRDLADFRIQHPDLILLQYVDDLLLAATSELDCQQGTRALLQTLGNLGYRASAKKAQICQKQVKYLGYLLKEGQRWLTEARKETVMGQPTPKTPRQLREFLGTAGFCRLWIPGFAEMAAPLYPLTKTGTLFNWGPDQQKAYQEIKQALLTAPALGLPDLTKPFELFVDEKQGYAKGVLTQKLGPWRRPVAYLSKKLDPVAAGWPPCLRMVAAIAVLTKDAGKLTMGQPLVILAPHAVEALVKQPPDRWLSNARMTHYQALLLDTDRVQFGPVVALNPATLLPLPEEGLQHNCLDILAEAHGTRPDLTDQPLPDADHTWYTDGSSLLQEGQRKAGAAVTTETEVIWAKALPAGTSAQRAELIALTQALKMAEGKKLNVYTDSRYAFATAHIHGEIYRRRGLLTSEGKEIKNKDEILALLKALFLPKRLSIIHCPGHQKGHSAEARGNRMADQAARKAAITETPDTSTLLAGKRTADGSEFEKRTADGSEFESPKKKAKVE

SEQ ID NO: 6216 - protein, 2115 aa, synthetic construct; identical to SEQ ID NO: 6215

SEQ ID NO: 6217 - protein, 2115 aa, synthetic construct
MPAAKRVKLDGGDKKYSIGLDIGTNSVGWAVITDEYKVPSKKFKVLGNTDRHSIKKNLIGALLFDSGETAEATRLKRTARRRYTRRKNRICYLQEIFSNEMAKVDDSFFHRLEESFLVEEDKKHERHPIFGNIVDEVAYHEKYPTIYHLRKKLVDSTDKADLRLIYLALAHMIKFRGHFLIEGDLNPDNSDVDKLFIQLVQTYNQLFEENPINASGVDAKAILSARLSKSRRLENLIAQLPGEKKNGLFGNLIALSLGLTPNFKSNFDLAEDAKLQLSKDTYDDDLDNLLAQIGDQYADLFLAAKNLSDAILLSDILRVNTEITKAPLSASMIKRYDEHHQDLTLLKALVRQQLPEKYKEIFFDQSKNGYAGYIDGGASQEEFYKFIKPILEKMDGTEELLVKLNREDLLRKQRTFDNGSIPHQIHLGELHAILRRQEDFYPFLKDNREKIEKILTFRIPYYVGPLARGNSRFAWMTRKSEETITPWNFEEVVDKGASAQSFIERMTNFDKNLPNEKVLPKHSLLYEYFTVYNELTKVKYVTEGMRKPAFLSGEQKKAIVDLLFKTNRKVTVKQLKEDYFKKIECFDSVEISGVEDRFNASLGTYHDLLKIIKDKDFLDNEENEDILEDIVLTLTLFEDREMIEERLKTYAHLFDDKVMKQLKRRRYTGWGRLSRKLINGIRDKQSGKTILDFLKSDGFANRNFMQLIHDDSLTFKEDIQKAQVSGQGDSLHEHIANLAGSPAIKKGILQTVKVVDELVKVMGRHKPENIVIEMARENQTTQKGQKNSRERMKRIEEGIKELGSQILKEHPVENTQLQNEKLYLYYLQNGRDMYVDQELDINRLSDYDVDHIVPQSFLKDDSIDNKVLTRSDKARGKSDNVPSEEVVKKMKNYWRQLLNAKLITQRKFDNLTKAERGGLSELDKAGFIKRQLVETRQITKHVAQILDSRMNTKYDENDKLIREVKVITLKSKLVSDFRKDFQFYKVREINNYHHAHDAYLNAVVGTALIKKYPKLESEFVYGDYKVYDVRKMIAKSEQEIGKATAKYFFYSNIMNFFKTEITLANGEIRKRPLIETNGETGEIVWDKGRDFATVRKVLSMPQVNIVKKTEVQTGGFSKESILPKRNSDKLIARKKDWDPKKYGGFDSPTVAYSVLVVAKVEKGKSKKLKSVKELLGITIMERSSFEKNPIDFLEAKGYKEVKKDLIIKLPKYSLFELENGRKRMLASAGELQKGNELALPSKYVNFLYLASHYEKLKGSPEDNEQKQLFVEQHKHYLDEIIEQISEFSKRVILADANLDKVLSAYNKHRDKPIREQAENIIHLFTLTNLGAPAAFKYFDTTIDRKRYTSTKEVLDATLIHQSITGLYETRIDLSQLGGDGGGGGGSGGGGSGGGGSGGGGSGGGGSGGGGSGGTLNIEDEYRLHEISTEPDVSPGSTWLSDFPQAWAETGGMGLAVRQAPLIIPLKATSTPVSIKQYPMSQEAKLGIKPHIQRLLDQGILVPCQSPWNTPLLPVKKPGTNDYRPVQGLREVNKRVEDIHPTVPNPYNLLSGLPTSHRWYTVLDLKDAFFCLRLHPTSQPLFASEWRDPGMGISGQLTWTRLPQGFKNSPTLFNEALHRGLADFRIQHPDLILLQYVDDLLLAATSELDCQQGTRALLKTLGNLGYRASAKKAQICQKQVKYLGYLLREGQRWLTEARKETVMGQPTPKTPRQLREFLGTAGFCRLWIPRFAEMAAPLYPLTKPGTLFNWGPDQQKAYHEIKQALLTAPALGLPDLTKPFELFVDEKQGYAKGVLTQKLGPWRRPVAYLSKKLDPVAAGWPPCLRMVAAIAVLTKDAGKLTMGQPLVILAPHAVEALVKQPPDRWLSNARMTHYQAMLLDTDRVQFGPVVALNPATLLPLPEEGAPHDCLEILAETHGTEPDLTDQPIPDADHTWYTDGSSFLQEGQRKAGAAVTTETEVIWARALPAGTSAQRAELIALTQALKMAEGKRLNVYTDSRYAFATAHIHGEIYKRRGWLTSEGREIKNKSEILALLKALFLPKRLSIIHCLGHQKGDSAEARGNRLADQAAREAAIKTPPDTSTLLAGKRTADGSEFEKRTADGSEFESPKKKAKVE

SEQ ID NO: 6218 - protein, 2109 aa, synthetic construct
MPAAKRVKLDGGDKKYSIGLDIGTNSVGWAVITDEYKVPSKKFKVLGNTDRHSIKKNLIGALLFDSGETAEATRLKRTARRRYTRRKNRICYLQEIFSNEMAKVDDSFFHRLEESFLVEEDKKHERHPIFGNIVDEVAYHEKYPTIYHLRKKLVDSTDKADLRLIYLALAHMIKFRGHFLIEGDLNPDNSDVDKLFIQLVQTYNQLFEENPINASGVDAKAILSARLSKSRRLENLIAQLPGEKKNGLFGNLIALSLGLTPNFKSNFDLAEDAKLQLSKDTYDDDLDNLLAQIGDQYADLFLAAKNLSDAILLSDILRVNTEITKAPLSASMIKRYDEHHQDLTLLKALVRQQLPEKYKEIFFDQSKNGYAGYIDGGASQEEFYKFIKPILEKMDGTEELLVKLNREDLLRKQRTFDNGSIPHQIHLGELHAILRRQEDFYPFLKDNREKIEKILTFRIPYYVGPLARGNSRFAWMTRKSEETITPWNFEEVVDKGASAQSFIERMTNFDKNLPNEKVLPKHSLLYEYFTVYNELTKVKYVTEGMRKPAFLSGEQKKAIVDLLFKTNRKVTVKQLKEDYFKKIECFDSVEISGVEDRFNASLGTYHDLLKIIKDKDFLDNEENEDILEDIVLTLTLFEDREMIEERLKTYAHLFDDKVMKQLKRRRYTGWGRLSRKLINGIRDKQSGKTILDFLKSDGFANRNFMQLIHDDSLTFKEDIQKAQVSGQGDSLHEHIANLAGSPAIKKGILQTVKVVDELVKVMGRHKPENIVIEMARENQTTQKGQKNSRERMKRIEEGIKELGSQILKEHPVENTQLQNEKLYLYYLQNGRDMYVDQELDINRLSDYDVDHIVPQSFLKDDSIDNKVLTRSDKARGKSDNVPSEEVVKKMKNYWRQLLNAKLITQRKFDNLTKAERGGLSELDKAGFIKRQLVETRQITKHVAQILDSRMNTKYDENDKLIREVKVITLKSKLVSDFRKDFQFYKVREINNYHHAHDAYLNAVVGTALIKKYPKLESEFVYGDYKVYDVRKMIAKSEQEIGKATAKYFFYSNIMNFFKTEITLANGEIRKRPLIETNGETGEIVWDKGRDFATVRKVLSMPQVNIVKKTEVQTGGFSKESILPKRNSDKLIARKKDWDPKKYGGFDSPTVAYSVLVVAKVEKGKSKKLKSVKELLGITIMERSSFEKNPIDFLEAKGYKEVKKDLIIKLPKYSLFELENGRKRMLASAGELQKGNELALPSKYVNFLYLASHYEKLKGSPEDNEQKQLFVEQHKHYLDEIIEQISEFSKRVILADANLDKVLSAYNKHRDKPIREQAENIIHLFTLTNLGAPAAFKYFDTTIDRKRYTSTKEVLDATLIHQSITGLYETRIDLSQLGGDGGGGGGSGGGGSGGGGSGGGGSGGGGSGGGGSGGTLQLDDEYRLYSPLVKPDQNIQFWLEQFPQAWAETAGMGLAKQVPPQVIQLKASATPVSVRQYPLSKEAQEGIRPHVQRLIQQGILVPVQSPWNTPLLPVRKPGTNDYRPVQDLREVNKRVQDIHPTVPNPYNLLCALPPQRSWYTVLDLKDAFFCLRLHPTSQPLFAFEWRDPGTGRTGQLTWTRLPQGFKNSPTIFDEALHRDLANFRIQHPQVTLLQYVDDLLLAGATKQDCLEGTKALLLELSDLGYRASAKKAQICRREVTYLGYSLRDGQRWLTEARKKTVVQIPAPTTAKQVREFLGTAGFCRLWIPGFATLAAPLYPLTKEKGEFSWAPEHQKAFDAIKKALLSAPALALPDVTKPFTLYVDERKGVARGVLTQTLGPWRRPVAYLSKKLDPVASGWPVCLKAIAAVAILVKDADKLTLGQNITVIAPHALENIVRQPPDRWMTNARMTHYQSLLLTERVTFAPPAALNPATLLPEETDEPVTHDCHQLLIEETGVRKDLTDIPLTGEVLTWFTDGSSYVVEGKRMAGAAVVDGTRTIWASSLPEGTSAQKAELMALTQALRLAEGKSINIYTDSRYAFATAHVHGAIYKQRGLLTSAGREIKNKEEILSLLEALHLPKRLAIIHCPGHQKAKDPISRGNQMADRVAKQAAQGVNLLAGKRTADGSEFEKRTADGSEFESPKKKAKVE

SEQ ID NO: 6219 - protein, 2109 aa, synthetic construct
MPAAKRVKLDGGDKKYSIGLDIGTNSVGWAVITDEYKVPSKKFKVLGNTDRHSIKKNLIGALLFDSGETAEATRLKRTARRRYTRRKNRICYLQEIFSNEMAKVDDSFFHRLEESFLVEEDKKHERHPIFGNIVDEVAYHEKYPTIYHLRKKLVDSTDKADLRLIYLALAHMIKFRGHFLIEGDLNPDNSDVDKLFIQLVQTYNQLFEENPINASGVDAKAILSARLSKSRRLENLIAQLPGEKKNGLFGNLIALSLGLTPNFKSNFDLAEDAKLQLSKDTYDDDLDNLLAQIGDQYADLFLAAKNLSDAILLSDILRVNTEITKAPLSASMIKRYDEHHQDLTLLKALVRQQLPEKYKEIFFDQSKNGYAGYIDGGASQEEFYKFIKPILEKMDGTEELLVKLNREDLLRKQRTFDNGSIPHQIHLGELHAILRRQEDFYPFLKDNREKIEKILTFRIPYYVGPLARGNSRFAWMTRKSEETITPWNFEEVVDKGASAQSFIERMTNFDKNLPNEKVLPKHSLLYEYFTVYNELTKVKYVTEGMRKPAFLSGEQKKAIVDLLFKTNRKVTVKQLKEDYFKKIECFDSVEISGVEDRFNASLGTYHDLLKIIKDKDFLDNEENEDILEDIVLTLTLFEDREMIEERLKTYAHLFDDKVMKQLKRRRYTGWGRLSRKLINGIRDKQSGKTILDFLKSDGFANRNFMQLIHDDSLTFKEDIQKAQVSGQGDSLHEHIANLAGSPAIKKGILQTVKVVDELVKVMGRHKPENIVIEMARENQTTQKGQKNSRERMKRIEEGIKELGSQILKEHPVENTQLQNEKLYLYYLQNGRDMYVDQELDINRLSDYDVDHIVPQSFLKDDSIDNKVLTRSDKARGKSDNVPSEEVVKKMKNYWRQLLNAKLITQRKFDNLTKAERGGLSELDKAGFIKRQLVETRQITKHVAQILDSRMNTKYDENDKLIREVKVITLKSKLVSDFRKDFQFYKVREINNYHHAHDAYLNAVVGTALIKKYPKLESEFVYGDYKVYDVRKMIAKSEQEIGKATAKYFFYSNIMNFFKTEITLANGEIRKRPLIETNGETGEIVWDKGRDFATVRKVLSMPQVNIVKKTEVQTGGFSKESILPKRNSDKLIARKKDWDPKKYGGFDSPTVAYSVLVVAKVEKGKSKKLKSVKELLGITIMERSSFEKNPIDFLEAKGYKEVKKDLIIKLPKYSLFELENGRKRMLASAGELQKGNELALPSKYVNFLYLASHYEKLKGSPEDNEQKQLFVEQHKHYLDEIIEQISEFSKRVILADANLDKVLSAYNKHRDKPIREQAENIIHLFTLTNLGAPAAFKYFDTTIDRKRYTSTKEVLDATLIHQSITGLYETRIDLSQLGGDGGGGGGSGGGGSGGGGSGGGGSGGGGSGGGGSGGTLQLDDEYRLYSPLVKPDQNIQFWLEQFPQAWAETAGMGLAKQVPPQVIQLKASATPVSVRQYPLSKEAQEGIRPHVQRLIQQGILVPVQSPWNTPLLPVRKPGTNDYRPVQDLREVNKRVQDIHPTVPNPYNLLCALPPQRSWYTVLDLKDAFFCLRLHPTSQPLFAFEWRDPGTGRTGQLTWTRLPQGFKNSPTIFNEALHRDLANFRIQHPQVTLLQYVDDLLLAGATKQDCLEGTKALLLELSDLGYRASAKKAQICRREVTYLGYSLRDGQRWLTEARKKTVVQIPAPTTAKQVREFLGTAGFCRLWIPGFATLAAPLYPLTKPKGEFSWAPEHQKAFDAIKKALLSAPALALPDVTKPFTLYVDERKGVARGVLTQTLGPWRRPVAYLSKKLDPVASGWPVCLKAIAAVAILVKDADKLTLGQNITVIAPHALENIVRQPPDRWMTNARMTHYQSLLLTERVTFAPPAALNPATLLPEETDEPVTHDCHQLLIEETGVRKDLTDIPLTGEVLTWFTDGSSYVVEGKRMAGAAVVDGTRTIWASSLPEGTSAQKAELMALTQALRLAEGKSINIYTDSRYAFATAHVHGAIYKQRGWLTSAGREIKNKEEILSLLEALHLPKRLAIIHCPGHQKAKDPISRGNQMADRVAKQAAQGVNLLAGKRTADGSEFEKRTADGSEFESPKKKAKVE

SEQ ID NO: 6220 - protein, 2106 aa, synthetic construct
MPAAKRVKLDGGDKKYSIGLDIGTNSVGWAVITDEYKVPSKKFKVLGNTDRHSIKKNLIGALLFDSGETAEATRLKRTARRRYTRRKNRICYLQEIFSNEMAKVDDSFFHRLEESFLVEEDKKHERHPIFGNIVDEVAYHEKYPTIYHLRKKLVDSTDKADLRLIYLALAHMIKFRGHFLIEGDLNPDNSDVDKLFIQLVQTYNQLFEENPINASGVDAKAILSARLSKSRRLENLIAQLPGEKKNGLFGNLIALSLGLTPNFKSNFDLAEDAKLQLSKDTYDDDLDNLLAQIGDQYADLFLAAKNLSDAILLSDILRVNTEITKAPLSASMIKRYDEHHQDLTLLKALVRQQLPEKYKEIFFDQSKNGYAGYIDGGASQEEFYKFIKPILEKMDGTEELLVKLNREDLLRKQRTFDNGSIPHQIHLGELHAILRRQEDFYPFLKDNREKIEKILTFRIPYYVGPLARGNSRFAWMTRKSEETITPWNFEEVVDKGASAQSFIERMTNFDKNLPNEKVLPKHSLLYEYFTVYNELTKVKYVTEGMRKPAFLSGEQKKAIVDLLFKTNRKVTVKQLKEDYFKKIECFDSVEISGVEDRFNASLGTYHDLLKIIKDKDFLDNEENEDILEDIVLTLTLFEDREMIEERLKTYAHLFDDKVMKQLKRRRYTGWGRLSRKLINGIRDKQSGKTILDFLKSDGFANRNFMQLIHDDSLTFKEDIQKAQVSGQGDSLHEHIANLAGSPAIKKGILQTVKVVDELVKVMGRHKPENIVIEMARENQTTQKGQKNSRERMKRIEEGIKELGSQILKEHPVENTQLQNEKLYLYYLQNGRDMYVDQELDINRLSDYDVDHIVPQSFLKDDSIDNKVLTRSDKARGKSDNVPSEEVVKKMKNYWRQLLNAKLITQRKFDNLTKAERGGLSELDKAGFIKRQLVETRQITKHVAQILDSRMNTKYDENDKLIREVKVITLKSKLVSDFRKDFQFYKVREINNYHHAHDAYLNAVVGTALIKKYPKLESEFVYGDYKVYDVRKMIAKSEQEIGKATAKYFFYSNIMNFFKTEITLANGEIRKRPLIETNGETGEIVWDKGRDFATVRKVLSMPQVNIVKKTEVQTGGFSKESILPKRNSDKLIARKKDWDPKKYGGFDSPTVAYSVLVVAKVEKGKSKKLKSVKELLGITIMERSSFEKNPIDFLEAKGYKEVKKDLIIKLPKYSLFELENGRKRMLASAGELQKGNELALPSKYVNFLYLASHYEKLKGSPEDNEQKQLFVEQHKHYLDEIIEQISEFSKRVILADANLDKVLSAYNKHRDKPIREQAENIIHLFTLTNLGAPAAFKYFDTTIDRKRYTSTKEVLDATLIHQSITGLYETRIDLSQLGGDGGGGGGSGGGGSGGGGSGGGGSGGGGSGGGGSGGVPWLMKKPLQLTVLVPLHEYQERLLQQTALPKEQKELLQKLFLKYDALWQHWENQVGHRRIKPHNIATGTLAPRPQKQYPINPKAKPSIQIVIDDLLKQGVLIQQNSTMNTPVYPVPKPDGKWRMVLDYREVNKTIPLIAAQNQHSAGILSSIYRGKYKTTLDLTNGFWAHPITPESYWLTAFTWQGKQYCWTRLPQGFLNSPALFNADVVDLLKEIPNVQAYVDDIYISHDDPQEHLEQLEKIFSILLNAGYVVSLKKSEIAQREVEFLGFNITKEGRGLTDTFKQKLLNITPPKDLKQLQSILGKLNFARNFIPNYSELVKPLYTIVAPANGKFISWTEDNSNQLQHIISVLNQADNLEERNPETRLIIKVNSSPSAGYIRYYNEGSKRPIMYVNYIFSKAEAKFTQTEKLLTTMHKGLIKAMDLAMGQEILVYSPIVSMTKIQRTPLPERKALPVRWITWMTYLEDPRIQFHYDKSLPELQQIPNVTEDVIAKTKHPSEFAMVFYTDGSAIKHPDVNKSHSAGMGIAQVQFIPEYKIVHQWSIPLGDHTAQLAEIAAVEFACKKALKISGPVLIVTDSFYVAESANKELPYWKSNGFLNNKKKPLRHVSKWKSIAECLQLKPDIIIMHEKGHQQPMTTLHTEGNNLADKLATQGSYVVHAGKRTADGSEFEKRTADGSEFESPKKKAKVE

SEQ ID NO: 6221 - protein, 2195 aa, synthetic construct
MPAAKRVKLDGGDKKYSIGLDIGTNSVGWAVITDEYKVPSKKFKVLGNTDRHSIKKNLIGALLFDSGETAEATRLKRTARRRYTRRKNRICYLQEIFSNEMAKVDDSFFHRLEESFLVEEDKKHERHPIFGNIVDEVAYHEKYPTIYHLRKKLVDSTDKADLRLIYLALAHMIKFRGHFLIEGDLNPDNSDVDKLFIQLVQTYNQLFEENPINASGVDAKAILSARLSKSRRLENLIAQLPGEKKNGLFGNLIALSLGLTPNFKSNFDLAEDAKLQLSKDTYDDDLDNLLAQIGDQYADLFLAAKNLSDAILLSDILRVNTEITKAPLSASMIKRYDEHHQDLTLLKALVRQQLPEKYKEIFFDQSKNGYAGYIDGGASQEEFYKFIKPILEKMDGTEELLVKLNREDLLRKQRTFDNGSIPHQIHLGELHAILRRQEDFYPFLKDNREKIEKILTFRIPYYVGPLARGNSRFAWMTRKSEETITPWNFEEVVDKGASAQSFIERMTNFDKNLPNEKVLPKHSLLYEYFTVYNELTKVKYVTEGMRKPAFLSGEQKKAIVDLLFKTNRKVTVKQLKEDYFKKIECFDSVEISGVEDRFNASLGTYHDLLKIIKDKDFLDNEENEDILEDIVLTLTLFEDREMIEERLKTYAHLFDDKVMKQLKRRRYTGWGRLSRKLINGIRDKQSGKTILDFLKSDGFANRNFMQLIHDDSLTFKEDIQKAQVSGQGDSLHEHIANLAGSPAIKKGILQTVKVVDELVKVMGRHKPENIVIEMARENQTTQKGQKNSRERMKRIEEGIKELGSQILKEHPVENTQLQNEKLYLYYLQNGRDMYVDQELDINRLSDYDVDHIVPQSFLKDDSIDNKVLTRSDKARGKSDNVPSEEVVKKMKNYWRQLLNAKLITQRKFDNLTKAERGGLSELDKAGFIKRQLVETRQITKHVAQILDSRMNTKYDENDKLIREVKVITLKSKLVSDFRKDFQFYKVREINNYHHAHDAYLNAVVGTALIKKYPKLESEFVYGDYKVYDVRKMIAKSEQEIGKATAKYFFYSNIMNFFKTEITLANGEIRKRPLIETNGETGEIVWDKGRDFATVRKVLSMPQVNIVKKTEVQTGGFSKESILPKRNSDKLIARKKDWDPKKYGGFDSPTVAYSVLVVAKVEKGKSKKLKSVKELLGITIMERSSFEKNPIDFLEAKGYKEVKKDLIIKLPKYSLFELENGRKRMLASAGELQKGNELALPSKYVNFLYLASHYEKLKGSPEDNEQKQLFVEQHKHYLDEIIEQISEFSKRVILADANLDKVLSAYNKHRDKPIREQAENIIHLFTLTNLGAPAAFKYFDTTIDRKRYTSTKEVLDATLIHQSITGLYETRIDLSQLGGDGGGGGGSGGGGSGGGGSGGGGSGGGGSGGGGSGGMDPLQLLQPLEAEIKGTKLKAHWNSGATITCVPEAFLEDERPIQTMLIKTIHGEKQQDVYYLTFKVQGRKVEAEVLASPYDYILLNPSDVPWLMKKPLQLTVLVPLHEYQERLLQQTALPKEQKELLQKLFLKYDALWQHWENQVGHRRIKPHNIATGTLAPRPQKQYPINPKAKPSIQIVIDDLLKQGVLIQQNSTMNTPVYPVPKPDGKWRMVLDYREVNKTIPLIAAQNQHSAGILSSIYRGKYKTTLDLTNGFWAHPITPESYWLTAFTWQGKQYCWTRLPQGFLNSPALFNADVVDLLKEIPNVQAYVDDIYISHDDPQEHLEQLEKIFSILLNAGYVVSLKKSEIAQREVEFLGFNITKEGRGLTDTFKQKLLNITPPKDLKQLQSILGLLNFARNFIPNYSELVKPLYTIVAPANGKFISWTEDNSNQLQHIISVLNQADNLEERNPETRLIIKVNSSPSAGYIRYYNEGSKRPIMYVNYIFSKAEAKFTQTEKLLTTMHKGLIKAMDLAMGQEILVYSPIVSMTKIQRTPLPERKALPVRWITWMTYLEDPRIQFHYDKSLPELQQIPNVTEDVIAKTKHPSEFAMVFYTDGSAIKHPDVNKSHSAGMGIAQVQFIPEYKIVHQWSIPLGDHTAQLAEIAAVEFACKKALKISGPVLIVTDSFYVAESANKELPYWKSNGFLNNKKKPLRHVSKWKSIAECLQLKPDIIIMHEKGHQQPMTTLHTEGNNLADKLATQGSYVVHAGKRTADGSEFEKRTADGSEFESPKKKAKVE

SEQ ID NO: 6222 - protein, 2195 aa, synthetic construct
MPAAKRVKLDGGDKKYSIGLDIGTNSVGWAVITDEYKVPSKKFKVLGNTDRHSIKKNLIGALLFDSGETAEATRLKRTARRRYTRRKNRICYLQEIFSNEMAKVDDSFFHRLEESFLVEEDKKHERHPIFGNIVDEVAYHEKYPTIYHLRKKLVDSTDKADLRLIYLALAHMIKFRGHFLIEGDLNPDNSDVDKLFIQLVQTYNQLFEENPINASGVDAKAILSARLSKSRRLENLIAQLPGEKKNGLFGNLIALSLGLTPNFKSNFDLAEDAKLQLSKDTYDDDLDNLLAQIGDQYADLFLAAKNLSDAILLSDILRVNTEITKAPLSASMIKRYDEHHQDLTLLKALVRQQLPEKYKEIFFDQSKNGYAGYIDGGASQEEFYKFIKPILEKMDGTEELLVKLNREDLLRKQRTFDNGSIPHQIHLGELHAILRRQEDFYPFLKDNREKIEKILTFRIPYYVGPLARGNSRFAWMTRKSEETITPWNFEEVVDKGASAQSFIERMTNFDKNLPNEKVLPKHSLLYEYFTVYNELTKVKYVTEGMRKPAFLSGEQKKAIVDLLFKTNRKVTVKQLKEDYFKKIECFDSVEISGVEDRFNASLGTYHDLLKIIKDKDFLDNEENEDILEDIVLTLTLFEDREMIEERLKTYAHLFDDKVMKQLKRRRYTGWGRLSRKLINGIRDKQSGKTILDFLKSDGFANRNFMQLIHDDSLTFKEDIQKAQVSGQGDSLHEHIANLAGSPAIKKGILQTVKVVDELVKVMGRHKPENIVIEMARENQTTQKGQKNSRERMKRIEEGIKELGSQILKEHPVENTQLQNEKLYLYYLQNGRDMYVDQELDINRLSDYDVDHIVPQSFLKDDSIDNKVLTRSDKARGKSDNVPSEEVVKKMKNYWRQLLNAKLITQRKFDNLTKAERGGLSELDKAGFIKRQLVETRQITKHVAQILDSRMNTKYDENDKLIREVKVITLKSKLVSDFRKDFQFYKVREINNYHHAHDAYLNAVVGTALIKKYPKLESEFVYGDYKVYDVRKMIAKSEQEIGKATAKYFFYSNIMNFFKTEITLANGEIRKRPLIETNGETGEIVWDKGRDFATVRKVLSMPQVNIVKKTEVQTGGFSKESILPKRNSDKLIARKKDWDPKKYGGFDSPTVAYSVLVVAKVEKGKSKKLKSVKELLGITIMERSSFEKNPIDFLEAKGYKEVKKDLIIKLPKYSLFELENGRKRMLASAGELQKGNELALPSKYVNFLYLASHYEKLKGSPEDNEQKQLFVEQHKHYLDEIIEQISEFSKRVILADANLDKVLSAYNKHRDKPIREQAENIIHLFTLTNLGAPAAFKYFDTTIDRKRYTSTKEVLDATLIHQSITGLYETRIDLSQLGGDGGGGGGSGGGGSGGGGSGGGGSGGGGSGGGGSGGMDPLQLLQPLEAEIKGTKLKAHWNSGATITCVPQAFLEEEVPIKNIWIKTIHGEKEQPVYYLTFKIQGRKVEAEVISSPYDYILVSPSDIPWLMKKPLQLTTLVPLQEYEERLLKQTMLTGSYKEKLQSLFLKYDALWQHWENQVGHRRIKPHHIATGTVNPRPQKQYPINPKAKASIQTVINDLLKQGVLIQQNSIMNTPVYPVPKPDGKWRMVLDYREVNKTIPLIAAQNQHSAGILSSIFRGKYKTTLDLSNGFWAHSITPESYWLTAFTWLGQQYCWTRLPQGFLNSPALFTADVVDLLKEVPNVQVYVDDIYISHDDPREHLEQLEKVFSLLLNAGYVVSLKKSEIAQHEVEFLGFNITKEGRGLTETFKQKLLNITPPRDLKQLQSILGLLNFARNFIPNFSELVKPLYNIIATANGKYITWTTDNSQQLQNIISMLNSAENLEERNPEVRLIMKVNTSPSAGYIRFYNEFAKRPIMYLNYVYTKAEVKFTNTEKLLTTIHKGLIKALDLGMGQEILVYSPIVSMTKIQKTPLPERKALPIRWITWMSYLEDPRIQFHYDKTLPELQQVPTVTDDIIAKIKHPSEFSMVFYTDGSAIKHPNVNKSHNAGMGIAQVQFKPEFTVINTWSIPLGDHTAQLAEVAAVEFACKKALKIDGPVLIVTDSFYVAESVNKELPYWQSNGFFNNKKKPLKHVSKWKSIADCIQLKPDIIIIHEKGHQPTASTFHTEGNNLADKLATQGSYVVNAGKRTADGSEFEKRTADGSEFESPKKKAKVE

SEQ ID NO: 6223 - protein, 2106 aa, synthetic construct
MPAAKRVKLDGGDKKYSIGLDIGTNSVGWAVITDEYKVPSKKFKVLGNTDRHSIKKNLIGALLFDSGETAEATRLKRTARRRYTRRKNRICYLQEIFSNEMAKVDDSFFHRLEESFLVEEDKKHERHPIFGNIVDEVAYHEKYPTIYHLRKKLVDSTDKADLRLIYLALAHMIKFRGHFLIEGDLNPDNSDVDKLFIQLVQTYNQLFEENPINASGVDAKAILSARLSKSRRLENLIAQLPGEKKNGLFGNLIALSLGLTPNFKSNFDLAEDAKLQLSKDTYDDDLDNLLAQIGDQYADLFLAAKNLSDAILLSDILRVNTEITKAPLSASMIKRYDEHHQDLTLLKALVRQQLPEKYKEIFFDQSKNGYAGYIDGGASQEEFYKFIKPILEKMDGTEELLVKLNREDLLRKQRTFDNGSIPHQIHLGELHAILRRQEDFYPFLKDNREKIEKILTFRIPYYVGPLARGNSRFAWMTRKSEETITPWNFEEVVDKGASAQSFIERMTNFDKNLPNEKVLPKHSLLYEYFTVYNELTKVKYVTEGMRKPAFLSGEQKKAIVDLLFKTNRKVTVKQLKEDYFKKIECFDSVEISGVEDRFNASLGTYHDLLKIIKDKDFLDNEENEDILEDIVLTLTLFEDREMIEERLKTYAHLFDDKVMKQLKRRRYTGWGRLSRKLINGIRDKQSGKTILDFLKSDGFANRNFMQLIHDDSLTFKEDIQKAQVSGQGDSLHEHIANLAGSPAIKKGILQTVKVVDELVKVMGRHKPENIVIEMARENQTTQKGQKNSRERMKRIEEGIKELGSQILKEHPVENTQLQNEKLYLYYLQNGRDMYVDQELDINRLSDYDVDHIVPQSFLKDDSIDNKVLTRSDKARGKSDNVPSEEVVKKMKNYWRQLLNAKLITQRKFDNLTKAERGGLSELDKAGFIKRQLVETRQITKHVAQILDSRMNTKYDENDKLIREVKVITLKSKLVSDFRKDFQFYKVREINNYHHAHDAYLNAVVGTALIKKYPKLESEFVYGDYKVYDVRKMIAKSEQEIGKATAKYFFYSNIMNFFKTEITLANGEIRKRPLIETNGETGEIVWDKGRDFATVRKVLSMPQVNIVKKTEVQTGGFSKESILPKRNSDKLIARKKDWDPKKYGGFDSPTVAYSVLVVAKVEKGKSKKLKSVKELLGITIMERSSFEKNPIDFLEAKGYKEVKKDLIIKLPKYSLFELENGRKRMLASAGELQKGNELALPSKYVNFLYLASHYEKLKGSPEDNEQKQLFVEQHKHYLDEIIEQISEFSKRVILADANLDKVLSAYNKHRDKPIREQAENIIHLFTLTNLGAPAAFKYFDTTIDRKRYTSTKEVLDATLIHQSITGLYETRIDLSQLGGDGGGGGGSGGGGSGGGGSGGGGSGGGGSGGGGSGGIPWLMKKPLQLTTLVPLQEYEERLLKQTMLTGSYKEKLQSLFLKYDALWQHWENQVGHRRIKPHHIATGTVNPRPQKQYPINPKAKASIQTVINDLLKQGVLIQQNSIMNTPVYPVPKPDGKWRMVLDYREVNKTIPLIAAQNQHSAGILSSIFRGKYKTTLDLSNGFWAHSITPESYWLTAFTWLGQQYCWTRLPQGFLNSPALFNADVVDLLKEVPNVQVYVDDIYISHDDPREHLEQLEKVFSLLLNAGYVVSLKKSEIAQHEVEFLGFNITKEGRGLTETFKQKLLNITPPRDLKQLQSILGKLNFARNFIPNFSELVKPLYNIIATAPGKYITWTTDNSQQLQNIISMLNSAENLEERNPEVRLIMKVNTSPSAGYIRFYNEFAKRPIMYLNYVYTKAEVKFTNTEKLLTTIHKGLIKALDLGMGQEILVYSPIVSMTKIQKTPLPERKALPIRWITWMSYLEDPRIQFHYDKTLPELQQVPTVTDDIIAKIKHPSEFSMVFYTDGSAIKHPNVNKSHNAGMGIAQVQFKPEFTVINTWSIPLGDHTAQLAEVAAVEFACKKALKIDGPVLIVTDSFYVAESVNKELPYWQSNGFFNNKKKPLKHVSKWKSIADCIQLKPDIIIIHEKGHQPTASTFHTEGNNLADKLATQGSYVVNAGKRTADGSEFEKRTADGSEFESPKKKAKVE

SEQ ID NO: 6224 - protein, 2106 aa, synthetic construct
MPAAKRVKLDGGDKKYSIGLDIGTNSVGWAVITDEYKVPSKKFKVLGNTDRHSIKKNLIGALLFDSGETAEATRLKRTARRRYTRRKNRICYLQEIFSNEMAKVDDSFFHRLEESFLVEEDKKHERHPIFGNIVDEVAYHEKYPTIYHLRKKLVDSTDKADLRLIYLALAHMIKFRGHFLIEGDLNPDNSDVDKLFIQLVQTYNQLFEENPINASGVDAKAILSARLSKSRRLENLIAQLPGEKKNGLFGNLIALSLGLTPNFKSNFDLAEDAKLQLSKDTYDDDLDNLLAQIGDQYADLFLAAKNLSDAILLSDILRVNTEITKAPLSASMIKRYDEHHQDLTLLKALVRQQLPEKYKEIFFDQSKNGYAGYIDGGASQEEFYKFIKPILEKMDGTEELLVKLNREDLLRKQRTFDNGSIPHQIHLGELHAILRRQEDFYPFLKDNREKIEKILTFRIPYYVGPLARGNSRFAWMTRKSEETITPWNFEEVVDKGASAQSFIERMTNFDKNLPNEKVLPKHSLLYEYFTVYNELTKVKYVTEGMRKPAFLSGEQKKAIVDLLFKTNRKVTVKQLKEDYFKKIECFDSVEISGVEDRFNASLGTYHDLLKIIKDKDFLDNEENEDILEDIVLTLTLFEDREMIEERLKTYAHLFDDKVMKQLKRRRYTGWGRLSRKLINGIRDKQSGKTILDFLKSDGFANRNFMQLIHDDSLTFKEDIQKAQVSGQGDSLHEHIANLAGSPAIKKGILQTVKVVDELVKVMGRHKPENIVIEMARENQTTQKGQKNSRERMKRIEEGIKELGSQILKEHPVENTQLQNEKLYLYYLQNGRDMYVDQELDINRLSDYDVDHIVPQSFLKDDSIDNKVLTRSDKARGKSDNVPSEEVVKKMKNYWRQLLNAKLITQRKFDNLTKAERGGLSELDKAGFIKRQLVETRQITKHVAQILDSRMNTKYDENDKLIREVKVITLKSKLVSDFRKDFQFYKVREINNYHHAHDAYLNAVVGTALIKKYPKLESEFVYGDYKVYDVRKMIAKSEQEIGKATAKYFFYSNIMNFFKTEITLANGEIRKRPLIETNGETGEIVWDKGRDFATVRKVLSMPQVNIVKKTEVQTGGFSKESILPKRNSDKLIARKKDWDPKKYGGFDSPTVAYSVLVVAKVEKGKSKKLKSVKELLGITIMERSSFEKNPIDFLEAKGYKEVKKDLIIKLPKYSLFELENGRKRMLASAGELQKGNELALPSKYVNFLYLASHYEKLKGSPEDNEQKQLFVEQHKHYLDEIIEQISEFSKRVILADANLDKVLSAYNKHRDKPIREQAENIIHLFTLTNLGAPAAFKYFDTTIDRKRYTSTKEVLDATLIHQSITGLYETRIDLSQLGGDGGGGGGSGGGGSGGGGSGGGGSGGGGSGGGGSGGVPWLTQQPLQLTILVPLQEYQDRILNKTALPEEQKQQLKALFTKYDNLWQHWENQVGHRKIRPHNIATGDYPPRPQKQYPINPKAKPSIQIVIDDLLKQGVLTPQNSTMNTPVYPVPKPDGRWRMVLDYREVNKTIPLTAAQNQHSAGILATIVRQKYKTTLDLANGFWAHPITPDSYWLTAFTWQGKQYCWTRLPQGFLNSPALFNADAVDLLKEVPNVQVYVDDIYLSHDNPHEHIQQLEKVFQILLQAGYVVSLKKSEIGQRTVEFLGFNITKEGRGLTDTFKTKLLNVTPPKDLKQLQSILGKLNFARNFIPNFAELVQTLYNLIASSPGKYIEWTEDNTKQLNKVIEALNTASNLEERLPDQRLVIKVNTSPSAGYVRYYNESGKKPIMYLNYVFSKAELKFSMLEKLLTTMHKALIKAMDLAMGQEILVYSPIVSMTKIQKTPLPERKALPIRWITWMTYLEDPRIQFHYDKTLPELKHIPDVYTSSIPPLKHPSQYEGVFCTDGSAIKSPDPTKSNNAGMGIVHAIYNPEYKILNQWSIPLGHHTAQMAEIAAVEFACKKALKVPGPVLVITDSFYVAESANKELPYWKSNGFVNNKKEPLKHISKWKSIAECLSIKPDITIQHEKGHQPINTSIHTEGNALADKLATQGSYVVNAGKRTADGSEFEKRTADGSEFESPKKKAKVE

SEQ ID NO: 6225 - protein, 2113 aa, synthetic construct
MPAAKRVKLDGGDKKYSIGLDIGTNSVGWAVITDEYKVPSKKFKVLGNTDRHSIKKNLIGALLFDSGETAEATRLKRTARRRYTRRKNRICYLQEIFSNEMAKVDDSFFHRLEESFLVEEDKKHERHPIFGNIVDEVAYHEKYPTIYHLRKKLVDSTDKADLRLIYLALAHMIKFRGHFLIEGDLNPDNSDVDKLFIQLVQTYNQLFEENPINASGVDAKAILSARLSKSRRLENLIAQLPGEKKNGLFGNLIALSLGLTPNFKSNFDLAEDAKLQLSKDTYDDDLDNLLAQIGDQYADLFLAAKNLSDAILLSDILRVNTEITKAPLSASMIKRYDEHHQDLTLLKALVRQQLPEKYKEIFFDQSKNGYAGYIDGGASQEEFYKFIKPILEKMDGTEELLVKLNREDLLRKQRTFDNGSIPHQIHLGELHAILRRQEDFYPFLKDNREKIEKILTFRIPYYVGPLARGNSRFAWMTRKSEETITPWNFEEVVDKGASAQSFIERMTNFDKNLPNEKVLPKHSLLYEYFTVYNELTKVKYVTEGMRKPAFLSGEQKKAIVDLLFKTNRKVTVKQLKEDYFKKIECFDSVEISGVEDRFNASLGTYHDLLKIIKDKDFLDNEENEDILEDIVLTLTLFEDREMIEERLKTYAHLFDDKVMKQLKRRRYTGWGRLSRKLINGIRDKQSGKTILDFLKSDGFANRNFMQLIHDDSLTFKEDIQKAQVSGQGDSLHEHIANLAGSPAIKKGILQTVKVVDELVKVMGRHKPENIVIEMARENQTTQKGQKNSRERMKRIEEGIKELGSQILKEHPVENTQLQNEKLYLYYLQNGRDMYVDQELDINRLSDYDVDHIVPQSFLKDDSIDNKVLTRSDKARGKSDNVPSEEVVKKMKNYWRQLLNAKLITQRKFDNLTKAERGGLSELDKAGFIKRQLVETRQITKHVAQILDSRMNTKYDENDKLIREVKVITLKSKLVSDFRKDFQFYKVREINNYHHAHDAYLNAVVGTALIKKYPKLESEFVYGDYKVYDVRKMIAKSEQEIGKATAKYFFYSNIMNFFKTEITLANGEIRKRPLIETNGETGEIVWDKGRDFATVRKVLSMPQVNIVKKTEVQTGGFSKESILPKRNSDKLIARKKDWDPKKYGGFDSPTVAYSVLVVAKVEKGKSKKLKSVKELLGITIMERSSFEKNPIDFLEAKGYKEVKKDLIIKLPKYSLFELENGRKRMLASAGELQKGNELALPSKYVNFLYLASHYEKLKGSPEDNEQKQLFVEQHKHYLDEIIEQISEFSKRVILADANLDKVLSAYNKHRDKPIREQAENIIHLFTLTNLGAPAAFKYFDTTIDRKRYTSTKEVLDATLIHQSITGLYETRIDLSQLGGDGGGGGGSGGGGSGGGGSGGGGSGGGGSGGGGSGGVLNLEEEYRLHEKPVPSSIDPSWLQLFPTVWAERAGMGLANQVPPVVVELRSGASPVAVRQYPMSKEAREGIRPHIQRFLDLGVLVPCQSPWNTPLLPVKKPGTNDYRPVQDLREINKRVQDIHPTVPNPYNLLSSLPPSHTWYSVLDLKDAFFCLKLHPNSQPLFAFEWRDPEKGNTGQLTWTRLPQGFKNSPTLFNEALHRDLAPFRALNPQVVLLQYVDDLLVAAPTYRDCKEGTQKLLQELSKLGYRVSAKKAQLCQKEVTYLGYLLKEGKRWLTPARKATVMKIPPPTTPRQVREFLGTAGFCRLWIPGFASLAAPLYPLTKPSIPFIWTEEHQKAFDRIKEALLSAPALALPDLTKPFTLYVDERAGVARGVLTQTLGPWRRPVAYLSKKLDPVASGWPTCLKAVAAVALLLKDADKLTLGQNVTVIASHSLESIVRQPPDRWMTNARMTHYQSLLLNERVSFAPPAVLNPATLLPVESEATPVHRCSEILAEETGTRRDLKDQPLPGVPAWYTDGSSFIAEGKRRAGAAIVDGKRTVWASSLPEGTSAQKAELVALTQALRLAEGKDINIYTDSRYAFATAHIHGAIYKQRGWLTSAGKDIKNKEEILALLEAIHLPKRVAIIHCPGHQKGNDPVATGNRRADEAAKQAALSTRVLAETTKPAGKRTADGSEFEKRTADGSEFESPKKKAKVE

SEQ ID NO: 6226 - protein, 2113 aa, synthetic construct
MPAAKRVKLDGGDKKYSIGLDIGTNSVGWAVITDEYKVPSKKFKVLGNTDRHSIKKNLIGALLFDSGETAEATRLKRTARRRYTRRKNRICYLQEIFSNEMAKVDDSFFHRLEESFLVEEDKKHERHPIFGNIVDEVAYHEKYPTIYHLRKKLVDSTDKADLRLIYLALAHMIKFRGHFLIEGDLNPDNSDVDKLFIQLVQTYNQLFEENPINASGVDAKAILSARLSKSRRLENLIAQLPGEKKNGLFGNLIALSLGLTPNFKSNFDLAEDAKLQLSKDTYDDDLDNLLAQIGDQYADLFLAAKNLSDAILLSDILRVNTEITKAPLSASMIKRYDEHHQDLTLLKALVRQQLPEKYKEIFFDQSKNGYAGYIDGGASQEEFYKFIKPILEKMDGTEELLVKLNREDLLRKQRTFDNGSIPHQIHLGELHAILRRQEDFYPFLKDNREKIEKILTFRIPYYVGPLARGNSRFAWMTRKSEETITPWNFEEVVDKGASAQSFIERMTNFDKNLPNEKVLPKHSLLYEYFTVYNELTKVKYVTEGMRKPAFLSGEQKKAIVDLLFKTNRKVTVKQLKEDYFKKIECFDSVEISGVEDRFNASLGTYHDLLKIIKDKDFLDNEENEDILEDIVLTLTLFEDREMIEERLKTYAHLFDDKVMKQLKRRRYTGWGRLSRKLINGIRDKQSGKTILDFLKSDGFANRNFMQLIHDDSLTFKEDIQKAQVSGQGDSLHEHIANLAGSPAIKKGILQTVKVVDELVKVMGRHKPENIVIEMARENQTTQKGQKNSRERMKRIEEGIKELGSQILKEHPVENTQLQNEKLYLYYLQNGRDMYVDQELDINRLSDYDVDHIVPQSFLKDDSIDNKVLTRSDKARGKSDNVPSEEVVKKMKNYWRQLLNAKLITQRKFDNLTKAERGGLSELDKAGFIKRQLVETRQITKHVAQILDSRMNTKYDENDKLIREVKVITLKSKLVSDFRKDFQFYKVREINNYHHAHDAYLNAVVGTALIKKYPKLESEFVYGDYKVYDVRKMIAKSEQEIGKATAKYFFYSNIMNFFKTEITLANGEIRKRPLIETNGETGEIVWDKGRDFATVRKVLSMPQVNIVKKTEVQTGGFSKESILPKRNSDKLIARKKDWDPKKYGGFDSPTVAYSVLVVAKVEKGKSKKLKSVKELLGITIMERSSFEKNPIDFLEAKGYKEVKKDLIIKLPKYSLFELENGRKRMLASAGELQKGNELALPSKYVNFLYLASHYEKLKGSPEDNEQKQLFVEQHKHYLDEIIEQISEFSKRVILADANLDKVLSAYNKHRDKPIREQAENIIHLFTLTNLGAPAAFKYFDTTIDRKRYTSTKEVLDATLIHQSITGLYETRIDLSQLGGDGGGGGGSGGGGSGGGGSGGGGSGGGGSGGGGSGGVLNLEEEYRLHEKPVPSSIDPSWLQLFPTVWAERAGMGLANQVPPVVVELRSGASPVAVRQYPMSKEAREGIRPHIQRFLDLGVLVPCQSPWNTPLLPVKKPGTNDYRPVQDLREINKRVQDIHPTVPNPYNLLSSLPPSHTWYSVLDLKDAFFCLKLHPNSQPLFAFEWRDPEKGNTGQLTWTRLPQGFKNSPTLFNEALHRDLAPFRALNPQVVLLQYVDDLLVAAPTYRDCKEGTQKLLQELSKLGYRVSAKKAQLCQKEVTYLGYLLKEGKRWLTPARKATVMKIPPPTTPRQVREFLGKAGFCRLFIPGFASLAAPLYPLTKPSIPFIWTEEHQKAFDRIKEALLSAPALALPDLTKPFTLYVDERAGVARGVLTQTLGPWRRPVAYLSKKLDPVASGWPTCLKAVAAVALLLKDADKLTLGQNVTVIASHSLESIVRQPPDRWMTNARMTHYQSLLLNERVSFAPPAVLNPATLLPVESEATPVHRCSEILAEETGTRRDLKDQPLPGVPAWYTDGSSFIAEGKRRAGAAIVDGKRTVWASSLPEGTSAQKAELVALTQALRLAEGKDINIYTDSRYAFATAHIHGAIYKQRGWLTSAGKDIKNKEEILALLEAIHLPKRVAIIHCPGHQKGNDPVATGNRRADEAAKQAALSTRVLAETTKPAGKRTADGSEFEKRTADGSEFESPKKKAKVE

SEQ ID NO: 6227 - protein, 2090 aa, synthetic construct
MPAAKRVKLDGGDKKYSIGLDIGTNSVGWAVITDEYKVPSKKFKVLGNTDRHSIKKNLIGALLFDSGETAEATRLKRTARRRYTRRKNRICYLQEIFSNEMAKVDDSFFHRLEESFLVEEDKKHERHPIFGNIVDEVAYHEKYPTIYHLRKKLVDSTDKADLRLIYLALAHMIKFRGHFLIEGDLNPDNSDVDKLFIQLVQTYNQLFEENPINASGVDAKAILSARLSKSRRLENLIAQLPGEKKNGLFGNLIALSLGLTPNFKSNFDLAEDAKLQLSKDTYDDDLDNLLAQIGDQYADLFLAAKNLSDAILLSDILRVNTEITKAPLSASMIKRYDEHHQDLTLLKALVRQQLPEKYKEIFFDQSKNGYAGYIDGGASQEEFYKFIKPILEKMDGTEELLVKLNREDLLRKQRTFDNGSIPHQIHLGELHAILRRQEDFYPFLKDNREKIEKILTFRIPYYVGPLARGNSRFAWMTRKSEETITPWNFEEVVDKGASAQSFIERMTNFDKNLPNEKVLPKHSLLYEYFTVYNELTKVKYVTEGMRKPAFLSGEQKKAIVDLLFKTNRKVTVKQLKEDYFKKIECFDSVEISGVEDRFNASLGTYHDLLKIIKDKDFLDNEENEDILEDIVLTLTLFEDREMIEERLKTYAHLFDDKVMKQLKRRRYTGWGRLSRKLINGIRDKQSGKTILDFLKSDGFANRNFMQLIHDDSLTFKEDIQKAQVSGQGDSLHEHIANLAGSPAIKKGILQTVKVVDELVKVMGRHKPENIVIEMARENQTTQKGQKNSRERMKRIEEGIKELGSQILKEHPVENTQLQNEKLYLYYLQNGRDMYVDQELDINRLSDYDVDHIVPQSFLKDDSIDNKVLTRSDKARGKSDNVPSEEVVKKMKNYWRQLLNAKLITQRKFDNLTKAERGGLSELDKAGFIKRQLVETRQITKHVAQILDSRMNTKYDENDKLIREVKVITLKSKLVSDFRKDFQFYKVREINNYHHAHDAYLNAVVGTALIKKYPKLESEFVYGDYKVYDVRKMIAKSEQEIGKATAKYFFYSNIMNFFKTEITLANGEIRKRPLIETNGETGEIVWDKGRDFATVRKVLSMPQVNIVKKTEVQTGGFSKESILPKRNSDKLIARKKDWDPKKYGGFDSPTVAYSVLVVAKVEKGKSKKLKSVKELLGITIMERSSFEKNPIDFLEAKGYKEVKKDLIIKLPKYSLFELENGRKRMLASAGELQKGNELALPSKYVNFLYLASHYEKLKGSPEDNEQKQLFVEQHKHYLDEIIEQISEFSKRVILADANLDKVLSAYNKHRDKPIREQAENIIHLFTLTNLGAPAAFKYFDTTIDRKRYTSTKEVLDATLIHQSITGLYETRIDLSQLGGDGGGGGGGTAPLEEEYRLFLEAPIQNVTLLEQWKREIPKVWAEINPPGLASTQAPIHVQLLSTALPVRVRQYPITLEAKRSLRETIRKFRAAGILRPVHSPWNTPLLPVRKSGTSEYRMVQDLREVNKRVETIHPTVPNPYTLLSLLPPDRIWYSVLDLKDAFFCIPLAPESQLIFAFEWADAEEGESGQLTWTRLPQGFKNSPTLFNEALNRDLQGFRLDHPSVSLLQYVDDLLIAADTQAACLSATRDLLMTLAELGYRVSGKKAQLCQEEVTYLGFKIHKGSRSLSNSRTQAILQIPVPKTKRQVREFLGTIGYCRLWIPGFAELAQPLYAATRPGNDPLVWGEKEEEAFQSLKLALTQPPALALPSLDKPFQLFVEETSGAAKGVLTQALGPWKRPVAYLSKRLDPVAAGWPRCLRAIAAAALLTREASKLTFGQDIEITSSHNLESLLRSPPDKWLTNARITQYQVLLLDPPRVRFKQTAALNPATLLPETDDTLPIHHCLDTLDSLTSTRPDLTDQPLAQAEATLFTDGSSYIRDGKRYAGAAVVTLDSVIWAEPLPIGTSAQKAELIALTKALEWSKDKSVNIYTDSRYAFATLHVHGMIYRERGWLTAGGKAIKNAPEILALLTAVWLPKRVAVMHCKGHQKDDAPTSTGNRRADEVAREVAIRPLSTQATISAGKRTADGSEFEKRTADGSEFESPKKKAKVE

SEQ ID NO: 6228 - protein, 2094 aa, synthetic construct
MPAAKRVKLDGGDKKYSIGLDIGTNSVGWAVITDEYKVPSKKFKVLGNTDRHSIKKNLIGALLFDSGETAEATRLKRTARRRYTRRKNRICYLQEIFSNEMAKVDDSFFHRLEESFLVEEDKKHERHPIFGNIVDEVAYHEKYPTIYHLRKKLVDSTDKADLRLIYLALAHMIKFRGHFLIEGDLNPDNSDVDKLFIQLVQTYNQLFEENPINASGVDAKAILSARLSKSRRLENLIAQLPGEKKNGLFGNLIALSLGLTPNFKSNFDLAEDAKLQLSKDTYDDDLDNLLAQIGDQYADLFLAAKNLSDAILLSDILRVNTEITKAPLSASMIKRYDEHHQDLTLLKALVRQQLPEKYKEIFFDQSKNGYAGYIDGGASQEEFYKFIKPILEKMDGTEELLVKLNREDLLRKQRTFDNGSIPHQIHLGELHAILRRQEDFYPFLKDNREKIEKILTFRIPYYVGPLARGNSRFAWMTRKSEETITPWNFEEVVDKGASAQSFIERMTNFDKNLPNEKVLPKHSLLYEYFTVYNELTKVKYVTEGMRKPAFLSGEQKKAIVDLLFKTNRKVTVKQLKEDYFKKIECFDSVEISGVEDRFNASLGTYHDLLKIIKDKDFLDNEENEDILEDIVLTLTLFEDREMIEERLKTYAHLFDDKVMKQLKRRRYTGWGRLSRKLINGIRDKQSGKTILDFLKSDGFANRNFMQLIHDDSLTFKEDIQKAQVSGQGDSLHEHIANLAGSPAIKKGILQTVKVVDELVKVMGRHKPENIVIEMARENQTTQKGQKNSRERMKRIEEGIKELGSQILKEHPVENTQLQNEKLYLYYLQNGRDMYVDQELDINRLSDYDVDHIVPQSFLKDDSIDNKVLTRSDKARGKSDNVPSEEVVKKMKNYWRQLLNAKLITQRKFDNLTKAERGGLSELDKAGFIKRQLVETRQITKHVAQILDSRMNTKYDENDKLIREVKVITLKSKLVSDFRKDFQFYKVREINNYHHAHDAYLNAVVGTALIKKYPKLESEFVYGDYKVYDVRKMIAKSEQEIGKATAKYFFYSNIMNFFKTEITLANGEIRKRPLIETNGETGEIVWDKGRDFATVRKVLSMPQVNIVKKTEVQTGGFSKESILPKRNSDKLIARKKDWDPKKYGGFDSPTVAYSVLVVAKVEKGKSKKLKSVKELLGITIMERSSFEKNPIDFLEAKGYKEVKKDLIIKLPKYSLFELENGRKRMLASAGELQKGNELALPSKYVNFLYLASHYEKLKGSPEDNEQKQLFVEQHKHYLDEIIEQISEFSKRVILADANLDKVLSAYNKHRDKPIREQAENIIHLFTLTNLGAPAAFKYFDTTIDRKRYTSTKEVLDATLIHQSITGLYETRIDLSQLGGDGGGGGGGTVSLQDEHRLFDIPVTTSLPDVWLQDFPQAWAETGGLGRAKCQAPIIIDLKPTAVPVSIKQYPMSLEAHMGIRQHIIKFLELGVLRPCRSPWNTPLLPVKKPGTQDYRPVQDLREINKRTVDIHPTVPNPYNLLSTLKPDYSWYTVLDLKDAFFCLPLAPQSQELFAFEWKDPERGISGQLTWTRLPQGFKNSPTLFNEALHRDLTDFRTQHPEVTLLQYVDDLLLAAPTKKACTQGTRHLLQELGEKGYRASAKKAQICQTKVTYLGYILSEGKRWLTPGRIETVARIPPPRNPREVREFLGTAGFCRLWIPGFAELAAPLYALTKPSTPFTWQTEHQLAFEALKKALLSAPALGLPDTSKPFTLFLDERQGIAKGVLTQKLGPWKRPVAYLSKKLDPVAAGWPPCLRIMAATAMLVKDSAKLTLGQPLTVITPHTLEAIVRQPPDRWITNARLTHYQALLLDTDRVQFGPPVTLNPATLLPVPENQPSPHDCRQVLAETHGTREDLKDQELPDADHTWYTDGSSYLDSGTRRAGAAVVDGHNTIWAQSLPPGTSAQKAELIALTKALELSKGKKANIYTDSRYAFATAHTHGSIYERRGWLTSEGKEIKNKAEIIALLKALFLPQEVAIIHCPGHQKGQDPVAVGNRQADRVARQAAMAEVLTLATEPDNTSHITAGKRTADGSEFEKRTADGSEFESPKKKAKVE

SEQ ID NO: 6229 - protein, 2094 aa, synthetic construct
MPAAKRVKLDGGDKKYSIGLDIGTNSVGWAVITDEYKVPSKKFKVLGNTDRHSIKKNLIGALLFDSGETAEATRLKRTARRRYTRRKNRICYLQEIFSNEMAKVDDSFFHRLEESFLVEEDKKHERHPIFGNIVDEVAYHEKYPTIYHLRKKLVDSTDKADLRLIYLALAHMIKFRGHFLIEGDLNPDNSDVDKLFIQLVQTYNQLFEENPINASGVDAKAILSARLSKSRRLENLIAQLPGEKKNGLFGNLIALSLGLTPNFKSNFDLAEDAKLQLSKDTYDDDLDNLLAQIGDQYADLFLAAKNLSDAILLSDILRVNTEITKAPLSASMIKRYDEHHQDLTLLKALVRQQLPEKYKEIFFDQSKNGYAGYIDGGASQEEFYKFIKPILEKMDGTEELLVKLNREDLLRKQRTFDNGSIPHQIHLGELHAILRRQEDFYPFLKDNREKIEKILTFRIPYYVGPLARGNSRFAWMTRKSEETITPWNFEEVVDKGASAQSFIERMTNFDKNLPNEKVLPKHSLLYEYFTVYNELTKVKYVTEGMRKPAFLSGEQKKAIVDLLFKTNRKVTVKQLKEDYFKKIECFDSVEISGVEDRFNASLGTYHDLLKIIKDKDFLDNEENEDILEDIVLTLTLFEDREMIEERLKTYAHLFDDKVMKQLKRRRYTGWGRLSRKLINGIRDKQSGKTILDFLKSDGFANRNFMQLIHDDSLTFKEDIQKAQVSGQGDSLHEHIANLAGSPAIKKGILQTVKVVDELVKVMGRHKPENIVIEMARENQTTQKGQKNSRERMKRIEEGIKELGSQILKEHPVENTQLQNEKLYLYYLQNGRDMYVDQELDINRLSDYDVDHIVPQSFLKDDSIDNKVLTRSDKARGKSDNVPSEEVVKKMKNYWRQLLNAKLITQRKFDNLTKAERGGLSELDKAGFIKRQLVETRQITKHVAQILDSRMNTKYDENDKLIREVKVITLKSKLVSDFRKDFQFYKVREINNYHHAHDAYLNAVVGTALIKKYPKLESEFVYGDYKVYDVRKMIAKSEQEIGKATAKYFFYSNIMNFFKTEITLANGEIRKRPLIETNGETGEIVWDKGRDFATVRKVLSMPQVNIVKKTEVQTGGFSKESILPKRNSDKLIARKKDWDPKKYGGFDSPTVAYSVLVVAKVEKGKSKKLKSVKELLGITIMERSSFEKNPIDFLEAKGYKEVKKDLIIKLPKYSLFELENGRKRMLASAGELQKGNELALPSKYVNFLYLASHYEKLKGSPEDNEQKQLFVEQHKHYLDEIIEQISEFSKRVILADANLDKVLSAYNKHRDKPIREQAENIIHLFTLTNLGAPAAFKYFDTTIDRKRYTSTKEVLDATLIHQSITGLYETRIDLSQLGGDGGGGGGGTVSLQDEHRLFDIPVTTSLPDVWLQDFPQAWAETGGLGRAKCQAPIIIDLKPTAVPVSIKQYPMSLEAHMGIRQHIIKFLELGVLRPCRSPWNTPLLPVKKPGTQDYRPVQDLREINKRTVDIHPTVPNPYNLLSTLKPDYSWYTVLDLKDAFFCLPLAPQSQELFAFEWKDPERGISGQLTWTRLPQGFKNSPTLFNEALHRDLTDFRTQHPEVTLLQYVDDLLLAAPTKKACTQGTRHLLQELGEKGYRASAKKAQICQTKVTYLGYILSEGKRWLTPGRIETVARIPPPRNPREVREFLGKAGFCRLFIPGFAELAAPLYALTKPSTPFTWQTEHQLAFEALKKALLSAPALGLPDTSKPFTLFLDERQGIAKGVLTQKLGPWKRPVAYLSKKLDPVAAGWPPCLRIMAATAMLVKDSAKLTLGQPLTVITPHTLEAIVRQPPDRWITNARLTHYQALLLDTDRVQFGPPVTLNPATLLPVPENQPSPHDCRQVLAETHGTREDLKDQELPDADHTWYTDGSSYLDSGTRRAGAAVVDGHNTIWAQSLPPGTSAQKAELIALTKALELSKGKKANIYTDSRYAFATAHTHGSIYERRGWLTSEGKEIKNKAEIIALLKALFLPQEVAIIHCPGHQKGQDPVAVGNRQADRVARQAAMAEVLTLATEPDNTSHITAGKRTADGSEFEKRTADGSEFESPKKKAKVE

SEQ ID NO: 6230 - protein, 2165 aa, synthetic construct
MPAAKRVKLDGGDKKYSIGLDIGTNSVGWAVITDEYKVPSKKFKVLGNTDRHSIKKNLIGALLFDSGETAEATRLKRTARRRYTRRKNRICYLQEIFSNEMAKVDDSFFHRLEESFLVEEDKKHERHPIFGNIVDEVAYHEKYPTIYHLRKKLVDSTDKADLRLIYLALAHMIKFRGHFLIEGDLNPDNSDVDKLFIQLVQTYNQLFEENPINASGVDAKAILSARLSKSRRLENLIAQLPGEKKNGLFGNLIALSLGLTPNFKSNFDLAEDAKLQLSKDTYDDDLDNLLAQIGDQYADLFLAAKNLSDAILLSDILRVNTEITKAPLSASMIKRYDEHHQDLTLLKALVRQQLPEKYKEIFFDQSKNGYAGYIDGGASQEEFYKFIKPILEKMDGTEELLVKLNREDLLRKQRTFDNGSIPHQIHLGELHAILRRQEDFYPFLKDNREKIEKILTFRIPYYVGPLARGNSRFAWMTRKSEETITPWNFEEVVDKGASAQSFIERMTNFDKNLPNEKVLPKHSLLYEYFTVYNELTKVKYVTEGMRKPAFLSGEQKKAIVDLLFKTNRKVTVKQLKEDYFKKIECFDSVEISGVEDRFNASLGTYHDLLKIIKDKDFLDNEENEDILEDIVLTLTLFEDREMIEERLKTYAHLFDDKVMKQLKRRRYTGWGRLSRKLINGIRDKQSGKTILDFLKSDGFANRNFMQLIHDDSLTFKEDIQKAQVSGQGDSLHEHIANLAGSPAIKKGILQTVKVVDELVKVMGRHKPENIVIEMARENQTTQKGQKNSRERMKRIEEGIKELGSQILKEHPVENTQLQNEKLYLYYLQNGRDMYVDQELDINRLSDYDVDHIVPQSFLKDDSIDNKVLTRSDKARGKSDNVPSEEVVKKMKNYWRQLLNAKLITQRKFDNLTKAERGGLSELDKAGFIKRQLVETRQITKHVAQILDSRMNTKYDENDKLIREVKVITLKSKLVSDFRKDFQFYKVREINNYHHAHDAYLNAVVGTALIKKYPKLESEFVYGDYKVYDVRKMIAKSEQEIGKATAKYFFYSNIMNFFKTEITLANGEIRKRPLIETNGETGEIVWDKGRDFATVRKVLSMPQVNIVKKTEVQTGGFSKESILPKRNSDKLIARKKDWDPKKYGGFDSPTVAYSVLVVAKVEKGKSKKLKSVKELLGITIMERSSFEKNPIDFLEAKGYKEVKKDLIIKLPKYSLFELENGRKRMLASAGELQKGNELALPSKYVNFLYLASHYEKLKGSPEDNEQKQLFVEQHKHYLDEIIEQISEFSKRVILADANLDKVLSAYNKHRDKPIREQAENIIHLFTLTNLGAPAAFKYFDTTIDRKRYTSTKEVLDATLIHQSITGLYETRIDLSQLGGDGGGGGGGMDLLKPLTVERKGVKIKGYWNSQADITCVPKDLLQGEEPVRQQNVTTIHGTQEGDVYYVNLKIDGRRINTEVIGTTLDYAIITPGDVPWILKKPLELTIKLDLEEQQGTLLNNSILSKKGKEELKQLFEKYSALWQSWENQVGHRRIRPHKIATGTVKPTPQKQYHINPKAKPDIQIVINDLLKQGVLIQKESTMNTPVYPVPKPNGRWRMVLDYRAVNKVTPLIAVQNQHSYGILGSLFKGRYKTTIDLSNGFWAHPIVPEDYWITAFTWQGKQYCWTVLPQGFLNSPGLFNGDVVDLLQGIPNVEVYVDDVYISHDSEKEHLEYLDILFNRLKEAGYIISLKKSNIANSIVDFLGFQITNEGRGLTDTFKEKLENITAPTTLKQLQSILGLLNFARNFIPDFTELIAPLYALIPKSPKNYVPWQIEHSTTLETLITKLNGAEYLQGRKGDKTLIMKVNASYTTGYIRYYNEGEKKPISYVSIVFSKTELKFTELEKLLTTVHKGLLKALDLSMGQNIHVYSPIVSMQNIQKTPQTAKKALASRWLSWLSYLEDPRIRFFYDPQMPALKDLPAVDTGKDNKKHPSNFQHIFYTDGSAITSPTKEGHLNAGMGIVYFINKDGNLQKQQEWSISLGNHTAQFAEIAAFEFALKKCLPLGGNILVVTDSNYVAKAYNEELDVWASNGFVNNRKKPLKHISKWKSVADLKRLRPDVVVTHEPGHQKLDSSPHAYGNNLADQLATQASFKVHAGKRTADGSEFEKRTADGSEFESPKKKAKVE

SEQ ID NO: 6231 - protein, 2086 aa, synthetic construct
MPAAKRVKLDGGDKKYSIGLDIGTNSVGWAVITDEYKVPSKKFKVLGNTDRHSIKKNLIGALLFDSGETAEATRLKRTARRRYTRRKNRICYLQEIFSNEMAKVDDSFFHRLEESFLVEEDKKHERHPIFGNIVDEVAYHEKYPTIYHLRKKLVDSTDKADLRLIYLALAHMIKFRGHFLIEGDLNPDNSDVDKLFIQLVQTYNQLFEENPINASGVDAKAILSARLSKSRRLENLIAQLPGEKKNGLFGNLIALSLGLTPNFKSNFDLAEDAKLQLSKDTYDDDLDNLLAQIGDQYADLFLAAKNLSDAILLSDILRVNTEITKAPLSASMIKRYDEHHQDLTLLKALVRQQLPEKYKEIFFDQSKNGYAGYIDGGASQEEFYKFIKPILEKMDGTEELLVKLNREDLLRKQRTFDNGSIPHQIHLGELHAILRRQEDFYPFLKDNREKIEKILTFRIPYYVGPLARGNSRFAWMTRKSEETITPWNFEEVVDKGASAQSFIERMTNFDKNLPNEKVLPKHSLLYEYFTVYNELTKVKYVTEGMRKPAFLSGEQKKAIVDLLFKTNRKVTVKQLKEDYFKKIECFDSVEISGVEDRFNASLGTYHDLLKIIKDKDFLDNEENEDILEDIVLTLTLFEDREMIEERLKTYAHLFDDKVMKQLKRRRYTGWGRLSRKLINGIRDKQSGKTILDFLKSDGFANRNFMQLIHDDSLTFKEDIQKAQVSGQGDSLHEHIANLAGSPAIKKGILQTVKVVDELVKVMGRHKPENIVIEMARENQTTQKGQKNSRERMKRIEEGIKELGSQILKEHPVENTQLQNEKLYLYYLQNGRDMYVDQELDINRLSDYDVDHIVPQSFLKDDSIDNKVLTRSDKARGKSDNVPSEEVVKKMKNYWRQLLNAKLITQRKFDNLTKAERGGLSELDKAGFIKRQLVETRQITKHVAQILDSRMNTKYDENDKLIREVKVITLKSKLVSDFRKDFQFYKVREINNYHHAHDAYLNAVVGTALIKKYPKLESEFVYGDYKVYDVRKMIAKSEQEIGKATAKYFFYSNIMNFFKTEITLANGEIRKRPLIETNGETGEIVWDKGRDFATVRKVLSMPQVNIVKKTEVQTGGFSKESILPKRNSDKLIARKKDWDPKKYGGFDSPTVAYSVLVVAKVEKGKSKKLKSVKELLGITIMERSSFEKNPIDFLEAKGYKEVKKDLIIKLPKYSLFELENGRKRMLASAGELQKGNELALPSKYVNFLYLASHYEKLKGSPEDNEQKQLFVEQHKHYLDEIIEQISEFSKRVILADANLDKVLSAYNKHRDKPIREQAENIIHLFTLTNLGAPAAFKYFDTTIDRKRYTSTKEVLDATLIHQSITGLYETRIDLSQLGGDGGGGGGGVLNLEEEYRLHEKPVPSSIDPSWLQLFPTVWAERAGMGLANQVPPVVVELRSGASPVAVRQYPMSKEAREGIRPHIQKFLDLGVLVPCRSPWNTPLLPVKKPGTNDYRPVQDLREINKRVQDIHPTVPNPYNLLSSLPPSYTWYSVLDLKDAFFCLRLHPNSQPLFAFEWKDPEKGNTGQLTWTRLPQGFKNSPTLFNEALHRDLAPFRALNPQVVLLQYVDDLLVAAPTYEDCKKGTQKLLQELSKLGYRVSAKKAQLCQREVTYLGYLLKEGKRWLTPARKATVMKIPVPTTPRQVREFLGTAGFCRLWIPGFASLAAPLYPLTKPSIPFIWTEEHQQAFDHIKKALLSAPALALPDLTKPFTLYIDERAGVARGVLTQTLGPWRRPVAYLSKKLDPVASGWPTCLKAVAAVALLLKDADKLTLGQNVTVIASHSLESIVRQPPDRWMTNARMTHYQSLLLNERVSFAPPAVLNPATLLPVESEATPVHRCSEILAEETGTRRDLEDQPLPGVPTWYTDGSSFITEGKRRAGAPIVDGKRTVWASSLPEGTSAQKAELVALTQALRLAEGKNINIYTDSRYAFATAHIHGAIYKQRGWLTSAGKDIKNKEEILALLEAIHLPRRVAIIHCPGHQRGSNPVATGNRRADEAAKQAALSTRVLAGTTKPAGKRTADGSEFEKRTADGSEFESPKKKAKVE

SEQ ID NO: 6232 - protein, 2086 aa, synthetic construct
MPAAKRVKLDGGDKKYSIGLDIGTNSVGWAVITDEYKVPSKKFKVLGNTDRHSIKKNLIGALLFDSGETAEATRLKRTARRRYTRRKNRICYLQEIFSNEMAKVDDSFFHRLEESFLVEEDKKHERHPIFGNIVDEVAYHEKYPTIYHLRKKLVDSTDKADLRLIYLALAHMIKFRGHFLIEGDLNPDNSDVDKLFIQLVQTYNQLFEENPINASGVDAKAILSARLSKSRRLENLIAQLPGEKKNGLFGNLIALSLGLTPNFKSNFDLAEDAKLQLSKDTYDDDLDNLLAQIGDQYADLFLAAKNLSDAILLSDILRVNTEITKAPLSASMIKRYDEHHQDLTLLKALVRQQLPEKYKEIFFDQSKNGYAGYIDGGASQEEFYKFIKPILEKMDGTEELLVKLNREDLLRKQRTFDNGSIPHQIHLGELHAILRRQEDFYPFLKDNREKIEKILTFRIPYYVGPLARGNSRFAWMTRKSEETITPWNFEEVVDKGASAQSFIERMTNFDKNLPNEKVLPKHSLLYEYFTVYNELTKVKYVTEGMRKPAFLSGEQKKAIVDLLFKTNRKVTVKQLKEDYFKKIECFDSVEISGVEDRFNASLGTYHDLLKIIKDKDFLDNEENEDILEDIVLTLTLFEDREMIEERLKTYAHLFDDKVMKQLKRRRYTGWGRLSRKLINGIRDKQSGKTILDFLKSDGFANRNFMQLIHDDSLTFKEDIQKAQVSGQGDSLHEHIANLAGSPAIKKGILQTVKVVDELVKVMGRHKPENIVIEMARENQTTQKGQKNSRERMKRIEEGIKELGSQILKEHPVENTQLQNEKLYLYYLQNGRDMYVDQELDINRLSDYDVDHIVPQSFLKDDSIDNKVLTRSDKARGKSDNVPSEEVVKKMKNYWRQLLNAKLITQRKFDNLTKAERGGLSELDKAGFIKRQLVETRQITKHVAQILDSRMNTKYDENDKLIREVKVITLKSKLVSDFRKDFQFYKVREINNYHHAHDAYLNAVVGTALIKKYPKLESEFVYGDYKVYDVRKMIAKSEQEIGKATAKYFFYSNIMNFFKTEITLANGEIRKRPLIETNGETGEIVWDKGRDFATVRKVLSMPQVNIVKKTEVQTGGFSKESILPKRNSDKLIARKKDWDPKKYGGFDSPTVAYSVLVVAKVEKGKSKKLKSVKELLGITIMERSSFEKNPIDFLEAKGYKEVKKDLIIKLPKYSLFELENGRKRMLASAGELQKGNELALPSKYVNFLYLASHYEKLKGSPEDNEQKQLFVEQHKHYLDEIIEQISEFSKRVILADANLDKVLSAYNKHRDKPIREQAENIIHLFTLTNLGAPAAFKYFDTTIDRKRYTSTKEVLDATLIHQSITGLYETRIDLSQLGGDGGGGGGGVLNLEEEYRLHEKPVPSSIDPSWLQLFPTVWAERAGMGLANQVPPVVVELRSGASPVAVRQYPMSKEAREGIRPHIQKFLDLGVLVPCRSPWNTPLLPVKKPGTNDYRPVQDLREINKRVQDIHPTVPNPYNLLSSLPPSYTWYSVLDLKDAFFCLRLHPNSQPLFAFEWKDPEKGNTGQLTWTRLPQGFKNSPTLFNEALHRDLAPFRALNPQVVLLQYVDDLLVAAPTYEDCKKGTQKLLQELSKLGYRVSAKKAQLCQREVTYLGYLLKEGKRWLTPARKATVMKIPVPTTPRQVREFLGKAGFCRLFIPGFASLAAPLYPLTKPSIPFIWTEEHQQAFDHIKKALLSAPALALPDLTKPFTLYIDERAGVARGVLTQTLGPWRRPVAYLSKKLDPVASGWPTCLKAVAAVALLLKDADKLTLGQNVTVIASHSLESIVRQPPDRWMTNARMTHYQSLLLNERVSFAPPAVLNPATLLPVESEATPVHRCSEILAEETGTRRDLEDQPLPGVPTWYTDGSSFITEGKRRAGAPIVDGKRTVWASSLPEGTSAQKAELVALTQALRLAEGKNINIYTDSRYAFATAHIHGAIYKQRGWLTSAGKDIKNKEEILALLEAIHLPRRVAIIHCPGHQRGSNPVATGNRRADEAAKQAALSTRVLAGTTKPAGKRTADGSEFEKRTADGSEFESPKKKAKVE

SEQ ID NO: 6233 - protein, 2119 aa, synthetic construct
MPAAKRVKLDGGDKKYSIGLDIGTNSVGWAVITDEYKVPSKKFKVLGNTDRHSIKKNLIGALLFDSGETAEATRLKRTARRRYTRRKNRICYLQEIFSNEMAKVDDSFFHRLEESFLVEEDKKHERHPIFGNIVDEVAYHEKYPTIYHLRKKLVDSTDKADLRLIYLALAHMIKFRGHFLIEGDLNPDNSDVDKLFIQLVQTYNQLFEENPINASGVDAKAILSARLSKSRRLENLIAQLPGEKKNGLFGNLIALSLGLTPNFKSNFDLAEDAKLQLSKDTYDDDLDNLLAQIGDQYADLFLAAKNLSDAILLSDILRVNTEITKAPLSASMIKRYDEHHQDLTLLKALVRQQLPEKYKEIFFDQSKNGYAGYIDGGASQEEFYKFIKPILEKMDGTEELLVKLNREDLLRKQRTFDNGSIPHQIHLGELHAILRRQEDFYPFLKDNREKIEKILTFRIPYYVGPLARGNSRFAWMTRKSEETITPWNFEEVVDKGASAQSFIERMTNFDKNLPNEKVLPKHSLLYEYFTVYNELTKVKYVTEGMRKPAFLSGEQKKAIVDLLFKTNRKVTVKQLKEDYFKKIECFDSVEISGVEDRFNASLGTYHDLLKIIKDKDFLDNEENEDILEDIVLTLTLFEDREMIEERLKTYAHLFDDKVMKQLKRRRYTGWGRLSRKLINGIRDKQSGKTILDFLKSDGFANRNFMQLIHDDSLTFKEDIQKAQVSGQGDSLHEHIANLAGSPAIKKGILQTVKVVDELVKVMGRHKPENIVIEMARENQTTQKGQKNSRERMKRIEEGIKELGSQILKEHPVENTQLQNEKLYLYYLQNGRDMYVDQELDINRLSDYDVDHIVPQSFLKDDSIDNKVLTRSDKARGKSDNVPSEEVVKKMKNYWRQLLNAKLITQRKFDNLTKAERGGLSELDKAGFIKRQLVETRQITKHVAQILDSRMNTKYDENDKLIREVKVITLKSKLVSDFRKDFQFYKVREINNYHHAHDAYLNAVVGTALIKKYPKLESEFVYGDYKVYDVRKMIAKSEQEIGKATAKYFFYSNIMNFFKTEITLANGEIRKRPLIETNGETGEIVWDKGRDFATVRKVLSMPQVNIVKKTEVQTGGFSKESILPKRNSDKLIARKKDWDPKKYGGFDSPTVAYSVLVVAKVEKGKSKKLKSVKELLGITIMERSSFEKNPIDFLEAKGYKEVKKDLIIKLPKYSLFELENGRKRMLASAGELQKGNELALPSKYVNFLYLASHYEKLKGSPEDNEQKQLFVEQHKHYLDEIIEQISEFSKRVILADANLDKVLSAYNKHRDKPIREQAENIIHLFTLTNLGAPAAFKYFDTTIDRKRYTSTKEVLDATLIHQSITGLYETRIDLSQLGGDGGGGGGGLLGRDLLTKLKAQIQFSTEGPQVTWEDRPAMCLVLNLEEEYRLHEKPVPPSIDPSWLQLFPMVWAEKAGMGLANQVPPVVVELKSDASPVAVRQYPMSKEAREGIRPHIQRFLDLGILVPCQSPWNTPLLPVKKPGTNDYRPVQDLREVNKRVQDIHPTVPNPYNLLSSLPPSHTWYSVLDLKDAFFCLKLHPNSQPLFAFEWRDPEKGNTGQLTWTRLPQGFKNSPTLFNEALHRDLASFRALNPQVVMLQYVDDLLVAAPTYRDCKEGTRRLLQELSKLGYRVSAKKAQLCREEVTYLGYLLKGGKRWLTPARKATVMKIPTPTTPRQVREFLGKAGFCRLFIPGFASLAAPLYPLTRPKVPFTWTEAHQEAFGRIKEALLSAPALALPDLTKPFALYVDEKEGVARGVLTQTLGPWRRPVAYLSKKLDPVASGWPTCLKAIAAVALLLKDADKLTLGQNVLVIAPHNLESIVRQPPDRWMTNARMTHYQSLLLNERVSFAPPAILNPATLLPVESDDTPIHICSEILAEETGTRPDLRDQPLPGVPAWYTDGSSFIMDGRRQAGAAIVDNKRTVWASNLPEGTSAQKAELIALTQALRLAEGKSINIYTDSRYAFATAHVHGAIYKQRGWLTSAGKDIKNKEEILALLEAIHLPKRVAIIHCPGHQRGTDPVATGNRKADEAAKQAAQSTRILTETTKNAGKRTADGSEFEKRTADGSEFESPKKKAKVE

SEQ ID NO: 6234 - protein, 2210 aa, synthetic construct
MPAAKRVKLDGGDKKYSIGLDIGTNSVGWAVITDEYKVPSKKFKVLGNTDRHSIKKNLIGALLFDSGETAEATRLKRTARRRYTRRKNRICYLQEIFSNEMAKVDDSFFHRLEESFLVEEDKKHERHPIFGNIVDEVAYHEKYPTIYHLRKKLVDSTDKADLRLIYLALAHMIKFRGHFLIEGDLNPDNSDVDKLFIQLVQTYNQLFEENPINASGVDAKAILSARLSKSRRLENLIAQLPGEKKNGLFGNLIALSLGLTPNFKSNFDLAEDAKLQLSKDTYDDDLDNLLAQIGDQYADLFLAAKNLSDAILLSDILRVNTEITKAPLSASMIKRYDEHHQDLTLLKALVRQQLPEKYKEIFFDQSKNGYAGYIDGGASQEEFYKFIKPILEKMDGTEELLVKLNREDLLRKQRTFDNGSIPHQIHLGELHAILRRQEDFYPFLKDNREKIEKILTFRIPYYVGPLARGNSRFAWMTRKSEETITPWNFEEVVDKGASAQSFIERMTNFDKNLPNEKVLPKHSLLYEYFTVYNELTKVKYVTEGMRKPAFLSGEQKKAIVDLLFKTNRKVTVKQLKEDYFKKIECFDSVEISGVEDRFNASLGTYHDLLKIIKDKDFLDNEENEDILEDIVLTLTLFEDREMIEERLKTYAHLFDDKVMKQLKRRRYTGWGRLSRKLINGIRDKQSGKTILDFLKSDGFANRNFMQLIHDDSLTFKEDIQKAQVSGQGDSLHEHIANLAGSPAIKKGILQTVKVVDELVKVMGRHKPENIVIEMARENQTTQKGQKNSRERMKRIEEGIKELGSQILKEHPVENTQLQNEKLYLYYLQNGRDMYVDQELDINRLSDYDVDHIVPQSFLKDDSIDNKVLTRSDKARGKSDNVPSEEVVKKMKNYWRQLLNAKLITQRKFDNLTKAERGGLSELDKAGFIKRQLVETRQITKHVAQILDSRMNTKYDENDKLIREVKVITLKSKLVSDFRKDFQFYKVREINNYHHAHDAYLNAVVGTALIKKYPKLESEFVYGDYKVYDVRKMIAKSEQEIGKATAKYFFYSNIMNFFKTEITLANGEIRKRPLIETNGETGEIVWDKGRDFATVRKVLSMPQVNIVKKTEVQTGGFSKESILPKRNSDKLIARKKDWDPKKYGGFDSPTVAYSVLVVAKVEKGKSKKLKSVKELLGITIMERSSFEKNPIDFLEAKGYKEVKKDLIIKLPKYSLFELENGRKRMLASAGELQKGNELALPSKYVNFLYLASHYEKLKGSPEDNEQKQLFVEQHKHYLDEIIEQISEFSKRVILADANLDKVLSAYNKHRDKPIREQAENIIHLFTLTNLGAPAAFKYFDTTIDRKRYTSTKEVLDATLIHQSITGLYETRIDLSQLGGDGGGGGGGTLGDQGSRGSDPLPEPRVTLTVEGIPTEFLVNTGAEHSVLTKPMGKMGSKRTVVAGATGSKVYPWTTKRLLKIGQKQVTHSFLVIPECPAPLLGRDLLTKLKAQIQFSTEGPQVTWEDRPAMCLVLNLEEEYRLHEKPVPPSIDPSWLQLFPMVWAEKAGMGLANQVPPVVVELKSDASPVAVRQYPMSKEAREGIRPHIQRFLDLGILVPCQSPWNTPLLPVKKPGTNDYRPVQDLREVNKRVQDIHPTVPNPYNLLSSLPPSHTWYSVLDLKDAFFCLKLHPNSQPLFAFEWRDPEKGNTGQLTWTRLPQGFKNSPTLFNEALHRDLASFRALNPQVVMLQYVDDLLVAAPTYRDCKEGTRRLLQELSKLGYRVSAKKAQLCREEVTYLGYLLKGGKRWLTPARKATVMKIPTPTTPRQVREFLGTAGFCRLWIPGFASLAAPLYPLTRPKVPFTWTEAHQEAFGRIKEALLSAPALALPDLTKPFALYVDEKEGVARGVLTQTLGPWRRPVAYLSKKLDPVASGWPTCLKAIAAVALLLKDADKLTLGQNVLVIAPHNLESIVRQPPDRWMTNARMTHYQSLLLNERVSFAPPAILNPATLLPVESDDTPIHICSEILAEETGTRPDLRDQPLPGVPAWYTDGSSFIMDGRRQAGAAIVDNKRTVWASNLPEGTSAQKAELIALTQALRLAEGKSINIYTDSRYAFATAHVHGAIYKQRGWLTSAGKDIKNKEEILALLEAIHLPKRVAIIHCPGHQRGTDPVATGNRKADEAAKQAAQSTRILTETTKNAGKRTADGSEFEKRTADGSEFESPKKKAKVE

SEQ ID NO: 6235 - protein, 2088 aa, synthetic construct
MPAAKRVKLDGGDKKYSIGLDIGTNSVGWAVITDEYKVPSKKFKVLGNTDRHSIKKNLIGALLFDSGETAEATRLKRTARRRYTRRKNRICYLQEIFSNEMAKVDDSFFHRLEESFLVEEDKKHERHPIFGNIVDEVAYHEKYPTIYHLRKKLVDSTDKADLRLIYLALAHMIKFRGHFLIEGDLNPDNSDVDKLFIQLVQTYNQLFEENPINASGVDAKAILSARLSKSRRLENLIAQLPGEKKNGLFGNLIALSLGLTPNFKSNFDLAEDAKLQLSKDTYDDDLDNLLAQIGDQYADLFLAAKNLSDAILLSDILRVNTEITKAPLSASMIKRYDEHHQDLTLLKALVRQQLPEKYKEIFFDQSKNGYAGYIDGGASQEEFYKFIKPILEKMDGTEELLVKLNREDLLRKQRTFDNGSIPHQIHLGELHAILRRQEDFYPFLKDNREKIEKILTFRIPYYVGPLARGNSRFAWMTRKSEETITPWNFEEVVDKGASAQSFIERMTNFDKNLPNEKVLPKHSLLYEYFTVYNELTKVKYVTEGMRKPAFLSGEQKKAIVDLLFKTNRKVTVKQLKEDYFKKIECFDSVEISGVEDRFNASLGTYHDLLKIIKDKDFLDNEENEDILEDIVLTLTLFEDREMIEERLKTYAHLFDDKVMKQLKRRRYTGWGRLSRKLINGIRDKQSGKTILDFLKSDGFANRNFMQLIHDDSLTFKEDIQKAQVSGQGDSLHEHIANLAGSPAIKKGILQTVKVVDELVKVMGRHKPENIVIEMARENQTTQKGQKNSRERMKRIEEGIKELGSQILKEHPVENTQLQNEKLYLYYLQNGRDMYVDQELDINRLSDYDVDHIVPQSFLKDDSIDNKVLTRSDKARGKSDNVPSEEVVKKMKNYWRQLLNAKLITQRKFDNLTKAERGGLSELDKAGFIKRQLVETRQITKHVAQILDSRMNTKYDENDKLIREVKVITLKSKLVSDFRKDFQFYKVREINNYHHAHDAYLNAVVGTALIKKYPKLESEFVYGDYKVYDVRKMIAKSEQEIGKATAKYFFYSNIMNFFKTEITLANGEIRKRPLIETNGETGEIVWDKGRDFATVRKVLSMPQVNIVKKTEVQTGGFSKESILPKRNSDKLIARKKDWDPKKYGGFDSPTVAYSVLVVAKVEKGKSKKLKSVKELLGITIMERSSFEKNPIDFLEAKGYKEVKKDLIIKLPKYSLFELENGRKRMLASAGELQKGNELALPSKYVNFLYLASHYEKLKGSPEDNEQKQLFVEQHKHYLDEIIEQISEFSKRVILADANLDKVLSAYNKHRDKPIREQAENIIHLFTLTNLGAPAAFKYFDTTIDRKRYTSTKEVLDATLIHQSITGLYETRIDLSQLGGDGGGGGGGTLNLEDEYRLYETSAEPEVSPGSTWLSDFPQAWAETGGMGLAVRQAPLIIPLKATSTPVSIKQYPMSQEAKLGIKPHIQRLLDQGILVPCQSPWNTPLLPVKKPGTNDYRPVQDLREVNKRVEDIHPTVPNPYNLLSGLPPSHRWYTVLDLKDAFFCLRLHPTSQPLFAFEWRDPGMGISGQLTWTRLPQGFKNSPTLFNEALHRDLADFRIQHPDLILLQYVDDILLAATSELDCQQGTRALLLTLGNLGYRASAKKAQLCQKQVKYLGYLLKEGQRWLTEARKETVMGQPTPKTPRQLREFLGKAGFCRLFIPGFAEMAAPLYPLTKPGTLFNWGPDQQKAYQEIKQALLTAPALGLPDLTKPFELFVDEKQGYAKGVLTQKLGPWRRPVAYLSKKLDPVAAGWPPCLRMVAAIAVLRKDAGKLTMGQPLVILAPHAVEALVKQPPDRWLSNARMTHYQAMLLDTDRVQFGPVVALNPATLLPLPEEGAPHDCLEILAETHGTRPDLTDQPIPDADHTWYTDGSSFLQEGQRKAGAAVTTETEVIWARALPAGTSAQRAELIALTQALKMAEGKRLNVYTDSRYAFATAHIHGEIYRRRGWLTSEGREIKNKSEILALLKALFLPKRLSIIHCLGHQKGDSAEARGNRLADQAAREAAIKTPPDTSTLLAGKRTADGSEFEKRTADGSEFESPKKKAKVE

SEQ ID NO: 6236 - protein, 2088 aa, synthetic construct
MPAAKRVKLDGGDKKYSIGLDIGTNSVGWAVITDEYKVPSKKFKVLGNTDRHSIKKNLIGALLFDSGETAEATRLKRTARRRYTRRKNRICYLQEIFSNEMAKVDDSFFHRLEESFLVEEDKKHERHPIFGNIVDEVAYHEKYPTIYHLRKKLVDSTDKADLRLIYLALAHMIKFRGHFLIEGDLNPDNSDVDKLFIQLVQTYNQLFEENPINASGVDAKAILSARLSKSRRLENLIAQLPGEKKNGLFGNLIALSLGLTPNFKSNFDLAEDAKLQLSKDTYDDDLDNLLAQIGDQYADLFLAAKNLSDAILLSDILRVNTEITKAPLSASMIKRYDEHHQDLTLLKALVRQQLPEKYKEIFFDQSKNGYAGYIDGGASQEEFYKFIKPILEKMDGTEELLVKLNREDLLRKQRTFDNGSIPHQIHLGELHAILRRQEDFYPFLKDNREKIEKILTFRIPYYVGPLARGNSRFAWMTRKSEETITPWNFEEVVDKGASAQSFIERMTNFDKNLPNEKVLPKHSLLYEYFTVYNELTKVKYVTEGMRKPAFLSGEQKKAIVDLLFKTNRKVTVKQLKEDYFKKIECFDSVEISGVEDRFNASLGTYHDLLKIIKDKDFLDNEENEDILEDIVLTLTLFEDREMIEERLKTYAHLFDDKVMKQLKRRRYTGWGRLSRKLINGIRDKQSGKTILDFLKSDGFANRNFMQLIHDDSLTFKEDIQKAQVSGQGDSLHEHIANLAGSPAIKKGILQTVKVVDELVKVMGRHKPENIVIEMARENQTTQKGQKNSRERMKRIEEGIKELGSQILKEHPVENTQLQNEKLYLYYLQNGRDMYVDQELDINRLSDYDVDHIVPQSFLKDDSIDNKVLTRSDKARGKSDNVPSEEVVKKMKNYWRQLLNAKLITQRKFDNLTKAERGGLSELDKAGFIKRQLVETRQITKHVAQILDSRMNTKYDENDKLIREVKVITLKSKLVSDFRKDFQFYKVREINNYHHAHDAYLNAVVGTALIKKYPKLESEFVYGDYKVYDVRKMIAKSEQEIGKATAKYFFYSNIMNFFKTEITLANGEIRKRPLIETNGETGEIVWDKGRDFATVRKVLSMPQVNIVKKTEVQTGGFSKESILPKRNSDKLIARKKDWDPKKYGGFDSPTVAYSVLVVAKVEKGKSKKLKSVKELLGITIMERSSFEKNPIDFLEAKGYKEVKKDLIIKLPKYSLFELENGRKRMLASAGELQKGNELALPSKYVNFLYLASHYEKLKGSPEDNEQKQLFVEQHKHYLDEIIEQISEFSKRVILADANLDKVLSAYNKHRDKPIREQAENIIHLFTLTNLGAPAAFKYFDTTIDRKRYTSTKEVLDATLIHQSITGLYETRIDLSQLGGDGGGGGGGTLNIEDEYRLHETSKGPDVPLGSTWLSDFPQAWAETGGMGLAVRQAPLIIPLKATSTPVSIKQYPMSQEARLGIKPHIQRLLDQGILVPCQSPWNTPLLPVKKPGTNDYRPVQDLREVNKRVEDIHPTVPNPYNLLSGLPPSHQWYTVLDLKDAFFCLRLHPTSQSLFAFEWRDPEMGISGQLTWTRLPQGFKNSPTLFNEALHRDLADFRIQHPDLILLQYVDDLLLAATSELDCQQGTRALLQTLGDLGYRASAKKAQICQKQVKYLGYLLKEGQRWLTEARKETVMGQPTPKTPRQLREFLGTAGFCRLWIPGFAEMAAPLYPLTKPGTLFEWGPDQQKAYQEIKQALLTAPALGLPDLTKPFELFVDEKQGYAKGVLTQKLGPWRRPVAYLSKKLDPVAAGWPPCLRMVAAIAVLTKDAGKLTMGQPLVILAPHAVEALVKQPPDRWLSNARMTHYQALLLDTDRVQFGPIVALNPATLLPLPEEGLQHDCLDILAEAHGTRPDLTDQPLPDADHTWYTDGSSFLQEGQRKAGAAVTTETEVVWAKALPAGTSAQRAELIALTQALKMAEGKKLNVYTDSRYAFATAHIHGEIYRRRGWLTSEGKEIKNKDEILALLKALFLPKRLSIIHCPGHQKGNRAEARGNRMADQAAREVATRETPETSTLLAGKRTADGSEFEKRTADGSEFESPKKKAKVE

SEQ ID NO: 6237 - protein, 2088 aa, synthetic construct
MPAAKRVKLDGGDKKYSIGLDIGTNSVGWAVITDEYKVPSKKFKVLGNTDRHSIKKNLIGALLFDSGETAEATRLKRTARRRYTRRKNRICYLQEIFSNEMAKVDDSFFHRLEESFLVEEDKKHERHPIFGNIVDEVAYHEKYPTIYHLRKKLVDSTDKADLRLIYLALAHMIKFRGHFLIEGDLNPDNSDVDKLFIQLVQTYNQLFEENPINASGVDAKAILSARLSKSRRLENLIAQLPGEKKNGLFGNLIALSLGLTPNFKSNFDLAEDAKLQLSKDTYDDDLDNLLAQIGDQYADLFLAAKNLSDAILLSDILRVNTEITKAPLSASMIKRYDEHHQDLTLLKALVRQQLPEKYKEIFFDQSKNGYAGYIDGGASQEEFYKFIKPILEKMDGTEELLVKLNREDLLRKQRTFDNGSIPHQIHLGELHAILRRQEDFYPFLKDNREKIEKILTFRIPYYVGPLARGNSRFAWMTRKSEETITPWNFEEVVDKGASAQSFIERMTNFDKNLPNEKVLPKHSLLYEYFTVYNELTKVKYVTEGMRKPAFLSGEQKKAIVDLLFKTNRKVTVKQLKEDYFKKIECFDSVEISGVEDRFNASLGTYHDLLKIIKDKDFLDNEENEDILEDIVLTLTLFEDREMIEERLKTYAHLFDDKVMKQLKRRRYTGWGRLSRKLINGIRDKQSGKTILDFLKSDGFANRNFMQLIHDDSLTFKEDIQKAQVSGQGDSLHEHIANLAGSPAIKKGILQTVKVVDELVKVMGRHKPENIVIEMARENQTTQKGQKNSRERMKRIEEGIKELGSQILKEHPVENTQLQNEKLYLYYLQNGRDMYVDQELDINRLSDYDVDHIVPQSFLKDDSIDNKVLTRSDKARGKSDNVPSEEVVKKMKNYWRQLLNAKLITQRKFDNLTKAERGGLSELDKAGFIKRQLVETRQITKHVAQILDSRMNTKYDENDKLIREVKVITLKSKLVSDFRKDFQFYKVREINNYHHAHDAYLNAVVGTALIKKYPKLESEFVYGDYKVYDVRKMIAKSEQEIGKATAKYFFYSNIMNFFKTEITLANGEIRKRPLIETNGETGEIVWDKGRDFATVRKVLSMPQVNIVKKTEVQTGGFSKESILPKRNSDKLIARKKDWDPKKYGGFDSPTVAYSVLVVAKVEKGKSKKLKSVKELLGITIMERSSFEKNPIDFLEAKGYKEVKKDLIIKLPKYSLFELENGRKRMLASAGELQKGNELALPSKYVNFLYLASHYEKLKGSPEDNEQKQLFVEQHKHYLDEIIEQISEFSKRVILADANLDKVLSAYNKHRDKPIREQAENIIHLFTLTNLGAPAAFKYFDTTIDRKRYTSTKEVLDATLIHQSITGLYETRIDLSQLGGDGGGGGGGTLNIEDEHRLHETSKEPDVSLGSTWLSDFPQAWAETGGMGLAVRQAPLIIPLKATSTPVSIKQYPMSQEARLGIKPHIQRLLDQGILVPCQSPWNTPLLPVKKPGTNDYRPVQDLREVNKRVEDIHPTVPNPYNLLSGLPPSHQWYTVLDLKDAFFCLRLHPTSQPLFAFEWRDPEMGISGQLTWTRLPQGFKNSPTLFNEALHRDLADFRIQHPDLILLQYVDDLLLAATSELDCQQGTRALLQTLGNLGYRASAKKAQICQKQVKYLGYLLKEGQRWLTEARKETVMGQPTPKTPRQLREFLGTAGFCRLWIPGFAEMAAPLYPLTKPGTLFNWGPDQQKAYQEIKQALLTAPALGLPDLTKPFELFVDEKQGYAKGVLTQKLGPWRRPVAYLSKKLDPVAAGWPPCLRMVAAIAVLTKDAGKLTMGQPLVILAPHAVEALVKQPPDRWLSNARMTHYQALLLDTDRVQFGPVVALNPATLLPLPEEGLQHNCLDILAEAHGTRPDLTDQPLPDADHTWYTDGSSLLQEGQRKAGAAVTTETEVIWAKALPAGTSAQRAELIALTQALKMAEGKKLNVYTDSRYAFATAHIHGEIYRRRGWLTSEGKEIKNKDEILALLKALFLPKRLSIIHCPGHQKGHSAEARGNRMADQAARKAAITETPDTSTLLAGKRTADGSEFEKRTADGSEFESPKKKAKVE

SEQ ID NO: 6238 - protein, 2088 aa, synthetic construct; identical to SEQ ID NO: 6237

SEQ ID NO: 6239 - protein, 2088 aa, synthetic construct
MPAAKRVKLDGGDKKYSIGLDIGTNSVGWAVITDEYKVPSKKFKVLGNTDRHSIKKNLIGALLFDSGETAEATRLKRTARRRYTRRKNRICYLQEIFSNEMAKVDDSFFHRLEESFLVEEDKKHERHPIFGNIVDEVAYHEKYPTIYHLRKKLVDSTDKADLRLIYLALAHMIKFRGHFLIEGDLNPDNSDVDKLFIQLVQTYNQLFEENPINASGVDAKAILSARLSKSRRLENLIAQLPGEKKNGLFGNLIALSLGLTPNFKSNFDLAEDAKLQLSKDTYDDDLDNLLAQIGDQYADLFLAAKNLSDAILLSDILRVNTEITKAPLSASMIKRYDEHHQDLTLLKALVRQQLPEKYKEIFFDQSKNGYAGYIDGGASQEEFYKFIKPILEKMDGTEELLVKLNREDLLRKQRTFDNGSIPHQIHLGELHAILRRQEDFYPFLKDNREKIEKILTFRIPYYVGPLARGNSRFAWMTRKSEETITPWNFEEVVDKGASAQSFIERMTNFDKNLPNEKVLPKHSLLYEYFTVYNELTKVKYVTEGMRKPAFLSGEQKKAIVDLLFKTNRKVTVKQLKEDYFKKIECFDSVEISGVEDRFNASLGTYHDLLKIIKDKDFLDNEENEDILEDIVLTLTLFEDREMIEERLKTYAHLFDDKVMKQLKRRRYTGWGRLSRKLINGIRDKQSGKTILDFLKSDGFANRNFMQLIHDDSLTFKEDIQKAQVSGQGDSLHEHIANLAGSPAIKKGILQTVKVVDELVKVMGRHKPENIVIEMARENQTTQKGQKNSRERMKRIEEGIKELGSQILKEHPVENTQLQNEKLYLYYLQNGRDMYVDQELDINRLSDYDVDHIVPQSFLKDDSIDNKVLTRSDKARGKSDNVPSEEVVKKMKNYWRQLLNAKLITQRKFDNLTKAERGGLSELDKAGFIKRQLVETRQITKHVAQILDSRMNTKYDENDKLIREVKVITLKSKLVSDFRKDFQFYKVREINNYHHAHDAYLNAVVGTALIKKYPKLESEFVYGDYKVYDVRKMIAKSEQEIGKATAKYFFYSNIMNFFKTEITLANGEIRKRPLIETNGETGEIVWDKGRDFATVRKVLSMPQVNIVKKTEVQTGGFSKESILPKRNSDKLIARKKDWDPKKYGGFDSPTVAYSVLVVAKVEKGKSKKLKSVKELLGITIMERSSFEKNPIDFLEAKGYKEVKKDLIIKLPKYSLFELENGRKRMLASAGELQKGNELALPSKYVNFLYLASHYEKLKGSPEDNEQKQLFVEQHKHYLDEIIEQISEFSKRVILADANLDKVLSAYNKHRDKPIREQAENIIHLFTLTNLGAPAAFKYFDTTIDRKRYTSTKEVLDATLIHQSITGLYETRIDLSQLGGDGGGGGGGTLNIEDEYRLHEISTEPDVSPGSTWLSDFPQAWAETGGMGLAVRQAPLIIPLKATSTPVSIKQYPMSQEAKLGIKPHIQRLLDQGILVPCQSPWNTPLLPVKKPGTNDYRPVQGLREVNKRVEDIHPTVPNPYNLLSGLPTSHRWYTVLDLKDAFFCLRLHPTSQPLFASEWRDPGMGISGQLTWTRLPQGFKNSPTLFNEALHRGLADFRIQHPDLILLQYVDDLLLAATSELDCQQGTRALLKTLGNLGYRASAKKAQICQKQVKYLGYLLREGQRWLTEARKETVMGQPTPKTPRQLREFLGTAGFCRLWIPRFAEMAAPLYPLTKPGTLFNWGPDQQKAYHEIKQALLTAPALGLPDLTKPFELFVDEKQGYAKGVLTQKLGPWRRPVAYLSKKLDPVAAGWPPCLRMVAAIAVLTKDAGKLTMGQPLVILAPHAVEALVKQPPDRWLSNARMTHYQAMLLDTDRVQFGPVVALNPATLLPLPEEGAPHDCLEILAETHGTEPDLTDQPIPDADHTWYTDGSSFLQEGQRKAGAAVTTETEVIWARALPAGTSAQRAELIALTQALKMAEGKRLNVYTDSRYAFATAHIHGEIYKRRGWLTSEGREIKNKSEILALLKALFLPKRLSIIHCLGHQKGDSAEARGNRLADQAAREAAIKTPPDTSTLLAGKRTADGSEFEKRTADGSEFESPKKKAKVE

SEQ ID NO: 6240 - protein, 2082 aa, synthetic construct
MPAAKRVKLDGGDKKYSIGLDIGTNSVGWAVITDEYKVPSKKFKVLGNTDRHSIKKNLIGALLFDSGETAEATRLKRTARRRYTRRKNRICYLQEIFSNEMAKVDDSFFHRLEESFLVEEDKKHERHPIFGNIVDEVAYHEKYPTIYHLRKKLVDSTDKADLRLIYLALAHMIKFRGHFLIEGDLNPDNSDVDKLFIQLVQTYNQLFEENPINASGVDAKAILSARLSKSRRLENLIAQLPGEKKNGLFGNLIALSLGLTPNFKSNFDLAEDAKLQLSKDTYDDDLDNLLAQIGDQYADLFLAAKNLSDAILLSDILRVNTEITKAPLSASMIKRYDEHHQDLTLLKALVRQQLPEKYKEIFFDQSKNGYAGYIDGGASQEEFYKFIKPILEKMDGTEELLVKLNREDLLRKQRTFDNGSIPHQIHLGELHAILRRQEDFYPFLKDNREKIEKILTFRIPYYVGPLARGNSRFAWMTRKSEETITPWNFEEVVDKGASAQSFIERMTNFDKNLPNEKVLPKHSLLYEYFTVYNELTKVKYVTEGMRKPAFLSGEQKKAIVDLLFKTNRKVTVKQLKEDYFKKIECFDSVEISGVEDRFNASLGTYHDLLKIIKDKDFLDNEENEDILEDIVLTLTLFEDREMIEERLKTYAHLFDDKVMKQLKRRRYTGWGRLSRKLINGIRDKQSGKTILDFLKSDGFANRNFMQLIHDDSLTFKEDIQKAQVSGQGDSLHEHIANLAGSPAIKKGILQTVKVVDELVKVMGRHKPENIVIEMARENQTTQKGQKNSRERMKRIEEGIKELGSQILKEHPVENTQLQNEKLYLYYLQNGRDMYVDQELDINRLSDYDVDHIVPQSFLKDDSIDNKVLTRSDKARGKSDNVPSEEVVKKMKNYWRQLLNAKLITQRKFDNLTKAERGGLSELDKAGFIKRQLVETRQITKHVAQILDSRMNTKYDENDKLIREVKVITLKSKLVSDFRKDFQFYKVREINNYHHAHDAYLNAVVGTALIKKYPKLESEFVYGDYKVYDVRKMIAKSEQEIGKATAKYFFYSNIMNFFKTEITLANGEIRKRPLIETNGETGEIVWDKGRDFATVRKVLSMPQVNIVKKTEVQTGGFSKESILPKRNSDKLIARKKDWDPKKYGGFDSPTVAYSVLVVAKVEKGKSKKLKSVKELLGITIMERSSFEKNPIDFLEAKGYKEVKKDLIIKLPKYSLFELENGRKRMLASAGELQKGNELALPSKYVNFLYLASHYEKLKGSPEDNEQKQLFVEQHKHYLDEIIEQISEFSKRVILADANLDKVLSAYNKHRDKPIREQAENIIHLFTLTNLGAPAAFKYFDTTIDRKRYTSTKEVLDATLIHQSITGLYETRIDLSQLGGDGGGGGGGTLQLDDEYRLYSPLVKPDQNIQFWLEQFPQAWAETAGMGLAKQVPPQVIQLKASATPVSVRQYPLSKEAQEGIRPHVQRLIQQGILVPVQSPWNTPLLPVRKPGTNDYRPVQDLREVNKRVQDIHPTVPNPYNLLCALPPQRSWYTVLDLKDAFFCLRLHPTSQPLFAFEWRDPGTGRTGQLTWTRLPQGFKNSPTIFNEALHRDLANFRIQHPQVTLLQYVDDLLLAGATKQDCLEGTKALLLELSDLGYRASAKKAQICRREVTYLGYSLRDGQRWLTEARKKTVVQIPAPTTAKQVREFLGTAGFCRLWIPGFATLAAPLYPLTKPKGEFSWAPEHQKAFDAIKKALLSAPALALPDVTKPFTLYVDERKGVARGVLTQTLGPWRRPVAYLSKKLDPVASGWPVCLKAIAAVAILVKDADKLTLGQNITVIAPHALENIVRQPPDRWMTNARMTHYQSLLLTERVTFAPPAALNPATLLPEETDEPVTHDCHQLLIEETGVRKDLTDIPLTGEVLTWFTDGSSYVVEGKRMAGAAVVDGTRTIWASSLPEGTSAQKAELMALTQALRLAEGKSINIYTDSRYAFATAHVHGAIYKQRGWLTSAGREIKNKEEILSLLEALHLPKRLAIIHCPGHQKAKDPISRGNQMADRVAKQAAQGVNLLAGKRTADGSEFEKRTADGSEFESPKKKAKVE

SEQ ID NO: 6241 - protein, 2079 aa, synthetic construct
MPAAKRVKLDGGDKKYSIGLDIGTNSVGWAVITDEYKVPSKKFKVLGNTDRHSIKKNLIGALLFDSGETAEATRLKRTARRRYTRRKNRICYLQEIFSNEMAKVDDSFFHRLEESFLVEEDKKHERHPIFGNIVDEVAYHEKYPTIYHLRKKLVDSTDKADLRLIYLALAHMIKFRGHFLIEGDLNPDNSDVDKLFIQLVQTYNQLFEENPINASGVDAKAILSARLSKSRRLENLIAQLPGEKKNGLFGNLIALSLGLTPNFKSNFDLAEDAKLQLSKDTYDDDLDNLLAQIGDQYADLFLAAKNLSDAILLSDILRVNTEITKAPLSASMIKRYDEHHQDLTLLKALVRQQLPEKYKEIFFDQSKNGYAGYIDGGASQEEFYKFIKPILEKMDGTEELLVKLNREDLLRKQRTFDNGSIPHQIHLGELHAILRRQEDFYPFLKDNREKIEKILTFRIPYYVGPLARGNSRFAWMTRKSEETITPWNFEEVVDKGASAQSFIERMTNFDKNLPNEKVLPKHSLLYEYFTVYNELTKVKYVTEGMRKPAFLSGEQKKAIVDLLFKTNRKVTVKQLKEDYFKKIECFDSVEISGVEDRFNASLGTYHDLLKIIKDKDFLDNEENEDILEDIVLTLTLFEDREMIEERLKTYAHLFDDKVMKQLKRRRYTGWGRLSRKLINGIRDKQSGKTILDFLKSDGFANRNFMQLIHDDSLTFKEDIQKAQVSGQGDSLHEHIANLAGSPAIKKGILQTVKVVDELVKVMGRHKPENIVIEMARENQTTQKGQKNSRERMKRIEEGIKELGSQILKEHPVENTQLQNEKLYLYYLQNGRDMYVDQELDINRLSDYDVDHIVPQSFLKDDSIDNKVLTRSDKARGKSDNVPSEEVVKKMKNYWRQLLNAKLITQRKFDNLTKAERGGLSELDKAGFIKRQLVETRQITKHVAQILDSRMNTKYDENDKLIREVKVITLKSKLVSDFRKDFQFYKVREINNYHHAHDAYLNAVVGTALIKKYPKLESEFVYGDYKVYDVRKMIAKSEQEIGKATAKYFFYSNIMNFFKTEITLANGEIRKRPLIETNGETGEIVWDKGRDFATVRKVLSMPQVNIVKKTEVQTGGFSKESILPKRNSDKLIARKKDWDPKKYGGFDSPTVAYSVLVVAKVEKGKSKKLKSVKELLGITIMERSSFEKNPIDFLEAKGYKEVKKDLIIKLPKYSLFELENGRKRMLASAGELQKGNELALPSKYVNFLYLASHYEKLKGSPEDNEQKQLFVEQHKHYLDEIIEQISEFSKRVILADANLDKVLSAYNKHRDKPIREQAENIIHLFTLTNLGAPAAFKYFDTTIDRKRYTSTKEVLDATLIHQSITGLYETRIDLSQLGGDGGGGGGGIPWLMKKPLQLTTLVPLQEYEERLLKQTMLTGSYKEKLQSLFLKYDALWQHWENQVGHRRIKPHHIATGTVNPRPQKQYPINPKAKASIQTVINDLLKQGVLIQQNSIMNTPVYPVPKPDGKWRMVLDYREVNKTIPLIAAQNQHSAGILSSIFRGKYKTTLDLSNGFWAHSITPESYWLTAFTWLGQQYCWTRLPQGFLNSPALFNADVVDLLKEVPNVQVYVDDIYISHDDPREHLEQLEKVFSLLLNAGYVVSLKKSEIAQHEVEFLGFNITKEGRGLTETFKQKLLNITPPRDLKQLQSILGKLNFARNFIPNFSELVKPLYNIIATAPGKYITWTTDNSQQLQNIISMLNSAENLEERNPEVRLIMKVNTSPSAGYIRFYNEFAKRPIMYLNYVYTKAEVKFTNTEKLLTTIHKGLIKALDLGMGQEILVYSPIVSMTKIQKTPLPERKALPIRWITWMSYLEDPRIQFHYDKTLPELQQVPTVTDDIIAKIKHPSEFSMVFYTDGSAIKHPNVNKSHNAGMGIAQVQFKPEFTVINTWSIPLGDHTAQLAEVAAVEFACKKALKIDGPVLIVTDSFYVAESVNKELPYWQSNGFFNNKKKPLKHVSKWKSIADCIQLKPDIIIIHEKGHQPTASTFHTEGNNLADKLATQGSYVVNAGKRTADGSEFEKRTADGSEFESPKKKAKVE

SEQ ID NO: 6242 - protein, 2086 aa, synthetic construct
MPAAKRVKLDGGDKKYSIGLDIGTNSVGWAVITDEYKVPSKKFKVLGNTDRHSIKKNLIGALLFDSGETAEATRLKRTARRRYTRRKNRICYLQEIFSNEMAKVDDSFFHRLEESFLVEEDKKHERHPIFGNIVDEVAYHEKYPTIYHLRKKLVDSTDKADLRLIYLALAHMIKFRGHFLIEGDLNPDNSDVDKLFIQLVQTYNQLFEENPINASGVDAKAILSARLSKSRRLENLIAQLPGEKKNGLFGNLIALSLGLTPNFKSNFDLAEDAKLQLSKDTYDDDLDNLLAQIGDQYADLFLAAKNLSDAILLSDILRVNTEITKAPLSASMIKRYDEHHQDLTLLKALVRQQLPEKYKEIFFDQSKNGYAGYIDGGASQEEFYKFIKPILEKMDGTEELLVKLNREDLLRKQRTFDNGSIPHQIHLGELHAILRRQEDFYPFLKDNREKIEKILTFRIPYYVGPLARGNSRFAWMTRKSEETITPWNFEEVVDKGASAQSFIERMTNFDKNLPNEKVLPKHSLLYEYFTVYNELTKVKYVTEGMRKPAFLSGEQKKAIVDLLFKTNRKVTVKQLKEDYFKKIECFDSVEISGVEDRFNASLGTYHDLLKIIKDKDFLDNEENEDILEDIVLTLTLFEDREMIEERLKTYAHLFDDKVMKQLKRRRYTGWGRLSRKLINGIRDKQSGKTILDFLKSDGFANRNFMQLIHDDSLTFKEDIQKAQVSGQGDSLHEHIANLAGSPAIKKGILQTVKVVDELVKVMGRHKPENIVIEMARENQTTQKGQKNSRERMKRIEEGIKELGSQILKEHPVENTQLQNEKLYLYYLQNGRDMYVDQELDINRLSDYDVDHIVPQSFLKDDSIDNKVLTRSDKARGKSDNVPSEEVVKKMKNYWRQLLNAKLITQRKFDNLTKAERGGLSELDKAGFIKRQLVETRQITKHVAQILDSRMNTKYDENDKLIREVKVITLKSKLVSDFRKDFQFYKVREINNYHHAHDAYLNAVVGTALIKKYPKLESEFVYGDYKVYDVRKMIAKSEQEIGKATAKYFFYSNIMNFFKTEITLANGEIRKRPLIETNGETGEIVWDKGRDFATVRKVLSMPQVNIVKKTEVQTGGFSKESILPKRNSDKLIARKKDWDPKKYGGFDSPTVAYSVLVVAKVEKGKSKKLKSVKELLGITIMERSSFEKNPIDFLEAKGYKEVKKDLIIKLPKYSLFELENGRKRMLASAGELQKGNELALPSKYVNFLYLASHYEKLKGSPEDNEQKQLFVEQHKHYLDEIIEQISEFSKRVILADANLDKVLSAYNKHRDKPIREQAENIIHLFTLTNLGAPAAFKYFDTTIDRKRYTSTKEVLDATLIHQSITGLYETRIDLSQLGGDGGGGGGGVLNLEEEYRLHEKPVPSSIDPSWLQLFPTVWAERAGMGLANQVPPVVVELRSGASPVAVRQYPMSKEAREGIRPHIQRFLDLGVLVPCQSPWNTPLLPVKKPGTNDYRPVQDLREINKRVQDIHPTVPNPYNLLSSLPPSHTWYSVLDLKDAFFCLKLHPNSQPLFAFEWRDPEKGNTGQLTWTRLPQGFKNSPTLFDEALHRDLAPFRALNPQVVLLQYVDDLLVAAPTYRDCKEGTQKLLQELSKLGYRVSAKKAQLCQKEVTYLGYLLKEGKRWLTPARKATVMKIPPPTTPRQVREFLGTAGFCRLWIPGFASLAAPLYPLTKESIPFIWTEEHQKAFDRIKEALLSAPALALPDLTKPFTLYVDERAGVARGVLTQTLGPWRRPVAYLSKKLDPVASGWPTCLKAVAAVALLLKDADKLTLGQNVTVIASHSLESIVRQPPDRWMTNARMTHYQSLLLNERVSFAPPAVLNPATLLPVESEATPVHRCSEILAEETGTRRDLKDQPLPGVPAWYTDGSSFIAEGKRRAGAAIVDGKRTVWASSLPEGTSAQKAELVALTQALRLAEGKDINIYTDSRYAFATAHIHGAIYKQRGLLTSAGKDIKNKEEILALLEAIHLPKRVAIIHCPGHQKGNDPVATGNRRADEAAKQAALSTRVLAETTKPAGKRTADGSEFEKRTADGSEFESPKKKAKVE

SEQ ID NO: 6243 - protein, 2086 aa, synthetic construct
MPAAKRVKLDGGDKKYSIGLDIGTNSVGWAVITDEYKVPSKKFKVLGNTDRHSIKKNLIGALLFDSGETAEATRLKRTARRRYTRRKNRICYLQEIFSNEMAKVDDSFFHRLEESFLVEEDKKHERHPIFGNIVDEVAYHEKYPTIYHLRKKLVDSTDKADLRLIYLALAHMIKFRGHFLIEGDLNPDNSDVDKLFIQLVQTYNQLFEENPINASGVDAKAILSARLSKSRRLENLIAQLPGEKKNGLFGNLIALSLGLTPNFKSNFDLAEDAKLQLSKDTYDDDLDNLLAQIGDQYADLFLAAKNLSDAILLSDILRVNTEITKAPLSASMIKRYDEHHQDLTLLKALVRQQLPEKYKEIFFDQSKNGYAGYIDGGASQEEFYKFIKPILEKMDGTEELLVKLNREDLLRKQRTFDNGSIPHQIHLGELHAILRRQEDFYPFLKDNREKIEKILTFRIPYYVGPLARGNSRFAWMTRKSEETITPWNFEEVVDKGASAQSFIERMTNFDKNLPNEKVLPKHSLLYEYFTVYNELTKVKYVTEGMRKPAFLSGEQKKAIVDLLFKTNRKVTVKQLKEDYFKKIECFDSVEISGVEDRFNASLGTYHDLLKIIKDKDFLDNEENEDILEDIVLTLTLFEDREMIEERLKTYAHLFDDKVMKQLKRRRYTGWGRLSRKLINGIRDKQSGKTILDFLKSDGFANRNFMQLIHDDSLTFKEDIQKAQVSGQGDSLHEHIANLAGSPAIKKGILQTVKVVDELVKVMGRHKPENIVIEMARENQTTQKGQKNSRERMKRIEEGIKELGSQILKEHPVENTQLQNEKLYLYYLQNGRDMYVDQELDINRLSDYDVDHIVPQSFLKDDSIDNKVLTRSDKARGKSDNVPSEEVVKKMKNYWRQLLNAKLITQRKFDNLTKAERGGLSELDKAGFIKRQLVETRQITKHVAQILDSRMNTKYDENDKLIREVKVITLKSKLVSDFRKDFQFYKVREINNYHHAHDAYLNAVVGTALIKKYPKLESEFVYGDYKVYDVRKMIAKSEQEIGKATAKYFFYSNIMNFFKTEITLANGEIRKRPLIETNGETGEIVWDKGRDFATVRKVLSMPQVNIVKKTEVQTGGFSKESILPKRNSDKLIARKKDWDPKKYGGFDSPTVAYSVLVVAKVEKGKSKKLKSVKELLGITIMERSSFEKNPIDFLEAKGYKEVKKDLIIKLPKYSLFELENGRKRMLASAGELQKGNELALPSKYVNFLYLASHYEKLKGSPEDNEQKQLFVEQHKHYLDEIIEQISEFSKRVILADANLDKVLSAYNKHRDKPIREQAENIIHLFTLTNLGAPAAFKYFDTTIDRKRYTSTKEVLDATLIHQSITGLYETRIDLSQLGGDGGGGGGGVLNLEEEYRLHEKPVPSSIDPSWLQLFPTVWAERAGMGLANQVPPVVVELRSGASPVAVRQYPMSKEAREGIRPHIQRFLDLGVLVPCQSPWNTPLLPVKKPGTNDYRPVQDLREINKRVQDIHPTVPNPYNLLSSLPPSHTWYSVLDLKDAFFCLKLHPNSQPLFAFEWRDPEKGNTGQLTWTRLPQGFKNSPTLFNEALHRDLAPFRALNPQVVLLQYVDDLLVAAPTYRDCKEGTQKLLQELSKLGYRVSAKKAQLCQKEVTYLGYLLKEGKRWLTPARKATVMKIPPPTTPRQVREFLGKAGFCRLFIPGFASLAAPLYPLTKPSIPFIWTEEHQKAFDRIKEALLSAPALALPDLTKPFTLYVDERAGVARGVLTQTLGPWRRPVAYLSKKLDPVASGWPTCLKAVAAVALLLKDADKLTLGQNVTVIASHSLESIVRQPPDRWMTNARMTHYQSLLLNERVSFAPPAVLNPATLLPVESEATPVHRCSEILAEETGTRRDLKDQPLPGVPAWYTDGSSFIAEGKRRAGAAIVDGKRTVWASSLPEGTSAQKAELVALTQALRLAEGKDINIYTDSRYAFATAHIHGAIYKQRGWLTSAGKDIKNKEEILALLEAIHLPKRVAIIHCPGHQKGNDPVATGNRRADEAAKQAALSTRVLAETTKPAGKRTADGSEFEKRTADGSEFESPKKKAKVE

SEQ ID NO: 6244 - protein, 2091 aa, synthetic construct
MPAAKRVKLDGGDKKYSIGLDIGTNSVGWAVITDEYKVPSKKFKVLGNTDRHSIKKNLIGALLFDSGETAEATRLKRTARRRYTRRKNRICYLQEIFSNEMAKVDDSFFHRLEESFLVEEDKKHERHPIFGNIVDEVAYHEKYPTIYHLRKKLVDSTDKADLRLIYLALAHMIKFRGHFLIEGDLNPDNSDVDKLFIQLVQTYNQLFEENPINASGVDAKAILSARLSKSRRLENLIAQLPGEKKNGLFGNLIALSLGLTPNFKSNFDLAEDAKLQLSKDTYDDDLDNLLAQIGDQYADLFLAAKNLSDAILLSDILRVNTEITKAPLSASMIKRYDEHHQDLTLLKALVRQQLPEKYKEIFFDQSKNGYAGYIDGGASQEEFYKFIKPILEKMDGTEELLVKLNREDLLRKQRTFDNGSIPHQIHLGELHAILRRQEDFYPFLKDNREKIEKILTFRIPYYVGPLARGNSRFAWMTRKSEETITPWNFEEVVDKGASAQSFIERMTNFDKNLPNEKVLPKHSLLYEYFTVYNELTKVKYVTEGMRKPAFLSGEQKKAIVDLLFKTNRKVTVKQLKEDYFKKIECFDSVEISGVEDRFNASLGTYHDLLKIIKDKDFLDNEENEDILEDIVLTLTLFEDREMIEERLKTYAHLFDDKVMKQLKRRRYTGWGRLSRKLINGIRDKQSGKTILDFLKSDGFANRNFMQLIHDDSLTFKEDIQKAQVSGQGDSLHEHIANLAGSPAIKKGILQTVKVVDELVKVMGRHKPENIVIEMARENQTTQKGQKNSRERMKRIEEGIKELGSQILKEHPVENTQLQNEKLYLYYLQNGRDMYVDQELDINRLSDYDVDHIVPQSFLKDDSIDNKVLTRSDKARGKSDNVPSEEVVKKMKNYWRQLLNAKLITQRKFDNLTKAERGGLSELDKAGFIKRQLVETRQITKHVAQILDSRMNTKYDENDKLIREVKVITLKSKLVSDFRKDFQFYKVREINNYHHAHDAYLNAVVGTALIKKYPKLESEFVYGDYKVYDVRKMIAKSEQEIGKATAKYFFYSNIMNFFKTEITLANGEIRKRPLIETNGETGEIVWDKGRDFATVRKVLSMPQVNIVKKTEVQTGGFSKESILPKRNSDKLIARKKDWDPKKYGGFDSPTVAYSVLVVAKVEKGKSKKLKSVKELLGITIMERSSFEKNPIDFLEAKGYKEVKKDLIIKLPKYSLFELENGRKRMLASAGELQKGNELALPSKYVNFLYLASHYEKLKGSPEDNEQKQLFVEQHKHYLDEIIEQISEFSKRVILADANLDKVLSAYNKHRDKPIREQAENIIHLFTLTNLGAPAAFKYFDTTIDRKRYTSTKEVLDATLIHQSITGLYETRIDLSQLGGDGGGGGGGGTAPLEEEYRLFLEAPIQNVTLLEQWKREIPKVWAEINPPGLASTQAPIHVQLLSTALPVRVRQYPITLEAKRSLRETIRKFRAAGILRPVHSPWNTPLLPVRKSGTSEYRMVQDLREVNKRVETIHPTVPNPYTLLSLLPPDRIWYSVLDLKDAFFCIPLAPESQLIFAFEWADAEEGESGQLTWTRLPQGFKNSPTLFNEALNRDLQGFRLDHPSVSLLQYVDDLLIAADTQAACLSATRDLLMTLAELGYRVSGKKAQLCQEEVTYLGFKIHKGSRSLSNSRTQAILQIPVPKTKRQVREFLGTIGYCRLWIPGFAELAQPLYAATRPGNDPLVWGEKEEEAFQSLKLALTQPPALALPSLDKPFQLFVEETSGAAKGVLTQALGPWKRPVAYLSKRLDPVAAGWPRCLRAIAAAALLTREASKLTFGQDIEITSSHNLESLLRSPPDKWLTNARITQYQVLLLDPPRVRFKQTAALNPATLLPETDDTLPIHHCLDTLDSLTSTRPDLTDQPLAQAEATLFTDGSSYIRDGKRYAGAAVVTLDSVIWAEPLPIGTSAQKAELIALTKALEWSKDKSVNIYTDSRYAFATLHVHGMIYRERGWLTAGGKAIKNAPEILALLTAVWLPKRVAVMHCKGHQKDDAPTSTGNRRADEVAREVAIRPLSTQATISAGKRTADGSEFEKRTADGSEFESPKKKAKVE

SEQ ID NO: 6245 - protein, 2095 aa, synthetic construct
MPAAKRVKLDGGDKKYSIGLDIGTNSVGWAVITDEYKVPSKKFKVLGNTDRHSIKKNLIGALLFDSGETAEATRLKRTARRRYTRRKNRICYLQEIFSNEMAKVDDSFFHRLEESFLVEEDKKHERHPIFGNIVDEVAYHEKYPTIYHLRKKLVDSTDKADLRLIYLALAHMIKFRGHFLIEGDLNPDNSDVDKLFIQLVQTYNQLFEENPINASGVDAKAILSARLSKSRRLENLIAQLPGEKKNGLFGNLIALSLGLTPNFKSNFDLAEDAKLQLSKDTYDDDLDNLLAQIGDQYADLFLAAKNLSDAILLSDILRVNTEITKAPLSASMIKRYDEHHQDLTLLKALVRQQLPEKYKEIFFDQSKNGYAGYIDGGASQEEFYKFIKPILEKMDGTEELLVKLNREDLLRKQRTFDNGSIPHQIHLGELHAILRRQEDFYPFLKDNREKIEKILTFRIPYYVGPLARGNSRFAWMTRKSEETITPWNFEEVVDKGASAQSFIERMTNFDKNLPNEKVLPKHSLLYEYFTVYNELTKVKYVTEGMRKPAFLSGEQKKAIVDLLFKTNRKVTVKQLKEDYFKKIECFDSVEISGVEDRFNASLGTYHDLLKIIKDKDFLDNEENEDILEDIVLTLTLFEDREMIEERLKTYAHLFDDKVMKQLKRRRYTGWGRLSRKLINGIRDKQSGKTILDFLKSDGFANRNFMQLIHDDSLTFKEDIQKAQVSGQGDSLHEHIANLAGSPAIKKGILQTVKVVDELVKVMGRHKPENIVIEMARENQTTQKGQKNSRERMKRIEEGIKELGSQILKEHPVENTQLQNEKLYLYYLQNGRDMYVDQELDINRLSDYDVDHIVPQSFLKDDSIDNKVLTRSDKARGKSDNVPSEEVVKKMKNYWRQLLNAKLITQRKFDNLTKAERGGLSELDKAGFIKRQLVETRQITKHVAQILDSRMNTKYDENDKLIREVKVITLKSKLVSDFRKDFQFYKVREINNYHHAHDAYLNAVVGTALIKKYPKLESEFVYGDYKVYDVRKMIAKSEQEIGKATAKYFFYSNIMNFFKTEITLANGEIRKRPLIETNGETGEIVWDKGRDFATVRKVLSMPQVNIVKKTEVQTGGFSKESILPKRNSDKLIARKKDWDPKKYGGFDSPTVAYSVLVVAKVEKGKSKKLKSVKELLGITIMERSSFEKNPIDFLEAKGYKEVKKDLIIKLPKYSLFELENGRKRMLASAGELQKGNELALPSKYVNFLYLASHYEKLKGSPEDNEQKQLFVEQHKHYLDEIIEQISEFSKRVILADANLDKVLSAYNKHRDKPIREQAENIIHLFTLTNLGAPAAFKYFDTTIDRKRYTSTKEVLDATLIHQSITGLYETRIDLSQLGGDGGGGGGGGTVSLQDEHRLFDIPVTTSLPDVWLQDFPQAWAETGGLGRAKCQAPIIIDLKPTAVPVSIKQYPMSLEAHMGIRQHIIKFLELGVLRPCRSPWNTPLLPVKKPGTQDYRPVQDLREINKRTVDIHPTVPNPYNLLSTLKPDYSWYTVLDLKDAFFCLPLAPQSQELFAFEWKDPERGISGQLTWTRLPQGFKNSPTLFNEALHRDLTDFRTQHPEVTLLQYVDDLLLAAPTKKACTQGTRHLLQELGEKGYRASAKKAQICQTKVTYLGYILSEGKRWLTPGRIETVARIPPPRNPREVREFLGTAGFCRLWIPGFAELAAPLYALTKPSTPFTWQTEHQLAFEALKKALLSAPALGLPDTSKPFTLFLDERQGIAKGVLTQKLGPWKRPVAYLSKKLDPVAAGWPPCLRIMAATAMLVKDSAKLTLGQPLTVITPHTLEAIVRQPPDRWITNARLTHYQALLLDTDRVQFGPPVTLNPATLLPVPENQPSPHDCRQVLAETHGTREDLKDQELPDADHTWYTDGSSYLDSGTRRAGAAVVDGHNTIWAQSLPPGTSAQKAELIALTKALELSKGKKANIYTDSRYAFATAHTHGSIYERRGWLTSEGKEIKNKAEIIALLKALFLPQEVAIIHCPGHQKGQDPVAVGNRQADRVARQAAMAEVLTLATEPDNTSHITAGKRTADGSEFEKRTADGSEFESPKKKAKVE

SEQ ID NO: 6246 - protein, 2087 aa, synthetic construct
MPAAKRVKLDGGDKKYSIGLDIGTNSVGWAVITDEYKVPSKKFKVLGNTDRHSIKKNLIGALLFDSGETAEATRLKRTARRRYTRRKNRICYLQEIFSNEMAKVDDSFFHRLEESFLVEEDKKHERHPIFGNIVDEVAYHEKYPTIYHLRKKLVDSTDKADLRLIYLALAHMIKFRGHFLIEGDLNPDNSDVDKLFIQLVQTYNQLFEENPINASGVDAKAILSARLSKSRRLENLIAQLPGEKKNGLFGNLIALSLGLTPNFKSNFDLAEDAKLQLSKDTYDDDLDNLLAQIGDQYADLFLAAKNLSDAILLSDILRVNTEITKAPLSASMIKRYDEHHQDLTLLKALVRQQLPEKYKEIFFDQSKNGYAGYIDGGASQEEFYKFIKPILEKMDGTEELLVKLNREDLLRKQRTFDNGSIPHQIHLGELHAILRRQEDFYPFLKDNREKIEKILTFRIPYYVGPLARGNSRFAWMTRKSEETITPWNFEEVVDKGASAQSFIERMTNFDKNLPNEKVLPKHSLLYEYFTVYNELTKVKYVTEGMRKPAFLSGEQKKAIVDLLFKTNRKVTVKQLKEDYFKKIECFDSVEISGVEDRFNASLGTYHDLLKIIKDKDFLDNEENEDILEDIVLTLTLFEDREMIEERLKTYAHLFDDKVMKQLKRRRYTGWGRLSRKLINGIRDKQSGKTILDFLKSDGFANRNFMQLIHDDSLTFKEDIQKAQVSGQGDSLHEHIANLAGSPAIKKGILQTVKVVDELVKVMGRHKPENIVIEMARENQTTQKGQKNSRERMKRIEEGIKELGSQILKEHPVENTQLQNEKLYLYYLQNGRDMYVDQELDINRLSDYDVDHIVPQSFLKDDSIDNKVLTRSDKARGKSDNVPSEEVVKKMKNYWRQLLNAKLITQRKFDNLTKAERGGLSELDKAGFIKRQLVETRQITKHVAQILDSRMNTKYDENDKLIREVKVITLKSKLVSDFRKDFQFYKVREINNYHHAHDAYLNAVVGTALIKKYPKLESEFVYGDYKVYDVRKMIAKSEQEIGKATAKYFFYSNIMNFFKTEITLANGEIRKRPLIETNGETGEIVWDKGRDFATVRKVLSMPQVNIVKKTEVQTGGFSKESILPKRNSDKLIARKKDWDPKKYGGFDSPTVAYSVLVVAKVEKGKSKKLKSVKELLGITIMERSSFEKNPIDFLEAKGYKEVKKDLIIKLPKYSLFELENGRKRMLASAGELQKGNELALPSKYVNFLYLASHYEKLKGSPEDNEQKQLFVEQHKHYLDEIIEQISEFSKRVILADANLDKVLSAYNKHRDKPIREQAENIIHLFTLTNLGAPAAFKYFDTTIDRKRYTSTKEVLDATLIHQSITGLYETRIDLSQLGGDGGGGGGGGVLNLEEEYRLHEKPVPSSIDPSWLQLFPTVWAERAGMGLANQVPPVVVELRSGASPVAVRQYPMSKEAREGIRPHIQKFLDLGVLVPCRSPWNTPLLPVKKPGTNDYRPVQDLREINKRVQDIHPTVPNPYNLLSSLPPSYTWYSVLDLKDAFFCLRLHPNSQPLFAFEWKDPEKGNTGQLTWTRLPQGFKNSPTLFNEALHRDLAPFRALNPQVVLLQYVDDLLVAAPTYEDCKKGTQKLLQELSKLGYRVSAKKAQLCQREVTYLGYLLKEGKRWLTPARKATVMKIPVPTTPRQVREFLGKAGFCRLFIPGFASLAAPLYPLTKPSIPFIWTEEHQQAFDHIKKALLSAPALALPDLTKPFTLYIDERAGVARGVLTQTLGPWRRPVAYLSKKLDPVASGWPTCLKAVAAVALLLKDADKLTLGQNVTVIASHSLESIVRQPPDRWMTNARMTHYQSLLLNERVSFAPPAVLNPATLLPVESEATPVHRCSEILAEETGTRRDLEDQPLPGVPTWYTDGSSFITEGKRRAGAPIVDGKRTVWASSLPEGTSAQKAELVALTQALRLAEGKNINIYTDSRYAFATAHIHGAIYKQRGWLTSAGKDIKNKEEILALLEAIHLPRRVAIIHCPGHQRGSNPVATGNRRADEAAKQAALSTRVLAGTTKPAGKRTADGSEFEKRTADGSEFESPKKKAKVE

SEQ ID NO: 6247 - protein, 2211 aa, synthetic construct
MPAAKRVKLDGGDKKYSIGLDIGTNSVGWAVITDEYKVPSKKFKVLGNTDRHSIKKNLIGALLFDSGETAEATRLKRTARRRYTRRKNRICYLQEIFSNEMAKVDDSFFHRLEESFLVEEDKKHERHPIFGNIVDEVAYHEKYPTIYHLRKKLVDSTDKADLRLIYLALAHMIKFRGHFLIEGDLNPDNSDVDKLFIQLVQTYNQLFEENPINASGVDAKAILSARLSKSRRLENLIAQLPGEKKNGLFGNLIALSLGLTPNFKSNFDLAEDAKLQLSKDTYDDDLDNLLAQIGDQYADLFLAAKNLSDAILLSDILRVNTEITKAPLSASMIKRYDEHHQDLTLLKALVRQQLPEKYKEIFFDQSKNGYAGYIDGGASQEEFYKFIKPILEKMDGTEELLVKLNREDLLRKQRTFDNGSIPHQIHLGELHAILRRQEDFYPFLKDNREKIEKILTFRIPYYVGPLARGNSRFAWMTRKSEETITPWNFEEVVDKGASAQSFIERMTNFDKNLPNEKVLPKHSLLYEYFTVYNELTKVKYVTEGMRKPAFLSGEQKKAIVDLLFKTNRKVTVKQLKEDYFKKIECFDSVEISGVEDRFNASLGTYHDLLKIIKDKDFLDNEENEDILEDIVLTLTLFEDREMIEERLKTYAHLFDDKVMKQLKRRRYTGWGRLSRKLINGIRDKQSGKTILDFLKSDGFANRNFMQLIHDDSLTFKEDIQKAQVSGQGDSLHEHIANLAGSPAIKKGILQTVKVVDELVKVMGRHKPENIVIEMARENQTTQKGQKNSRERMKRIEEGIKELGSQILKEHPVENTQLQNEKLYLYYLQNGRDMYVDQELDINRLSDYDVDHIVPQSFLKDDSIDNKVLTRSDKARGKSDNVPSEEVVKKMKNYWRQLLNAKLITQRKFDNLTKAERGGLSELDKAGFIKRQLVETRQITKHVAQILDSRMNTKYDENDKLIREVKVITLKSKLVSDFRKDFQFYKVREINNYHHAHDAYLNAVVGTALIKKYPKLESEFVYGDYKVYDVRKMIAKSEQEIGKATAKYFFYSNIMNFFKTEITLANGEIRKRPLIETNGETGEIVWDKGRDFATVRKVLSMPQVNIVKKTEVQTGGFSKESILPKRNSDKLIARKKDWDPKKYGGFDSPTVAYSVLVVAKVEKGKSKKLKSVKELLGITIMERSSFEKNPIDFLEAKGYKEVKKDLIIKLPKYSLFELENGRKRMLASAGELQKGNELALPSKYVNFLYLASHYEKLKGSPEDNEQKQLFVEQHKHYLDEIIEQISEFSKRVILADANLDKVLSAYNKHRDKPIREQAENIIHLFTLTNLGAPAAFKYFDTTIDRKRYTSTKEVLDATLIHQSITGLYETRIDLSQLGGDGGGGGGGGTLGDQGSRGSDPLPEPRVTLTVEGIPTEFLVNTGAEHSVLTKPMGKMGSKRTVVAGATGSKVYPWTTKRLLKIGQKQVTHSFLVIPECPAPLLGRDLLTKLKAQIQFSTEGPQVTWEDRPAMCLVLNLEEEYRLHEKPVPPSIDPSWLQLFPMVWAEKAGMGLANQVPPVVVELKSDASPVAVRQYPMSKEAREGIRPHIQRFLDLGILVPCQSPWNTPLLPVKKPGTNDYRPVQDLREVNKRVQDIHPTVPNPYNLLSSLPPSHTWYSVLDLKDAFFCLKLHPNSQPLFAFEWRDPEKGNTGQLTWTRLPQGFKNSPTLFNEALHRDLASFRALNPQVVMLQYVDDLLVAAPTYRDCKEGTRRLLQELSKLGYRVSAKKAQLCREEVTYLGYLLKGGKRWLTPARKATVMKIPTPTTPRQVREFLGTAGFCRLWIPGFASLAAPLYPLTRPKVPFTWTEAHQEAFGRIKEALLSAPALALPDLTKPFALYVDEKEGVARGVLTQTLGPWRRPVAYLSKKLDPVASGWPTCLKAIAAVALLLKDADKLTLGQNVLVIAPHNLESIVRQPPDRWMTNARMTHYQSLLLNERVSFAPPAILNPATLLPVESDDTPIHICSEILAEETGTRPDLRDQPLPGVPAWYTDGSSFIMDGRRQAGAAIVDNKRTVWASNLPEGTSAQKAELIALTQALRLAEGKSINIYTDSRYAFATAHVHGAIYKQRGWLTSAGKDIKNKEEILALLEAIHLPKRVAIIHCPGHQRGTDPVATGNRKADEAAKQAAQSTRILTETTKNAGKRTADGSEFEKRTADGSEFESPKKKAKVE

SEQ ID NO: 6248 - protein, 2089 aa, synthetic construct
MPAAKRVKLDGGDKKYSIGLDIGTNSVGWAVITDEYKVPSKKFKVLGNTDRHSIKKNLIGALLFDSGETAEATRLKRTARRRYTRRKNRICYLQEIFSNEMAKVDDSFFHRLEESFLVEEDKKHERHPIFGNIVDEVAYHEKYPTIYHLRKKLVDSTDKADLRLIYLALAHMIKFRGHFLIEGDLNPDNSDVDKLFIQLVQTYNQLFEENPINASGVDAKAILSARLSKSRRLENLIAQLPGEKKNGLFGNLIALSLGLTPNFKSNFDLAEDAKLQLSKDTYDDDLDNLLAQIGDQYADLFLAAKNLSDAILLSDILRVNTEITKAPLSASMIKRYDEHHQDLTLLKALVRQQLPEKYKEIFFDQSKNGYAGYIDGGASQEEFYKFIKPILEKMDGTEELLVKLNREDLLRKQRTFDNGSIPHQIHLGELHAILRRQEDFYPFLKDNREKIEKILTFRIPYYVGPLARGNSRFAWMTRKSEETITPWNFEEVVDKGASAQSFIERMTNFDKNLPNEKVLPKHSLLYEYFTVYNELTKVKYVTEGMRKPAFLSGEQKKAIVDLLFKTNRKVTVKQLKEDYFKKIECFDSVEISGVEDRFNASLGTYHDLLKIIKDKDFLDNEENEDILEDIVLTLTLFEDREMIEERLKTYAHLFDDKVMKQLKRRRYTGWGRLSRKLINGIRDKQSGKTILDFLKSDGFANRNFMQLIHDDSLTFKEDIQKAQVSGQGDSLHEHIANLAGSPAIKKGILQTVKVVDELVKVMGRHKPENIVIEMARENQTTQKGQKNSRERMKRIEEGIKELGSQILKEHPVENTQLQNEKLYLYYLQNGRDMYVDQELDINRLSDYDVDHIVPQSFLKDDSIDNKVLTRSDKARGKSDNVPSEEVVKKMKNYWRQLLNAKLITQRKFDNLTKAERGGLSELDKAGFIKRQLVETRQITKHVAQILDSRMNTKYDENDKLIREVKVITLKSKLVSDFRKDFQFYKVREINNYHHAHDAYLNAVVGTALIKKYPKLESEFVYGDYKVYDVRKMIAKSEQEIGKATAKYFFYSNIMNFFKTEITLANGEIRKRPLIETNGETGEIVWDKGRDFATVRKVLSMPQVNIVKKTEVQTGGFSKESILPKRNSDKLIARKKDWDPKKYGGFDSPTVAYSVLVVAKVEKGKSKKLKSVKELLGITIMERSSFEKNPIDFLEAKGYKEVKKDLIIKLPKYSLFELENGRKRMLASAGELQKGNELALPSKYVNFLYLASHYEKLKGSPEDNEQKQLFVEQHKHYLDEIIEQISEFSKRVILADANLDKVLSAYNKHRDKPIREQAENIIHLFTLTNLGAPAAFKYFDTTIDRKRYTSTKEVLDATLIHQSITGLYETRIDLSQLGGDGGGGGGGGTLNLEDEYRLYETSAEPEVSPGSTWLSDFPQAWAETGGMGLAVRQAPLIIPLKATSTPVSIKQYPMSQEAKLGIKPHIQRLLDQGILVPCQSPWNTPLLPVKKPGTNDYRPVQDLREVNKRVEDIHPTVPNPYNLLSGLPPSHRWYTVLDLKDAFFCLRLHPTSQPLFAFEWRDPGMGISGQLTWTRLPQGFKNSPTLFNEALHRDLADFRIQHPDLILLQYVDDILLAATSELDCQQGTRALLLTLGNLGYRASAKKAQLCQKQVKYLGYLLKEGQRWLTEARKETVMGQPTPKTPRQLREFLGKAGFCRLFIPGFAEMAAPLYPLTKPGTLFNWGPDQQKAYQEIKQALLTAPALGLPDLTKPFELFVDEKQGYAKGVLTQKLGPWRRPVAYLSKKLDPVAAGWPPCLRMVAAIAVLRKDAGKLTMGQPLVILAPHAVEALVKQPPDRWLSNARMTHYQAMLLDTDRVQFGPVVALNPATLLPLPEEGAPHDCLEILAETHGTRPDLTDQPIPDADHTWYTDGSSFLQEGQRKAGAAVTTETEVIWARALPAGTSAQRAELIALTQALKMAEGKRLNVYTDSRYAFATAHIHGEIYRRRGWLTSEGREIKNKSEILALLKALFLPKRLSIIHCLGHQKGDSAEARGNRLADQAAREAAIKTPPDTSTLLAGKRTADGSEFEKRTADGSEFESPKKKAKVE

SEQ ID NO: 6249 - protein, 2089 aa, synthetic construct
MPAAKRVKLDGGDKKYSIGLDIGTNSVGWAVITDEYKVPSKKFKVLGNTDRHSIKKNLIGALLFDSGETAEATRLKRTARRRYTRRKNRICYLQEIFSNEMAKVDDSFFHRLEESFLVEEDKKHERHPIFGNIVDEVAYHEKYPTIYHLRKKLVDSTDKADLRLIYLALAHMIKFRGHFLIEGDLNPDNSDVDKLFIQLVQTYNQLFEENPINASGVDAKAILSARLSKSRRLENLIAQLPGEKKNGLFGNLIALSLGLTPNFKSNFDLAEDAKLQLSKDTYDDDLDNLLAQIGDQYADLFLAAKNLSDAILLSDILRVNTEITKAPLSASMIKRYDEHHQDLTLLKALVRQQLPEKYKEIFFDQSKNGYAGYIDGGASQEEFYKFIKPILEKMDGTEELLVKLNREDLLRKQRTFDNGSIPHQIHLGELHAILRRQEDFYPFLKDNREKIEKILTFRIPYYVGPLARGNSRFAWMTRKSEETITPWNFEEVVDKGASAQSFIERMTNFDKNLPNEKVLPKHSLLYEYFTVYNELTKVKYVTEGMRKPAFLSGEQKKAIVDLLFKTNRKVTVKQLKEDYFKKIECFDSVEISGVEDRFNASLGTYHDLLKIIKDKDFLDNEENEDILEDIVLTLTLFEDREMIEERLKTYAHLFDDKVMKQLKRRRYTGWGRLSRKLINGIRDKQSGKTILDFLKSDGFANRNFMQLIHDDSLTFKEDIQKAQVSGQGDSLHEHIANLAGSPAIKKGILQTVKVVDELVKVMGRHKPENIVIEMARENQTTQKGQKNSRERMKRIEEGIKELGSQILKEHPVENTQLQNEKLYLYYLQNGRDMYVDQELDINRLSDYDVDHIVPQSFLKDDSIDNKVLTRSDKARGKSDNVPSEEVVKKMKNYWRQLLNAKLITQRKFDNLTKAERGGLSELDKAGFIKRQLVETRQITKHVAQILDSRMNTKYDENDKLIREVKVITLKSKLVSDFRKDFQFYKVREINNYHHAHDAYLNAVVGTALIKKYPKLESEFVYGDYKVYDVRKMIAKSEQEIGKATAKYFFYSNIMNFFKTEITLANGEIRKRPLIETNGETGEIVWDKGRDFATVRKVLSMPQVNIVKKTEVQTGGFSKESILPKRNSDKLIARKKDWDPKKYGGFDSPTVAYSVLVVAKVEKGKSKKLKSVKELLGITIMERSSFEKNPIDFLEAKGYKEVKKDLIIKLPKYSLFELENGRKRMLASAGELQKGNELALPSKYVNFLYLASHYEKLKGSPEDNEQKQLFVEQHKHYLDEIIEQISEFSKRVILADANLDKVLSAYNKHRDKPIREQAENIIHLFTLTNLGAPAAFKYFDTTIDRKRYTSTKEVLDATLIHQSITGLYETRIDLSQLGGDGGGGGGGGLGIEDEYRLHETSTEPDVSLGSTWLSDFPQAWAETGGMGLAVRQAPLIIPLKATSTPVSIQQYPMSHEARLGIKPHIQRLLDQGILVPCQSPWNTPLLPVKKPGTNDYRPVQDLREVNKRVEDIHPTVPNPYNLLSGLPPSHQWYTVLDLKDAFFCLRLHPTSQPLFAFEWRDPGMGISGQLTWTRLPQGFKNSPTLFNEALHRDLADFRIQHPDLILLQYVDDILLAATSELDCQQGTRALLQTLGDLGYRASAKKAQICQKQVKYLGYLLREGQRWLTEARKETVMGQPVPKTPRQLREFLGKAGFCRLFIPGFAEMAAPLYPLTKPGTLFSWGPDQQKAYQEIKQALLTAPALGLPDLTKPFELFVDEKQGYAKGVLTQKLGPWRRPVAYLSKKLDPVAAGWPPCLRMVAAIAVLTKDAGKLTMGQPLVILAPHAVEALVKQPPDRWLSNARMTHYQAMLLDTDRVQFGPVVALNPATLLPLPEEGAPHDCLEILAETHGTRPDLTDQPIPDADHTWYTDGSSFLQEGQRKAGAAVTTETEVIWAGALPAGTSAQRAELIALTQALKMAEGKRLNVYTDSRYAFATAHIHGEIYRRRGWLTSEGREIKNKSEILALLKALFLPKRLSIIHCLGHQKGDSAEARGNRLADQAAREAAIKTPPDTSTLLIAGKRTADGSEFEKRTADGSEFESPKKKAKVE

SEQ ID NO: 6250 - protein, 2092 aa, synthetic construct
MPAAKRVKLDGGDKKYSIGLDIGTNSVGWAVITDEYKVPSKKFKVLGNTDRHSIKKNLIGALLFDSGETAEATRLKRTARRRYTRRKNRICYLQEIFSNEMAKVDDSFFHRLEESFLVEEDKKHERHPIFGNIVDEVAYHEKYPTIYHLRKKLVDSTDKADLRLIYLALAHMIKFRGHFLIEGDLNPDNSDVDKLFIQLVQTYNQLFEENPINASGVDAKAILSARLSKSRRLENLIAQLPGEKKNGLFGNLIALSLGLTPNFKSNFDLAEDAKLQLSKDTYDDDLDNLLAQIGDQYADLFLAAKNLSDAILLSDILRVNTEITKAPLSASMIKRYDEHHQDLTLLKALVRQQLPEKYKEIFFDQSKNGYAGYIDGGASQEEFYKFIKPILEKMDGTEELLVKLNREDLLRKQRTFDNGSIPHQIHLGELHAILRRQEDFYPFLKDNREKIEKILTFRIPYYVGPLARGNSRFAWMTRKSEETITPWNFEEVVDKGASAQSFIERMTNFDKNLPNEKVLPKHSLLYEYFTVYNELTKVKYVTEGMRKPAFLSGEQKKAIVDLLFKTNRKVTVKQLKEDYFKKIECFDSVEISGVEDRFNASLGTYHDLLKIIKDKDFLDNEENEDILEDIVLTLTLFEDREMIEERLKTYAHLFDDKVMKQLKRRRYTGWGRLSRKLINGIRDKQSGKTILDFLKSDGFANRNFMQLIHDDSLTFKEDIQKAQVSGQGDSLHEHIANLAGSPAIKKGILQTVKVVDELVKVMGRHKPENIVIEMARENQTTQKGQKNSRERMKRIEEGIKELGSQILKEHPVENTQLQNEKLYLYYLQNGRDMYVDQELDINRLSDYDVDHIVPQSFLKDDSIDNKVLTRSDKARGKSDNVPSEEVVKKMKNYWRQLLNAKLITQRKFDNLTKAERGGLSELDKAGFIKRQLVETRQITKHVAQILDSRMNTKYDENDKLIREVKVITLKSKLVSDFRKDFQFYKVREINNYHHAHDAYLNAVVGTALIKKYPKLESEFVYGDYKVYDVRKMIAKSEQEIGKATAKYFFYSNIMNFFKTEITLANGEIRKRPLIETNGETGEIVWDKGRDFATVRKVLSMPQVNIVKKTEVQTGGFSKESILPKRNSDKLIARKKDWDPKKYGGFDSPTVAYSVLVVAKVEKGKSKKLKSVKELLGITIMERSSFEKNPIDFLEAKGYKEVKKDLIIKLPKYSLFELENGRKRMLASAGELQKGNELALPSKYVNFLYLASHYEKLKGSPEDNEQKQLFVEQHKHYLDEIIEQISEFSKRVILADANLDKVLSAYNKHRDKPIREQAENIIHLFTLTNLGAPAAFKYFDTTIDRKRYTSTKEVLDATLIHQSITGLYETRIDLSQLGGDGGGGGGGGGTAPLEEEYRLFLEAPIQNVTLLEQWKREIPKVWAEINPPGLASTQAPIHVQLLSTALPVRVRQYPITLEAKRSLRETIRKFRAAGILRPVHSPWNTPLLPVRKSGTSEYRMVQDLREVNKRVETIHPTVPNPYTLLSLLPPDRIWYSVLDLKDAFFCIPLAPESQLIFAFEWADAEEGESGQLTWTRLPQGFKNSPTLFNEALNRDLQGFRLDHPSVSLLQYVDDLLIAADTQAACLSATRDLLMTLAELGYRVSGKKAQLCQEEVTYLGFKIHKGSRSLSNSRTQAILQIPVPKTKRQVREFLGTIGYCRLWIPGFAELAQPLYAATRPGNDPLVWGEKEEEAFQSLKLALTQPPALALPSLDKPFQLFVEETSGAAKGVLTQALGPWKRPVAYLSKRLDPVAAGWPRCLRAIAAAALLTREASKLTFGQDIEITSSHNLESLLRSPPDKWLTNARITQYQVLLLDPPRVRFKQTAALNPATLLPETDDTLPIHHCLDTLDSLTSTRPDLTDQPLAQAEATLFTDGSSYIRDGKRYAGAAVVTLDSVIWAEPLPIGTSAQKAELIALTKALEWSKDKSVNIYTDSRYAFATLHVHGMIYRERGWLTAGGKAIKNAPEILALLTAVWLPKRVAVMHCKGHQKDDAPTSTGNRRADEVAREVAIRPLSTQATISAGKRTADGSEFEKRTADGSEFESPKKKAKVE

SEQ ID NO: 6251 - protein, 2212 aa, synthetic construct
MPAAKRVKLDGGDKKYSIGLDIGTNSVGWAVITDEYKVPSKKFKVLGNTDRHSIKKNLIGALLFDSGETAEATRLKRTARRRYTRRKNRICYLQEIFSNEMAKVDDSFFHRLEESFLVEEDKKHERHPIFGNIVDEVAYHEKYPTIYHLRKKLVDSTDKADLRLIYLALAHMIKFRGHFLIEGDLNPDNSDVDKLFIQLVQTYNQLFEENPINASGVDAKAILSARLSKSRRLENLIAQLPGEKKNGLFGNLIALSLGLTPNFKSNFDLAEDAKLQLSKDTYDDDLDNLLAQIGDQYADLFLAAKNLSDAILLSDILRVNTEITKAPLSASMIKRYDEHHQDLTLLKALVRQQLPEKYKEIFFDQSKNGYAGYIDGGASQEEFYKFIKPILEKMDGTEELLVKLNREDLLRKQRTFDNGSIPHQIHLGELHAILRRQEDFYPFLKDNREKIEKILTFRIPYYVGPLARGNSRFAWMTRKSEETITPWNFEEVVDKGASAQSFIERMTNFDKNLPNEKVLPKHSLLYEYFTVYNELTKVKYVTEGMRKPAFLSGEQKKAIVDLLFKTNRKVTVKQLKEDYFKKIECFDSVEISGVEDRFNASLGTYHDLLKIIKDKDFLDNEENEDILEDIVLTLTLFEDREMIEERLKTYAHLFDDKVMKQLKRRRYTGWGRLSRKLINGIRDKQSGKTILDFLKSDGFANRNFMQLIHDDSLTFKEDIQKAQVSGQGDSLHEHIANLAGSPAIKKGILQTVKVVDELVKVMGRHKPENIVIEMARENQTTQKGQKNSRERMKRIEEGIKELGSQILKEHPVENTQLQNEKLYLYYLQNGRDMYVDQELDINRLSDYDVDHIVPQSFLKDDSIDNKVLTRSDKARGKSDNVPSEEVVKKMKNYWRQLLNAKLITQRKFDNLTKAERGGLSELDKAGFIKRQLVETRQITKHVAQILDSRMNTKYDENDKLIREVKVITLKSKLVSDFRKDFQFYKVREINNYHHAHDAYLNAVVGTALIKKYPKLESEFVYGDYKVYDVRKMIAKSEQEIGKATAKYFFYSNIMNFFKTEITLANGEIRKRPLIETNGETGEIVWDKGRDFATVRKVLSMPQVNIVKKTEVQTGGFSKESILPKRNSDKLIARKKDWDPKKYGGFDSPTVAYSVLVVAKVEKGKSKKLKSVKELLGITIMERSSFEKNPIDFLEAKGYKEVKKDLIIKLPKYSLFELENGRKRMLASAGELQKGNELALPSKYVNFLYLASHYEKLKGSPEDNEQKQLFVEQHKHYLDEIIEQISEFSKRVILADANLDKVLSAYNKHRDKPIREQAENIIHLFTLTNLGAPAAFKYFDTTIDRKRYTSTKEVLDATLIHQSITGLYETRIDLSQLGGDGGGGGGGGGTLGDQGSRGSDPLPEPRVTLTVEGIPTEFLVNTGAEHSVLTKPMGKMGSKRTVVAGATGSKVYPWTTKRLLKIGQKQVTHSFLVIPECPAPLLGRDLLTKLKAQIQFSTEGPQVTWEDRPAMCLVLNLEEEYRLHEKPVPPSIDPSWLQLFPMVWAEKAGMGLANQVPPVVVELKSDASPVAVRQYPMSKEAREGIRPHIQRFLDLGILVPCQSPWNTPLLPVKKPGTNDYRPVQDLREVNKRVQDIHPTVPNPYNLLSSLPPSHTWYSVLDLKDAFFCLKLHPNSQPLFAFEWRDPEKGNTGQLTWTRLPQGFKNSPTLFNEALHRDLASFRALNPQVVMLQYVDDLLVAAPTYRDCKEGTRRLLQELSKLGYRVSAKKAQLCREEVTYLGYLLKGGKRWLTPARKATVMKIPTPTTPRQVREFLGTAGFCRLWIPGFASLAAPLYPLTRPKVPFTWTEAHQEAFGRIKEALLSAPALALPDLTKPFALYVDEKEGVARGVLTQTLGPWRRPVAYLSKKLDPVASGWPTCLKAIAAVALLLKDADKLTLGQNVLVIAPHNLESIVRQPPDRWMTNARMTHYQSLLLNERVSFAPPAILNPATLLPVESDDTPIHICSEILAEETGTRPDLRDQPLPGVPAWYTDGSSFIMDGRRQAGAAIVDNKRTVWASNLPEGTSAQKAELIALTQALRLAEGKSINIYTDSRYAFATAHVHGAIYKQRGWLTSAGKDIKNKEEILALLEAIHLPKRVAIIHCPGHQRGTDPVATGNRKADEAAKQAAQSTRILTETTKNAGKRTADGSEFEKRTADGSEFESPKKKAKVE

SEQ ID NO: 6252 - protein, 2088 aa, synthetic construct
MPAAKRVKLDGGDKKYSIGLDIGTNSVGWAVITDEYKVPSKKFKVLGNTDRHSIKKNLIGALLFDSGETAEATRLKRTARRRYTRRKNRICYLQEIFSNEMAKVDDSFFHRLEESFLVEEDKKHERHPIFGNIVDEVAYHEKYPTIYHLRKKLVDSTDKADLRLIYLALAHMIKFRGHFLIEGDLNPDNSDVDKLFIQLVQTYNQLFEENPINASGVDAKAILSARLSKSRRLENLIAQLPGEKKNGLFGNLIALSLGLTPNFKSNFDLAEDAKLQLSKDTYDDDLDNLLAQIGDQYADLFLAAKNLSDAILLSDILRVNTEITKAPLSASMIKRYDEHHQDLTLLKALVRQQLPEKYKEIFFDQSKNGYAGYIDGGASQEEFYKFIKPILEKMDGTEELLVKLNREDLLRKQRTFDNGSIPHQIHLGELHAILRRQEDFYPFLKDNREKIEKILTFRIPYYVGPLARGNSRFAWMTRKSEETITPWNFEEVVDKGASAQSFIERMTNFDKNLPNEKVLPKHSLLYEYFTVYNELTKVKYVTEGMRKPAFLSGEQKKAIVDLLFKTNRKVTVKQLKEDYFKKIECFDSVEISGVEDRFNASLGTYHDLLKIIKDKDFLDNEENEDILEDIVLTLTLFEDREMIEERLKTYAHLFDDKVMKQLKRRRYTGWGRLSRKLINGIRDKQSGKTILDFLKSDGFANRNFMQLIHDDSLTFKEDIQKAQVSGQGDSLHEHIANLAGSPAIKKGILQTVKVVDELVKVMGRHKPENIVIEMARENQTTQKGQKNSRERMKRIEEGIKELGSQILKEHPVENTQLQNEKLYLYYLQNGRDMYVDQELDINRLSDYDVDHIVPQSFLKDDSIDNKVLTRSDKARGKSDNVPSEEVVKKMKNYWRQLLNAKLITQRKFDNLTKAERGGLSELDKAGFIKRQLVETRQITKHVAQILDSRMNTKYDENDKLIREVKVITLKSKLVSDFRKDFQFYKVREINNYHHAHDAYLNAVVGTALIKKYPKLESEFVYGDYKVYDVRKMIAKSEQEIGKATAKYFFYSNIMNFFKTEITLANGEIRKRPLIETNGETGEIVWDKGRDFATVRKVLSMPQVNIVKKTEVQTGGFSKESILPKRNSDKLIARKKDWDPKKYGGFDSPTVAYSVLVVAKVEKGKSKKLKSVKELLGITIMERSSFEKNPIDFLEAKGYKEVKKDLIIKLPKYSLFELENGRKRMLASAGELQKGNELALPSKYVNFLYLASHYEKLKGSPEDNEQKQLFVEQHKHYLDEIIEQISEFSKRVILADANLDKVLSAYNKHRDKPIREQAENIIHLFTLTNLGAPAAFKYFDTTIDRKRYTSTKEVLDATLIHQSITGLYETRIDLSQLGGDGGGGGGGGGVLNLEEEYRLHEKPVPSSIDPSWLQLFPTVWAERAGMGLANQVPPVVVELRSGASPVAVRQYPMSKEAREGIRPHIQRFLDLGVLVPCQSPWNTPLLPVKKPGTNDYRPVQDLREINKRVQDIHPTVPNPYNLLSSLPPSHTWYSVLDLKDAFFCLKLHPNSQPLFAFEWRDPEKGNTGQLTWTRLPQGFKNSPTLFDEALHRDLAPFRALNPQVVLLQYVDDLLVAAPTYRDCKEGTQKLLQELSKLGYRVSAKKAQLCQKEVTYLGYLLKEGKRWLTPARKATVMKIPPPTTPRQVREFLGTAGFCRLWIPGFASLAAPLYPLTKESIPFIWTEEHQKAFDRIKEALLSAPALALPDLTKPFTLYVDERAGVARGVLTQTLGPWRRPVAYLSKKLDPVASGWPTCLKAVAAVALLLKDADKLTLGQNVTVIASHSLESIVRQPPDRWMTNARMTHYQSLLLNERVSFAPPAVLNPATLLPVESEATPVHRCSEILAEETGTRRDLKDQPLPGVPAWYTDGSSFIAEGKRRAGAAIVDGKRTVWASSLPEGTSAQKAELVALTQALRLAEGKDINIYTDSRYAFATAHIHGAIYKQRGLLTSAGKDIKNKEEILALLEAIHLPKRVAIIHCPGHQKGNDPVATGNRRADEAAKQAALSTRVLAETTKPAGKRTADGSEFEKRTADGSEFESPKKKAKVE

SEQ ID NO: 6253 - protein, 2090 aa, synthetic construct
MPAAKRVKLDGGDKKYSIGLDIGTNSVGWAVITDEYKVPSKKFKVLGNTDRHSIKKNLIGALLFDSGETAEATRLKRTARRRYTRRKNRICYLQEIFSNEMAKVDDSFFHRLEESFLVEEDKKHERHPIFGNIVDEVAYHEKYPTIYHLRKKLVDSTDKADLRLIYLALAHMIKFRGHFLIEGDLNPDNSDVDKLFIQLVQTYNQLFEENPINASGVDAKAILSARLSKSRRLENLIAQLPGEKKNGLFGNLIALSLGLTPNFKSNFDLAEDAKLQLSKDTYDDDLDNLLAQIGDQYADLFLAAKNLSDAILLSDILRVNTEITKAPLSASMIKRYDEHHQDLTLLKALVRQQLPEKYKEIFFDQSKNGYAGYIDGGASQEEFYKFIKPILEKMDGTEELLVKLNREDLLRKQRTFDNGSIPHQIHLGELHAILRRQEDFYPFLKDNREKIEKILTFRIPYYVGPLARGNSRFAWMTRKSEETITPWNFEEVVDKGASAQSFIERMTNFDKNLPNEKVLPKHSLLYEYFTVYNELTKVKYVTEGMRKPAFLSGEQKKAIVDLLFKTNRKVTVKQLKEDYFKKIECFDSVEISGVEDRFNASLGTYHDLLKIIKDKDFLDNEENEDILEDIVLTLTLFEDREMIEERLKTYAHLFDDKVMKQLKRRRYTGWGRLSRKLINGIRDKQSGKTILDFLKSDGFANRNFMQLIHDDSLTFKEDIQKAQVSGQGDSLHEHIANLAGSPAIKKGILQTVKVVDELVKVMGRHKPENIVIEMARENQTTQKGQKNSRERMKRIEEGIKELGSQILKEHPVENTQLQNEKLYLYYLQNGRDMYVDQELDINRLSDYDVDHIVPQSFLKDDSIDNKVLTRSDKARGKSDNVPSEEVVKKMKNYWRQLLNAKLITQRKFDNLTKAERGGLSELDKAGFIKRQLVETRQITKHVAQILDSRMNTKYDENDKLIREVKVITLKSKLVSDFRKDFQFYKVREINNYHHAHDAYLNAVVGTALIKKYPKLESEFVYGDYKVYDVRKMIAKSEQEIGKATAKYFFYSNIMNFFKTEITLANGEIRKRPLIETNGETGEIVWDKGRDFATVRKVLSMPQVNIVKKTEVQTGGFSKESILPKRNSDKLIARKKDWDPKKYGGFDSPTVAYSVLVVAKVEKGKSKKLKSVKELLGITIMERSSFEKNPIDFLEAKGYKEVKKDLIIKLPKYSLFELENGRKRMLASAGELQKGNELALPSKYVNFLYLASHYEKLKGSPEDNEQKQLFVEQHKHYLDEIIEQISEFSKRVILADANLDKVLSAYNKHRDKPIREQAENIIHLFTLTNLGAPAAFKYFDTTIDRKRYTSTKEVLDATLIHQSITGLYETRIDLSQLGGDGGGGGGGGGTLNIEDEYRLHETSKEPDVPLGSTWLSDFPQAWAETGGMGLAVRQAPLIIPLKATSTPVSIKQYPMSQEARLGIKPHIQRLLDQGILVPCQSPWNTPLLPVKKPGTNDYRPVQDLREVNKRVEDIHPTVPNPYNLLSGLPPSHQWYTVLDLKDAFFCLRLHPTSQPLFAFEWRDPEMGISGQLTWTRLPQGFKNSPTLFNEALHRDLADFRIQHPDLILLQYVDDLLLAATSEQDCQRGTRALLQTLGNLGYRASAKKAQICQKQVKYLGYLLKEGQRWLTEARKETVMGQPTPKTPRQLREFLGKAGFCRLFIPGFAEMAAPLYPLTKPGTLFNWGPDQQKAYQEIKQALLTAPALGLPDLTKPFELFVDEKQGYAKGVLTQKLGPWRRPVAYLSKKLDPVAAGWPPCLRMVAAIAVLTKDAGKLTMGQPLVILAPHAVEALVKQPPDRWLSNARMTHYQAMLLDTDRVQFGPVVALNPATLLPLPEKEAPHDCLEILAETHGTRPDLTDQPIPDADYTWYTDGSSFLQEGQRRAGAAVTTETEVIWARALPAGTSAQRAELIALTQALKMAEGKKLNVYTDSRYAFATAHVHGEIYRRRGWLTSEGREIKNKNEILALLKALFLPKRLSIIHCPGHQKGNSAEARGNRMADQAAREAAMKAVLETSTLLAGKRTADGSEFEKRTADGSEFESPKKKAKVE

SEQ ID NO: 6254 - protein, 2093 aa, synthetic construct
MPAAKRVKLDGGDKKYSIGLDIGTNSVGWAVITDEYKVPSKKFKVLGNTDRHSIKKNLIGALLFDSGETAEATRLKRTARRRYTRRKNRICYLQEIFSNEMAKVDDSFFHRLEESFLVEEDKKHERHPIFGNIVDEVAYHEKYPTIYHLRKKLVDSTDKADLRLIYLALAHMIKFRGHFLIEGDLNPDNSDVDKLFIQLVQTYNQLFEENPINASGVDAKAILSARLSKSRRLENLIAQLPGEKKNGLFGNLIALSLGLTPNFKSNFDLAEDAKLQLSKDTYDDDLDNLLAQIGDQYADLFLAAKNLSDAILLSDILRVNTEITKAPLSASMIKRYDEHHQDLTLLKALVRQQLPEKYKEIFFDQSKNGYAGYIDGGASQEEFYKFIKPILEKMDGTEELLVKLNREDLLRKQRTFDNGSIPHQIHLGELHAILRRQEDFYPFLKDNREKIEKILTFRIPYYVGPLARGNSRFAWMTRKSEETITPWNFEEVVDKGASAQSFIERMTNFDKNLPNEKVLPKHSLLYEYFTVYNELTKVKYVTEGMRKPAFLSGEQKKAIVDLLFKTNRKVTVKQLKEDYFKKIECFDSVEISGVEDRFNASLGTYHDLLKIIKDKDFLDNEENEDILEDIVLTLTLFEDREMIEERLKTYAHLFDDKVMKQLKRRRYTGWGRLSRKLINGIRDKQSGKTILDFLKSDGFANRNFMQLIHDDSLTFKEDIQKAQVSGQGDSLHEHIANLAGSPAIKKGILQTVKVVDELVKVMGRHKPENIVIEMARENQTTQKGQKNSRERMKRIEEGIKELGSQILKEHPVENTQLQNEKLYLYYLQNGRDMYVDQELDINRLSDYDVDHIVPQSFLKDDSIDNKVLTRSDKARGKSDNVPSEEVVKKMKNYWRQLLNAKLITQRKFDNLTKAERGGLSELDKAGFIKRQLVETRQITKHVAQILDSRMNTKYDENDKLIREVKVITLKSKLVSDFRKDFQFYKVREINNYHHAHDAYLNAVVGTALIKKYPKLESEFVYGDYKVYDVRKMIAKSEQEIGKATAKYFFYSNIMNFFKTEITLANGEIRKRPLIETNGETGEIVWDKGRDFATVRKVLSMPQVNIVKKTEVQTGGFSKESILPKRNSDKLIARKKDWDPKKYGGFDSPTVAYSVLVVAKVEKGKSKKLKSVKELLGITIMERSSFEKNPIDFLEAKGYKEVKKDLIIKLPKYSLFELENGRKRMLASAGELQKGNELALPSKYVNFLYLASHYEKLKGSPEDNEQKQLFVEQHKHYLDEIIEQISEFSKRVILADANLDKVLSAYNKHRDKPIREQAENIIHLFTLTNLGAPAAFKYFDTTIDRKRYTSTKEVLDATLIHQSITGLYETRIDLSQLGGDGGGGGGGGGGTAPLEEEYRLFLEAPIQNVTLLEQWKREIPKVWAEINPPGLASTQAPIHVQLLSTALPVRVRQYPITLEAKRSLRETIRKFRAAGILRPVHSPWNTPLLPVRKSGTSEYRMVQDLREVNKRVETIHPTVPNPYTLLSLLPPDRIWYSVLDLKDAFFCIPLAPESQLIFAFEWADAEEGESGQLTWTRLPQGFKNSPTLFDEALNRDLQGFRLDHPSVSLLQYVDDLLIAADTQAACLSATRDLLMTLAELGYRVSGKKAQLCQEEVTYLGFKIHKGSRSLSNSRTQAILQIPVPKTKRQVREFLGTIGYCRLWIPGFAELAQPLYAATRGGNDPLVWGEKEEEAFQSLKLALTQPPALALPSLDKPFQLFVEETSGAAKGVLTQALGPWKRPVAYLSKRLDPVAAGWPRCLRAIAAAALLTREASKLTFGQDIEITSSHNLESLLRSPPDKWLTNARITQYQVLLLDPPRVRFKQTAALNPATLLPETDDTLPIHHCLDTLDSLTSTRPDLTDQPLAQAEATLFTDGSSYIRDGKRYAGAAVVTLDSVIWAEPLPIGTSAQKAELIALTKALEWSKDKSVNIYTDSRYAFATLHVHGMIYRERGLLTAGGKAIKNAPEILALLTAVWLPKRVAVMHCKGHQKDDAPTSTGNRRADEVAREVAIRPLSTQATISAGKRTADGSEFEKRTADGSEFESPKKKAKVE

SEQ ID NO: 6255 - protein, 1996 aa, synthetic construct
MPAAKRVKLDGGDKKYSIGLDIGTNSVGWAVITDEYKVPSKKFKVLGNTDRHSIKKNLIGALLFDSGETAEATRLKRTARRRYTRRKNRICYLQEIFSNEMAKVDDSFFHRLEESFLVEEDKKHERHPIFGNIVDEVAYHEKYPTIYHLRKKLVDSTDKADLRLIYLALAHMIKFRGHFLIEGDLNPDNSDVDKLFIQLVQTYNQLFEENPINASGVDAKAILSARLSKSRRLENLIAQLPGEKKNGLFGNLIALSLGLTPNFKSNFDLAEDAKLQLSKDTYDDDLDNLLAQIGDQYADLFLAAKNLSDAILLSDILRVNTEITKAPLSASMIKRYDEHHQDLTLLKALVRQQLPEKYKEIFFDQSKNGYAGYIDGGASQEEFYKFIKPILEKMDGTEELLVKLNREDLLRKQRTFDNGSIPHQIHLGELHAILRRQEDFYPFLKDNREKIEKILTFRIPYYVGPLARGNSRFAWMTRKSEETITPWNFEEVVDKGASAQSFIERMTNFDKNLPNEKVLPKHSLLYEYFTVYNELTKVKYVTEGMRKPAFLSGEQKKAIVDLLFKTNRKVTVKQLKEDYFKKIECFDSVEISGVEDRFNASLGTYHDLLKIIKDKDFLDNEENEDILEDIVLTLTLFEDREMIEERLKTYAHLFDDKVMKQLKRRRYTGWGRLSRKLINGIRDKQSGKTILDFLKSDGFANRNFMQLIHDDSLTFKEDIQKAQVSGQGDSLHEHIANLAGSPAIKKGILQTVKVVDELVKVMGRHKPENIVIEMARENQTTQKGQKNSRERMKRIEEGIKELGSQILKEHPVENTQLQNEKLYLYYLQNGRDMYVDQELDINRLSDYDVDHIVPQSFLKDDSIDNKVLTRSDKARGKSDNVPSEEVVKKMKNYWRQLLNAKLITQRKFDNLTKAERGGLSELDKAGFIKRQLVETRQITKHVAQILDSRMNTKYDENDKLIREVKVITLKSKLVSDFRKDFQFYKVREINNYHHAHDAYLNAVVGTALIKKYPKLESEFVYGDYKVYDVRKMIAKSEQEIGKATAKYFFYSNIMNFFKTEITLANGEIRKRPLIETNGETGEIVWDKGRDFATVRKVLSMPQVNIVKKTEVQTGGFSKESILPKRNSDKLIARKKDWDPKKYGGFDSPTVAYSVLVVAKVEKGKSKKLKSVKELLGITIMERSSFEKNPIDFLEAKGYKEVKKDLIIKLPKYSLFELENGRKRMLASAGELQKGNELALPSKYVNFLYLASHYEKLKGSPEDNEQKQLFVEQHKHYLDEIIEQISEFSKRVILADANLDKVLSAYNKHRDKPIREQAENIIHLFTLTNLGAPAAFKYFDTTIDRKRYTSTKEVLDATLIHQSITGLYETRIDLSQLGGDGGGGGGGGGGGVLDTPPSHIGLEHLPPPPEVPQFPLNLERLQALQDLVHRSLEAGYISPWDGPGNNPVFPVRKPNGAWRFVHDLRATNALTKPIPALSPGPPDLTAPPTHPPHIICLDLKDAFFQIPVEDRFRFYLSFTLPSPGGLQPHRRFAWRVLPQGFINSPALFQRALQEPLRQVSAAFSQSLLVSYMDDILYASPTEEQRSQCYQALAARLRDLGFQVASEKTSQTPSPVPFLGQMVHEQIVTYQSLPTLQISSPISLHQLQAVLGDLQWVSRGTPTTRRPLQLLYSSLKRHHDPRAIIQLSPEQLQGIAELRQALSHNARSRYNEQEPLLAYVHLTRAGSTLVLFQKGAQFPLAYFQTPLTDNQASPWGLLLLLGCQYLQTQALSSYAKPILKYYHNLPKTSLDNWIQSSEDPRVQELLQLWPQISSQGIQPPGPWKTLITRAEVFLTPQFSPDPIPAALCLFSDGATGRGAYCLWKDHLLDFQAVPAPESAQKGELAGLLAGLAAAPPEPVNIWVDSKYLYSLLRTWVLGAWLQPDPVPSYALLYKSLLRHPAIVVGHVRSHSSASHPIASLNNYVDQLAGKRTADGSEFEKRTADGSEFESPKKKAKVE

SEQ ID NO: 6256 - protein, 2089 aa, synthetic construct
MPAAKRVKLDGGDKKYSIGLDIGTNSVGWAVITDEYKVPSKKFKVLGNTDRHSIKKNLIGALLFDSGETAEATRLKRTARRRYTRRKNRICYLQEIFSNEMAKVDDSFFHRLEESFLVEEDKKHERHPIFGNIVDEVAYHEKYPTIYHLRKKLVDSTDKADLRLIYLALAHMIKFRGHFLIEGDLNPDNSDVDKLFIQLVQTYNQLFEENPINASGVDAKAILSARLSKSRRLENLIAQLPGEKKNGLFGNLIALSLGLTPNFKSNFDLAEDAKLQLSKDTYDDDLDNLLAQIGDQYADLFLAAKNLSDAILLSDILRVNTEITKAPLSASMIKRYDEHHQDLTLLKALVRQQLPEKYKEIFFDQSKNGYAGYIDGGASQEEFYKFIKPILEKMDGTEELLVKLNREDLLRKQRTFDNGSIPHQIHLGELHAILRRQEDFYPFLKDNREKIEKILTFRIPYYVGPLARGNSRFAWMTRKSEETITPWNFEEVVDKGASAQSFIERMTNFDKNLPNEKVLPKHSLLYEYFTVYNELTKVKYVTEGMRKPAFLSGEQKKAIVDLLFKTNRKVTVKQLKEDYFKKIECFDSVEISGVEDRFNASLGTYHDLLKIIKDKDFLDNEENEDILEDIVLTLTLFEDREMIEERLKTYAHLFDDKVMKQLKRRRYTGWGRLSRKLINGIRDKQSGKTILDFLKSDGFANRNFMQLIHDDSLTFKEDIQKAQVSGQGDSLHEHIANLAGSPAIKKGILQTVKVVDELVKVMGRHKPENIVIEMARENQTTQKGQKNSRERMKRIEEGIKELGSQILKEHPVENTQLQNEKLYLYYLQNGRDMYVDQELDINRLSDYDVDHIVPQSFLKDDSIDNKVLTRSDKARGKSDNVPSEEVVKKMKNYWRQLLNAKLITQRKFDNLTKAERGGLSELDKAGFIKRQLVETRQITKHVAQILDSRMNTKYDENDKLIREVKVITLKSKLVSDFRKDFQFYKVREINNYHHAHDAYLNAVVGTALIKKYPKLESEFVYGDYKVYDVRKMIAKSEQEIGKATAKYFFYSNIMNFFKTEITLANGEIRKRPLIETNGETGEIVWDKGRDFATVRKVLSMPQVNIVKKTEVQTGGFSKESILPKRNSDKLIARKKDWDPKKYGGFDSPTVAYSVLVVAKVEKGKSKKLKSVKELLGITIMERSSFEKNPIDFLEAKGYKEVKKDLIIKLPKYSLFELENGRKRMLASAGELQKGNELALPSKYVNFLYLASHYEKLKGSPEDNEQKQLFVEQHKHYLDEIIEQISEFSKRVILADANLDKVLSAYNKHRDKPIREQAENIIHLFTLTNLGAPAAFKYFDTTIDRKRYTSTKEVLDATLIHQSITGLYETRIDLSQLGGDGGGGGGGGGGVLNLEEEYRLHEKPVPSSIDPSWLQLFPTVWAERAGMGLANQVPPVVVELRSGASPVAVRQYPMSKEAREGIRPHIQKFLDLGVLVPCRSPWNTPLLPVKKPGTNDYRPVQDLREINKRVQDIHPTVPNPYNLLSSLPPSYTWYSVLDLKDAFFCLRLHPNSQPLFAFEWKDPEKGNTGQLTWTRLPQGFKNSPTLFNEALHRDLAPFRALNPQVVLLQYVDDLLVAAPTYEDCKKGTQKLLQELSKLGYRVSAKKAQLCQREVTYLGYLLKEGKRWLTPARKATVMKIPVPTTPRQVREFLGKAGFCRLFIPGFASLAAPLYPLTKPSIPFIWTEEHQQAFDHIKKALLSAPALALPDLTKPFTLYIDERAGVARGVLTQTLGPWRRPVAYLSKKLDPVASGWPTCLKAVAAVALLLKDADKLTLGQNVTVIASHSLESIVRQPPDRWMTNARMTHYQSLLLNERVSFAPPAVLNPATLLPVESEATPVHRCSEILAEETGTRRDLEDQPLPGVPTWYTDGSSFITEGKRRAGAPIVDGKRTVWASSLPEGTSAQKAELVALTQALRLAEGKNINIYTDSRYAFATAHIHGAIYKQRGWLTSAGKDIKNKEEILALLEAIHLPRRVAIIHCPGHQRGSNPVATGNRRADEAAKQAALSTRVLAGTTKPAGKRTADGSEFEKRTADGSEFESPKKKAKVE

SEQ ID NO: 6257 - protein, 2213 aa, synthetic construct
MPAAKRVKLDGGDKKYSIGLDIGTNSVGWAVITDEYKVPSKKFKVLGNTDRHSIKKNLIGALLFDSGETAEATRLKRTARRRYTRRKNRICYLQEIFSNEMAKVDDSFFHRLEESFLVEEDKKHERHPIFGNIVDEVAYHEKYPTIYHLRKKLVDSTDKADLRLIYLALAHMIKFRGHFLIEGDLNPDNSDVDKLFIQLVQTYNQLFEENPINASGVDAKAILSARLSKSRRLENLIAQLPGEKKNGLFGNLIALSLGLTPNFKSNFDLAEDAKLQLSKDTYDDDLDNLLAQIGDQYADLFLAAKNLSDAILLSDILRVNTEITKAPLSASMIKRYDEHHQDLTLLKALVRQQLPEKYKEIFFDQSKNGYAGYIDGGASQEEFYKFIKPILEKMDGTEELLVKLNREDLLRKQRTFDNGSIPHQIHLGELHAILRRQEDFYPFLKDNREKIEKILTFRIPYYVGPLARGNSRFAWMTRKSEETITPWNFEEVVDKGASAQSFIERMTNFDKNLPNEKVLPKHSLLYEYFTVYNELTKVKYVTEGMRKPAFLSGEQKKAIVDLLFKTNRKVTVKQLKEDYFKKIECFDSVEISGVEDRFNASLGTYHDLLKIIKDKDFLDNEENEDILEDIVLTLTLFEDREMIEERLKTYAHLFDDKVMKQLKRRRYTGWGRLSRKLINGIRDKQSGKTILDFLKSDGFANRNFMQLIHDDSLTFKEDIQKAQVSGQGDSLHEHIANLAGSPAIKKGILQTVKVVDELVKVMGRHKPENIVIEMARENQTTQKGQKNSRERMKRIEEGIKELGSQILKEHPVENTQLQNEKLYLYYLQNGRDMYVDQELDINRLSDYDVDHIVPQSFLKDDSIDNKVLTRSDKARGKSDNVPSEEVVKKMKNYWRQLLNAKLITQRKFDNLTKAERGGLSELDKAGFIKRQLVETRQITKHVAQILDSRMNTKYDENDKLIREVKVITLKSKLVSDFRKDFQFYKVREINNYHHAHDAYLNAVVGTALIKKYPKLESEFVYGDYKVYDVRKMIAKSEQEIGKATAKYFFYSNIMNFFKTEITLANGEIRKRPLIETNGETGEIVWDKGRDFATVRKVLSMPQVNIVKKTEVQTGGFSKESILPKRNSDKLIARKKDWDPKKYGGFDSPTVAYSVLVVAKVEKGKSKKLKSVKELLGITIMERSSFEKNPIDFLEAKGYKEVKKDLIIKLPKYSLFELENGRKRMLASAGELQKGNELALPSKYVNFLYLASHYEKLKGSPEDNEQKQLFVEQHKHYLDEIIEQISEFSKRVILADANLDKVLSAYNKHRDKPIREQAENIIHLFTLTNLGAPAAFKYFDTTIDRKRYTSTKEVLDATLIHQSITGLYETRIDLSQLGGDGGGGGGGGGGTLGDQGSRGSDPLPEPRVTLTVEGIPTEFLVNTGAEHSVLTKPMGKMGSKRTVVAGATGSKVYPWTTKRLLKIGQKQVTHSFLVIPECPAPLLGRDLLTKLKAQIQFSTEGPQVTWEDRPAMCLVLNLEEEYRLHEKPVPPSIDPSWLQLFPMVWAEKAGMGLANQVPPVVVELKSDASPVAVRQYPMSKEAREGIRPHIQRFLDLGILVPCQSPWNTPLLPVKKPGTNDYRPVQDLREVNKRVQDIHPTVPNPYNLLSSLPPSHTWYSVLDLKDAFFCLKLHPNSQPLFAFEWRDPEKGNTGQLTWTRLPQGFKNSPTLFNEALHRDLASFRALNPQVVMLQYVDDLLVAAPTYRDCKEGTRRLLQELSKLGYRVSAKKAQLCREEVTYLGYLLKGGKRWLTPARKATVMKIPTPTTPRQVREFLGTAGFCRLWIPGFASLAAPLYPLTRPKVPFTWTEAHQEAFGRIKEALLSAPALALPDLTKPFALYVDEKEGVARGVLTQTLGPWRRPVAYLSKKLDPVASGWPTCLKAIAAVALLLKDADKLTLGQNVLVIAPHNLESIVRQPPDRWMTNARMTHYQSLLLNERVSFAPPAILNPATLLPVESDDTPIHICSEILAEETGTRPDLRDQPLPGVPAWYTDGSSFIMDGRRQAGAAIVDNKRTVWASNLPEGTSAQKAELIALTQALRLAEGKSINIYTDSRYAFATAHVHGAIYKQRGWLTSAGKDIKNKEEILALLEAIHLPKRVAIIHCPGHQRGTDPVATGNRKADEAAKQAAQSTRILTETTKNAGKRTADGSEFEKRTADGSEFESPKKKAKVE

SEQ ID NO: 6258 - protein, 2213 aa, synthetic construct
MPAAKRVKLDGGDKKYSIGLDIGTNSVGWAVITDEYKVPSKKFKVLGNTDRHSIKKNLIGALLFDSGETAEATRLKRTARRRYTRRKNRICYLQEIFSNEMAKVDDSFFHRLEESFLVEEDKKHERHPIFGNIVDEVAYHEKYPTIYHLRKKLVDSTDKADLRLIYLALAHMIKFRGHFLIEGDLNPDNSDVDKLFIQLVQTYNQLFEENPINASGVDAKAILSARLSKSRRLENLIAQLPGEKKNGLFGNLIALSLGLTPNFKSNFDLAEDAKLQLSKDTYDDDLDNLLAQIGDQYADLFLAAKNLSDAILLSDILRVNTEITKAPLSASMIKRYDEHHQDLTLLKALVRQQLPEKYKEIFFDQSKNGYAGYIDGGASQEEFYKFIKPILEKMDGTEELLVKLNREDLLRKQRTFDNGSIPHQIHLGELHAILRRQEDFYPFLKDNREKIEKILTFRIPYYVGPLARGNSRFAWMTRKSEETITPWNFEEVVDKGASAQSFIERMTNFDKNLPNEKVLPKHSLLYEYFTVYNELTKVKYVTEGMRKPAFLSGEQKKAIVDLLFKTNRKVTVKQLKEDYFKKIECFDSVEISGVEDRFNASLGTYHDLLKIIKDKDFLDNEENEDILEDIVLTLTLFEDREMIEERLKTYAHLFDDKVMKQLKRRRYTGWGRLSRKLINGIRDKQSGKTILDFLKSDGFANRNFMQLIHDDSLTFKEDIQKAQVSGQGDSLHEHIANLAGSPAIKKGILQTVKVVDELVKVMGRHKPENIVIEMARENQTTQKGQKNSRERMKRIEEGIKELGSQILKEHPVENTQLQNEKLYLYYLQNGRDMYVDQELDINRLSDYDVDHIVPQSFLKDDSIDNKVLTRSDKARGKSDNVPSEEVVKKMKNYWRQLLNAKLITQRKFDNLTKAERGGLSELDKAGFIKRQLVETRQITKHVAQILDSRMNTKYDENDKLIREVKVITLKSKLVSDFRKDFQFYKVREINNYHHAHDAYLNAVVGTALIKKYPKLESEFVYGDYKVYDVRKMIAKSEQEIGKATAKYFFYSNIMNFFKTEITLANGEIRKRPLIETNGETGEIVWDKGRDFATVRKVLSMPQVNIVKKTEVQTGGFSKESILPKRNSDKLIARKKDWDPKKYGGFDSPTVAYSVLVVAKVEKGKSKKLKSVKELLGITIMERSSFEKNPIDFLEAKGYKEVKKDLIIKLPKYSLFELENGRKRMLASAGELQKGNELALPSKYVNFLYLASHYEKLKGSPEDNEQKQLFVEQHKHYLDEIIEQISEFSKRVILADANLDKVLSAYNKHRDKPIREQAENIIHLFTLTNLGAPAAFKYFDTTIDRKRYTSTKEVLDATLIHQSITGLYETRIDLSQLGGDGGGGGGGGGGTLGDQGSRGSDPLPEPRVTLTVEGIPTEFLVNTGAEHSVLTKPMGKMGSKRTVVAGATGSKVYPWTTKRLLKIGQKQVTHSFLVIPECPAPLLGRDLLTKLKAQIQFSTEGPQVTWEDRPAMCLVLNLEEEYRLHEKPVPPSIDPSWLQLFPMVWAEKAGMGLANQVPPVVVELKSDASPVAVRQYPMSKEAREGIRPHIQRFLDLGILVPCQSPWNTPLLPVKKPGTNDYRPVQDLREVNKRVQDIHPTVPNPYNLLSSLPPSHTWYSVLDLKDAFFCLKLHPNSQPLFAFEWRDPEKGNTGQLTWTRLPQGFKNSPTLFNEALHRDLASFRALNPQVVMLQYVDDLLVAAPTYRDCKEGTRRLLQELSKLGYRVSAKKAQLCREEVTYLGYLLKGGKRWLTPARKATVMKIPTPTTPRQVREFLGKAGFCRLFIPGFASLAAPLYPLTRPKVPFTWTEAHQEAFGRIKEALLSAPALALPDLTKPFALYVDEKEGVARGVLTQTLGPWRRPVAYLSKKLDPVASGWPTCLKAIAAVALLLKDADKLTLGQNVLVIAPHNLESIVRQPPDRWMTNARMTHYQSLLLNERVSFAPPAILNPATLLPVESDDTPIHICSEILAEETGTRPDLRDQPLPGVPAWYTDGSSFIMDGRRQAGAAIVDNKRTVWASNLPEGTSAQKAELIALTQALRLAEGKSINIYTDSRYAFATAHVHGAIYKQRGWLTSAGKDIKNKEEILALLEAIHLPKRVAIIHCPGHQRGTDPVATGNRKADEAAKQAAQSTRILTETTKNAGKRTADGSEFEKRTADGSEFESPKKKAKVE

SEQ ID NO: 6259 - protein, 2091 aa, synthetic construct
MPAAKRVKLDGGDKKYSIGLDIGTNSVGWAVITDEYKVPSKKFKVLGNTDRHSIKKNLIGALLFDSGETAEATRLKRTARRRYTRRKNRICYLQEIFSNEMAKVDDSFFHRLEESFLVEEDKKHERHPIFGNIVDEVAYHEKYPTIYHLRKKLVDSTDKADLRLIYLALAHMIKFRGHFLIEGDLNPDNSDVDKLFIQLVQTYNQLFEENPINASGVDAKAILSARLSKSRRLENLIAQLPGEKKNGLFGNLIALSLGLTPNFKSNFDLAEDAKLQLSKDTYDDDLDNLLAQIGDQYADLFLAAKNLSDAILLSDILRVNTEITKAPLSASMIKRYDEHHQDLTLLKALVRQQLPEKYKEIFFDQSKNGYAGYIDGGASQEEFYKFIKPILEKMDGTEELLVKLNREDLLRKQRTFDNGSIPHQIHLGELHAILRRQEDFYPFLKDNREKIEKILTFRIPYYVGPLARGNSRFAWMTRKSEETITPWNFEEVVDKGASAQSFIERMTNFDKNLPNEKVLPKHSLLYEYFTVYNELTKVKYVTEGMRKPAFLSGEQKKAIVDLLFKTNRKVTVKQLKEDYFKKIECFDSVEISGVEDRFNASLGTYHDLLKIIKDKDFLDNEENEDILEDIVLTLTLFEDREMIEERLKTYAHLFDDKVMKQLKRRRYTGWGRLSRKLINGIRDKQSGKTILDFLKSDGFANRNFMQLIHDDSLTFKEDIQKAQVSGQGDSLHEHIANLAGSPAIKKGILQTVKVVDELVKVMGRHKPENIVIEMARENQTTQKGQKNSRERMKRIEEGIKELGSQILKEHPVENTQLQNEKLYLYYLQNGRDMYVDQELDINRLSDYDVDHIVPQSFLKDDSIDNKVLTRSDKARGKSDNVPSEEVVKKMKNYWRQLLNAKLITQRKFDNLTKAERGGLSELDKAGFIKRQLVETRQITKHVAQILDSRMNTKYDENDKLIREVKVITLKSKLVSDFRKDFQFYKVREINNYHHAHDAYLNAVVGTALIKKYPKLESEFVYGDYKVYDVRKMIAKSEQEIGKATAKYFFYSNIMNFFKTEITLANGEIRKRPLIETNGETGEIVWDKGRDFATVRKVLSMPQVNIVKKTEVQTGGFSKESILPKRNSDKLIARKKDWDPKKYGGFDSPTVAYSVLVVAKVEKGKSKKLKSVKELLGITIMERSSFEKNPIDFLEAKGYKEVKKDLIIKLPKYSLFELENGRKRMLASAGELQKGNELALPSKYVNFLYLASHYEKLKGSPEDNEQKQLFVEQHKHYLDEIIEQISEFSKRVILADANLDKVLSAYNKHRDKPIREQAENIIHLFTLTNLGAPAAFKYFDTTIDRKRYTSTKEVLDATLIHQSITGLYETRIDLSQLGGDGGGGGGGGGGTLNLEDEYRLYETSAEPEVSPGSTWLSDFPQAWAETGGMGLAVRQAPLIIPLKATSTPVSIKQYPMSQEAKLGIKPHIQRLLDQGILVPCQSPWNTPLLPVKKPGTNDYRPVQDLREVNKRVEDIHPTVPNPYNLLSGLPPSHRWYTVLDLKDAFFCLRLHPTSQPLFAFEWRDPGMGISGQLTWTRLPQGFKNSPTLFNEALHRDLADFRIQHPDLILLQYVDDILLAATSELDCQQGTRALLLTLGNLGYRASAKKAQLCQKQVKYLGYLLKEGQRWLTEARKETVMGQPTPKTPRQLREFLGTAGFCRLWIPGFAEMAAPLYPLTKPGTLFNWGPDQQKAYQEIKQALLTAPALGLPDLTKPFELFVDEKQGYAKGVLTQKLGPWRRPVAYLSKKLDPVAAGWPPCLRMVAAIAVLRKDAGKLTMGQPLVILAPHAVEALVKQPPDRWLSNARMTHYQAMLLDTDRVQFGPVVALNPATLLPLPEEGAPHDCLEILAETHGTRPDLTDQPIPDADHTWYTDGSSFLQEGQRKAGAAVTTETEVIWARALPAGTSAQRAELIALTQALKMAEGKRLNVYTDSRYAFATAHIHGEIYRRRGWLTSEGREIKNKSEILALLKALFLPKRLSIIHCLGHQKGDSAEARGNRLADQAAREAAIKTPPDTSTLLAGKRTADGSEFEKRTADGSEFESPKKKAKVE

SEQ ID NO: 6260 - protein, 2091 aa, synthetic construct
MPAAKRVKLDGGDKKYSIGLDIGTNSVGWAVITDEYKVPSKKFKVLGNTDRHSIKKNLIGALLFDSGETAEATRLKRTARRRYTRRKNRICYLQEIFSNEMAKVDDSFFHRLEESFLVEEDKKHERHPIFGNIVDEVAYHEKYPTIYHLRKKLVDSTDKADLRLIYLALAHMIKFRGHFLIEGDLNPDNSDVDKLFIQLVQTYNQLFEENPINASGVDAKAILSARLSKSRRLENLIAQLPGEKKNGLFGNLIALSLGLTPNFKSNFDLAEDAKLQLSKDTYDDDLDNLLAQIGDQYADLFLAAKNLSDAILLSDILRVNTEITKAPLSASMIKRYDEHHQDLTLLKALVRQQLPEKYKEIFFDQSKNGYAGYIDGGASQEEFYKFIKPILEKMDGTEELLVKLNREDLLRKQRTFDNGSIPHQIHLGELHAILRRQEDFYPFLKDNREKIEKILTFRIPYYVGPLARGNSRFAWMTRKSEETITPWNFEEVVDKGASAQSFIERMTNFDKNLPNEKVLPKHSLLYEYFTVYNELTKVKYVTEGMRKPAFLSGEQKKAIVDLLFKTNRKVTVKQLKEDYFKKIECFDSVEISGVEDRFNASLGTYHDLLKIIKDKDFLDNEENEDILEDIVLTLTLFEDREMIEERLKTYAHLFDDKVMKQLKRRRYTGWGRLSRKLINGIRDKQSGKTILDFLKSDGFANRNFMQLIHDDSLTFKEDIQKAQVSGQGDSLHEHIANLAGSPAIKKGILQTVKVVDELVKVMGRHKPENIVIEMARENQTTQKGQKNSRERMKRIEEGIKELGSQILKEHPVENTQLQNEKLYLYYLQNGRDMYVDQELDINRLSDYDVDHIVPQSFLKDDSIDNKVLTRSDKARGKSDNVPSEEVVKKMKNYWRQLLNAKLITQRKFDNLTKAERGGLSELDKAGFIKRQLVETRQITKHVAQILDSRMNTKYDENDKLIREVKVITLKSKLVSDFRKDFQFYKVREINNYHHAHDAYLNAVVGTALIKKYPKLESEFVYGDYKVYDVRKMIAKSEQEIGKATAKYFFYSNIMNFFKTEITLANGEIRKRPLIETNGETGEIVWDKGRDFATVRKVLSMPQVNIVKKTEVQTGGFSKESILPKRNSDKLIARKKDWDPKKYGGFDSPTVAYSVLVVAKVEKGKSKKLKSVKELLGITIMERSSFEKNPIDFLEAKGYKEVKKDLIIKLPKYSLFELENGRKRMLASAGELQKGNELALPSKYVNFLYLASHYEKLKGSPEDNEQKQLFVEQHKHYLDEIIEQISEFSKRVILADANLDKVLSAYNKHRDKPIREQAENIIHLFTLTNLGAPAAFKYFDTTIDRKRYTSTKEVLDATLIHQSITGLYETRIDLSQLGGDGGGGGGGGGGTLNIEDEYRLHETSKEPDVSLGSTWLSDFPQAWAETGGMGLAVRQAPLIIPLKATSTPVSIKQYPMSQEARLGIKPHIQRLLDQGILVPCQSPWNTPLLPVKKPGTNDYRPVQDLREVNKRVEDIHPTVPNPYNLLSGLPPSHQWYTVLDLKDAFFCLRLHPTSQPLFAFEWRDPEMGISGQLTWTRLPQGFKNSPTLFNEALHRDLAGFRIQHPDLILLQYVDDLLLAATSELDCQQGTRALLQTLGDLGYRASAKKAQICQKQVKYLGYLLKEGQRWLTEARKETVMGQPIPKTPRQLREFLGTAGFCRLWIPGFAEMAAPLYPLTKPGTLFNWGPDQQKAFQEIKQALLTAPALGLPDLTKPFELFVDEKQGYAKGVLTQKLGPWRRPVAYLSKKLDPVAAGWPPCLRMVAAIAVLTKDAGKLTMGQPLVILAPHAVEALVKQPPDRWLSNARMTHYQALLLDTDRVQFGPVVALNPATLLPLPEEGLQHDCLDILAEAHGTRSDLMDQPLPDADHTWYTDGSSFLQEGQRKAGAAVTTETEVIWARALPAGTSAQRAELIALTQALKMAEGKKLNVYTDSRYAFATAHIHGEIYRRRGWLTSEGKEIKNKDEILALLKALFLPKRLSIIHCPGHQKGNSAEARGNRMADQAAREVATRETPETSTLLAGKRTADGSEFEKRTADGSEFESPKKKAKVE

SEQ ID NO: 6261 - protein, 2082 aa, synthetic construct
MPAAKRVKLDGGDKKYSIGLDIGTNSVGWAVITDEYKVPSKKFKVLGNTDRHSIKKNLIGALLFDSGETAEATRLKRTARRRYTRRKNRICYLQEIFSNEMAKVDDSFFHRLEESFLVEEDKKHERHPIFGNIVDEVAYHEKYPTIYHLRKKLVDSTDKADLRLIYLALAHMIKFRGHFLIEGDLNPDNSDVDKLFIQLVQTYNQLFEENPINASGVDAKAILSARLSKSRRLENLIAQLPGEKKNGLFGNLIALSLGLTPNFKSNFDLAEDAKLQLSKDTYDDDLDNLLAQIGDQYADLFLAAKNLSDAILLSDILRVNTEITKAPLSASMIKRYDEHHQDLTLLKALVRQQLPEKYKEIFFDQSKNGYAGYIDGGASQEEFYKFIKPILEKMDGTEELLVKLNREDLLRKQRTFDNGSIPHQIHLGELHAILRRQEDFYPFLKDNREKIEKILTFRIPYYVGPLARGNSRFAWMTRKSEETITPWNFEEVVDKGASAQSFIERMTNFDKNLPNEKVLPKHSLLYEYFTVYNELTKVKYVTEGMRKPAFLSGEQKKAIVDLLFKTNRKVTVKQLKEDYFKKIECFDSVEISGVEDRFNASLGTYHDLLKIIKDKDFLDNEENEDILEDIVLTLTLFEDREMIEERLKTYAHLFDDKVMKQLKRRRYTGWGRLSRKLINGIRDKQSGKTILDFLKSDGFANRNFMQLIHDDSLTFKEDIQKAQVSGQGDSLHEHIANLAGSPAIKKGILQTVKVVDELVKVMGRHKPENIVIEMARENQTTQKGQKNSRERMKRIEEGIKELGSQILKEHPVENTQLQNEKLYLYYLQNGRDMYVDQELDINRLSDYDVDHIVPQSFLKDDSIDNKVLTRSDKARGKSDNVPSEEVVKKMKNYWRQLLNAKLITQRKFDNLTKAERGGLSELDKAGFIKRQLVETRQITKHVAQILDSRMNTKYDENDKLIREVKVITLKSKLVSDFRKDFQFYKVREINNYHHAHDAYLNAVVGTALIKKYPKLESEFVYGDYKVYDVRKMIAKSEQEIGKATAKYFFYSNIMNFFKTEITLANGEIRKRPLIETNGETGEIVWDKGRDFATVRKVLSMPQVNIVKKTEVQTGGFSKESILPKRNSDKLIARKKDWDPKKYGGFDSPTVAYSVLVVAKVEKGKSKKLKSVKELLGITIMERSSFEKNPIDFLEAKGYKEVKKDLIIKLPKYSLFELENGRKRMLASAGELQKGNELALPSKYVNFLYLASHYEKLKGSPEDNEQKQLFVEQHKHYLDEIIEQISEFSKRVILADANLDKVLSAYNKHRDKPIREQAENIIHLFTLTNLGAPAAFKYFDTTIDRKRYTSTKEVLDATLIHQSITGLYETRIDLSQLGGDGGGGGGGGGGIPWLMKKPLQLTTLVPLQEYEERLLKQTMLTGSYKEKLQSLFLKYDALWQHWENQVGHRRIKPHHIATGTVNPRPQKQYPINPKAKASIQTVINDLLKQGVLIQQNSIMNTPVYPVPKPDGKWRMVLDYREVNKTIPLIAAQNQHSAGILSSIFRGKYKTTLDLSNGFWAHSITPESYWLTAFTWLGQQYCWTRLPQGFLNSPALFNADVVDLLKEVPNVQVYVDDIYISHDDPREHLEQLEKVFSLLLNAGYVVSLKKSEIAQHEVEFLGFNITKEGRGLTETFKQKLLNITPPRDLKQLQSILGLLNFARNFIPNFSELVKPLYNIIATAPGKYITWTTDNSQQLQNIISMLNSAENLEERNPEVRLIMKVNTSPSAGYIRFYNEFAKRPIMYLNYVYTKAEVKFTNTEKLLTTIHKGLIKALDLGMGQEILVYSPIVSMTKIQKTPLPERKALPIRWITWMSYLEDPRIQFHYDKTLPELQQVPTVTDDIIAKIKHPSEFSMVFYTDGSAIKHPNVNKSHNAGMGIAQVQFKPEFTVINTWSIPLGDHTAQLAEVAAVEFACKKALKIDGPVLIVTDSFYVAESVNKELPYWQSNGFFNNKKKPLKHVSKWKSIADCIQLKPDIIIIHEKGHQPTASTFHTEGNNLADKLATQGSYVVNAGKRTADGSEFEKRTADGSEFESPKKKAKVE

SEQ ID NO: 6262 - protein, 2091 aa, synthetic construct
MPAAKRVKLDGGDKKYSIGLDIGTNSVGWAVITDEYKVPSKKFKVLGNTDRHSIKKNLIGALLFDSGETAEATRLKRTARRRYTRRKNRICYLQEIFSNEMAKVDDSFFHRLEESFLVEEDKKHERHPIFGNIVDEVAYHEKYPTIYHLRKKLVDSTDKADLRLIYLALAHMIKFRGHFLIEGDLNPDNSDVDKLFIQLVQTYNQLFEENPINASGVDAKAILSARLSKSRRLENLIAQLPGEKKNGLFGNLIALSLGLTPNFKSNFDLAEDAKLQLSKDTYDDDLDNLLAQIGDQYADLFLAAKNLSDAILLSDILRVNTEITKAPLSASMIKRYDEHHQDLTLLKALVRQQLPEKYKEIFFDQSKNGYAGYIDGGASQEEFYKFIKPILEKMDGTEELLVKLNREDLLRKQRTFDNGSIPHQIHLGELHAILRRQEDFYPFLKDNREKIEKILTFRIPYYVGPLARGNSRFAWMTRKSEETITPWNFEEVVDKGASAQSFIERMTNFDKNLPNEKVLPKHSLLYEYFTVYNELTKVKYVTEGMRKPAFLSGEQKKAIVDLLFKTNRKVTVKQLKEDYFKKIECFDSVEISGVEDRFNASLGTYHDLLKIIKDKDFLDNEENEDILEDIVLTLTLFEDREMIEERLKTYAHLFDDKVMKQLKRRRYTGWGRLSRKLINGIRDKQSGKTILDFLKSDGFANRNFMQLIHDDSLTFKEDIQKAQVSGQGDSLHEHIANLAGSPAIKKGILQTVKVVDELVKVMGRHKPENIVIEMARENQTTQKGQKNSRERMKRIEEGIKELGSQILKEHPVENTQLQNEKLYLYYLQNGRDMYVDQELDINRLSDYDVDHIVPQSFLKDDSIDNKVLTRSDKARGKSDNVPSEEVVKKMKNYWRQLLNAKLITQRKFDNLTKAERGGLSELDKAGFIKRQLVETRQITKHVAQILDSRMNTKYDENDKLIREVKVITLKSKLVSDFRKDFQFYKVREINNYHHAHDAYLNAVVGTALIKKYPKLESEFVYGDYKVYDVRKMIAKSEQEIGKATAKYFFYSNIMNFFKTEITLANGEIRKRPLIETNGETGEIVWDKGRDFATVRKVLSMPQVNIVKKTEVQTGGFSKESILPKRNSDKLIARKKDWDPKKYGGFDSPTVAYSVLVVAKVEKGKSKKLKSVKELLGITIMERSSFEKNPIDFLEAKGYKEVKKDLIIKLPKYSLFELENGRKRMLASAGELQKGNELALPSKYVNFLYLASHYEKLKGSPEDNEQKQLFVEQHKHYLDEIIEQISEFSKRVILADANLDKVLSAYNKHRDKPIREQAENIIHLFTLTNLGAPAAFKYFDTTIDRKRYTSTKEVLDATLIHQSITGLYETRIDLSQLGGDGGGGGGGGGGTLNIEDEYRLHETSKEPDVPLGSTWLSDFPQAWAETGGMGLAVRQAPLIIPLKATSTPVSIKQYPMSQEARLGIKPHIQRLLDQGILVPCQSPWNTPLLPVKKPGTNDYRPVQDLREVNKRVEDIHPTVPNPYNLLSGLPPSHQWYTVLDLKDAFFCLRLHPTSQPLFAFEWRDPEMGISGQLTWTRLPQGFKNSPTLFNEALHRDLADFRIQHPDLILLQYVDDLLLAATSEQDCQRGTRALLQTLGNLGYRASAKKAQICQKQVKYLGYLLKEGQRWLTEARKETVMGQPTPKTPRQLREFLGTAGFCRLWIPGFAEMAAPLYPLTKPGTLFNWGPDQQKAYQEIKQALLTAPALGLPDLTKPFELFVDEKQGYAKGVLTQKLGPWRRPVAYLSKKLDPVAAGWPPCLRMVAAIAVLTKDAGKLTMGQPLVILAPHAVEALVKQPPDRWLSNARMTHYQAMLLDTDRVQFGPVVALNPATLLPLPEKEAPHDCLEILAETHGTRPDLTDQPIPDADYTWYTDGSSFLQEGQRRAGAAVTTETEVIWARALPAGTSAQRAELIALTQALKMAEGKKLNVYTDSRYAFATAHVHGEIYRRRGWLTSEGREIKNKNEILALLKALFLPKRLSIIHCPGHQKGNSAEARGNRMADQAAREAAMKAVLETSTLLAGKRTADGSEFEKRTADGSEFESPKKKAKVE

SEQ ID NO: 6263 - protein, 2091 aa, synthetic construct
MPAAKRVKLDGGDKKYSIGLDIGTNSVGWAVITDEYKVPSKKFKVLGNTDRHSIKKNLIGALLFDSGETAEATRLKRTARRRYTRRKNRICYLQEIFSNEMAKVDDSFFHRLEESFLVEEDKKHERHPIFGNIVDEVAYHEKYPTIYHLRKKLVDSTDKADLRLIYLALAHMIKFRGHFLIEGDLNPDNSDVDKLFIQLVQTYNQLFEENPINASGVDAKAILSARLSKSRRLENLIAQLPGEKKNGLFGNLIALSLGLTPNFKSNFDLAEDAKLQLSKDTYDDDLDNLLAQIGDQYADLFLAAKNLSDAILLSDILRVNTEITKAPLSASMIKRYDEHHQDLTLLKALVRQQLPEKYKEIFFDQSKNGYAGYIDGGASQEEFYKFIKPILEKMDGTEELLVKLNREDLLRKQRTFDNGSIPHQIHLGELHAILRRQEDFYPFLKDNREKIEKILTFRIPYYVGPLARGNSRFAWMTRKSEETITPWNFEEVVDKGASAQSFIERMTNFDKNLPNEKVLPKHSLLYEYFTVYNELTKVKYVTEGMRKPAFLSGEQKKAIVDLLFKTNRKVTVKQLKEDYFKKIECFDSVEISGVEDRFNASLGTYHDLLKIIKDKDFLDNEENEDILEDIVLTLTLFEDREMIEERLKTYAHLFDDKVMKQLKRRRYTGWGRLSRKLINGIRDKQSGKTILDFLKSDGFANRNFMQLIHDDSLTFKEDIQKAQVSGQGDSLHEHIANLAGSPAIKKGILQTVKVVDELVKVMGRHKPENIVIEMARENQTTQKGQKNSRERMKRIEEGIKELGSQILKEHPVENTQLQNEKLYLYYLQNGRDMYVDQELDINRLSDYDVDHIVPQSFLKDDSIDNKVLTRSDKARGKSDNVPSEEVVKKMKNYWRQLLNAKLITQRKFDNLTKAERGGLSELDKAGFIKRQLVETRQITKHVAQILDSRMNTKYDENDKLIREVKVITLKSKLVSDFRKDFQFYKVREINNYHHAHDAYLNAVVGTALIKKYPKLESEFVYGDYKVYDVRKMIAKSEQEIGKATAKYFFYSNIMNFFKTEITLANGEIRKRPLIETNGETGEIVWDKGRDFATVRKVLSMPQVNIVKKTEVQTGGFSKESILPKRNSDKLIARKKDWDPKKYGGFDSPTVAYSVLVVAKVEKGKSKKLKSVKELLGITIMERSSFEKNPIDFLEAKGYKEVKKDLIIKLPKYSLFELENGRKRMLASAGELQKGNELALPSKYVNFLYLASHYEKLKGSPEDNEQKQLFVEQHKHYLDEIIEQISEFSKRVILADANLDKVLSAYNKHRDKPIREQAENIIHLFTLTNLGAPAAFKYFDTTIDRKRYTSTKEVLDATLIHQSITGLYETRIDLSQLGGDGGGGGGGGGGTLNIEDEYRLHETSKEPDVPLGSTWLSDFPQAWAETGGMGLAVRQAPLIIPLKATSTPVSIKQYPMSQEARLGIKPHIQRLLDQGILVPCQSPWNTPLLPVKKPGTNDYRPVQDLREVNKRVEDIHPTVPNPYNLLSGLPPSHQWYTVLDLKDAFFCLRLHPTSQPLFAFEWRDPEMGISGQLTWTRLPQGFKNSPTLFNEALHRDLADFRIQHPDLILLQYVDDLLLAATSEQDCQRGTRALLQTLGNLGYRASAKKAQICQKQVKYLGYLLKEGQRWLTEARKETVMGQPTPKTPRQLREFLGKAGFCRLFIPGFAEMAAPLYPLTKPGTLFNWGPDQQKAYQEIKQALLTAPALGLPDLTKPFELFVDEKQGYAKGVLTQKLGPWRRPVAYLSKKLDPVAAGWPPCLRMVAAIAVLTKDAGKLTMGQPLVILAPHAVEALVKQPPDRWLSNARMTHYQAMLLDTDRVQFGPVVALNPATLLPLPEKEAPHDCLEILAETHGTRPDLTDQPIPDADYTWYTDGSSFLQEGQRRAGAAVTTETEVIWARALPAGTSAQRAELIALTQALKMAEGKKLNVYTDSRYAFATAHVHGEIYRRRGWLTSEGREIKNKNEILALLKALFLPKRLSIIHCPGHQKGNSAEARGNRMADQAAREAAMKAVLETSTLLAGKRTADGSEFEKRTADGSEFESPKKKAKVE

SEQ ID NO: 6264 - protein, 2094 aa, synthetic construct
MPAAKRVKLDGGDKKYSIGLDIGTNSVGWAVITDEYKVPSKKFKVLGNTDRHSIKKNLIGALLFDSGETAEATRLKRTARRRYTRRKNRICYLQEIFSNEMAKVDDSFFHRLEESFLVEEDKKHERHPIFGNIVDEVAYHEKYPTIYHLRKKLVDSTDKADLRLIYLALAHMIKFRGHFLIEGDLNPDNSDVDKLFIQLVQTYNQLFEENPINASGVDAKAILSARLSKSRRLENLIAQLPGEKKNGLFGNLIALSLGLTPNFKSNFDLAEDAKLQLSKDTYDDDLDNLLAQIGDQYADLFLAAKNLSDAILLSDILRVNTEITKAPLSASMIKRYDEHHQDLTLLKALVRQQLPEKYKEIFFDQSKNGYAGYIDGGASQEEFYKFIKPILEKMDGTEELLVKLNREDLLRKQRTFDNGSIPHQIHLGELHAILRRQEDFYPFLKDNREKIEKILTFRIPYYVGPLARGNSRFAWMTRKSEETITPWNFEEVVDKGASAQSFIERMTNFDKNLPNEKVLPKHSLLYEYFTVYNELTKVKYVTEGMRKPAFLSGEQKKAIVDLLFKTNRKVTVKQLKEDYFKKIECFDSVEISGVEDRFNASLGTYHDLLKIIKDKDFLDNEENEDILEDIVLTLTLFEDREMIEERLKTYAHLFDDKVMKQLKRRRYTGWGRLSRKLINGIRDKQSGKTILDFLKSDGFANRNFMQLIHDDSLTFKEDIQKAQVSGQGDSLHEHIANLAGSPAIKKGILQTVKVVDELVKVMGRHKPENIVIEMARENQTTQKGQKNSRERMKRIEEGIKELGSQILKEHPVENTQLQNEKLYLYYLQNGRDMYVDQELDINRLSDYDVDHIVPQSFLKDDSIDNKVLTRSDKARGKSDNVPSEEVVKKMKNYWRQLLNAKLITQRKFDNLTKAERGGLSELDKAGFIKRQLVETRQITKHVAQILDSRMNTKYDENDKLIREVKVITLKSKLVSDFRKDFQFYKVREINNYHHAHDAYLNAVVGTALIKKYPKLESEFVYGDYKVYDVRKMIAKSEQEIGKATAKYFFYSNIMNFFKTEITLANGEIRKRPLIETNGETGEIVWDKGRDFATVRKVLSMPQVNIVKKTEVQTGGFSKESILPKRNSDKLIARKKDWDPKKYGGFDSPTVAYSVLVVAKVEKGKSKKLKSVKELLGITIMERSSFEKNPIDFLEAKGYKEVKKDLIIKLPKYSLFELENGRKRMLASAGELQKGNELALPSKYVNFLYLASHYEKLKGSPEDNEQKQLFVEQHKHYLDEIIEQISEFSKRVILADANLDKVLSAYNKHRDKPIREQAENIIHLFTLTNLGAPAAFKYFDTTIDRKRYTSTKEVLDATLIHQSITGLYETRIDLSQLGGDGGGGGGGGGGGTAPLEEEYRLFLEAPIQNVTLLEQWKREIPKVWAEINPPGLASTQAPIHVQLLSTALPVRVRQYPITLEAKRSLRETIRKFRAAGILRPVHSPWNTPLLPVRKSGTSEYRMVQDLREVNKRVETIHPTVPNPYTLLSLLPPDRIWYSVLDLKDAFFCIPLAPESQLIFAFEWADAEEGESGQLTWTRLPQGFKNSPTLFNEALNRDLQGFRLDHPSVSLLQYVDDLLIAADTQAACLSATRDLLMTLAELGYRVSGKKAQLCQEEVTYLGFKIHKGSRSLSNSRTQAILQIPVPKTKRQVREFLGTIGYCRLWIPGFAELAQPLYAATRPGNDPLVWGEKEEEAFQSLKLALTQPPALALPSLDKPFQLFVEETSGAAKGVLTQALGPWKRPVAYLSKRLDPVAAGWPRCLRAIAAAALLTREASKLTFGQDIEITSSHNLESLLRSPPDKWLTNARITQYQVLLLDPPRVRFKQTAALNPATLLPETDDTLPIHHCLDTLDSLTSTRPDLTDQPLAQAEATLFTDGSSYIRDGKRYAGAAVVTLDSVIWAEPLPIGTSAQKAELIALTKALEWSKDKSVNIYTDSRYAFATLHVHGMIYRERGWLTAGGKAIKNAPEILALLTAVWLPKRVAVMHCKGHQKDDAPTSTGNRRADEVAREVAIRPLSTQATISAGKRTADGSEFEKRTADGSEFESPKKKAKVE

SEQ ID NO: 6265 - protein, 2094 aa, synthetic construct
MPAAKRVKLDGGDKKYSIGLDIGTNSVGWAVITDEYKVPSKKFKVLGNTDRHSIKKNLIGALLFDSGETAEATRLKRTARRRYTRRKNRICYLQEIFSNEMAKVDDSFFHRLEESFLVEEDKKHERHPIFGNIVDEVAYHEKYPTIYHLRKKLVDSTDKADLRLIYLALAHMIKFRGHFLIEGDLNPDNSDVDKLFIQLVQTYNQLFEENPINASGVDAKAILSARLSKSRRLENLIAQLPGEKKNGLFGNLIALSLGLTPNFKSNFDLAEDAKLQLSKDTYDDDLDNLLAQIGDQYADLFLAAKNLSDAILLSDILRVNTEITKAPLSASMIKRYDEHHQDLTLLKALVRQQLPEKYKEIFFDQSKNGYAGYIDGGASQEEFYKFIKPILEKMDGTEELLVKLNREDLLRKQRTFDNGSIPHQIHLGELHAILRRQEDFYPFLKDNREKIEKILTFRIPYYVGPLARGNSRFAWMTRKSEETITPWNFEEVVDKGASAQSFIERMTNFDKNLPNEKVLPKHSLLYEYFTVYNELTKVKYVTEGMRKPAFLSGEQKKAIVDLLFKTNRKVTVKQLKEDYFKKIECFDSVEISGVEDRFNASLGTYHDLLKIIKDKDFLDNEENEDILEDIVLTLTLFEDREMIEERLKTYAHLFDDKVMKQLKRRRYTGWGRLSRKLINGIRDKQSGKTILDFLKSDGFANRNFMQLIHDDSLTFKEDIQKAQVSGQGDSLHEHIANLAGSPAIKKGILQTVKVVDELVKVMGRHKPENIVIEMARENQTTQKGQKNSRERMKRIEEGIKELGSQILKEHPVENTQLQNEKLYLYYLQNGRDMYVDQELDINRLSDYDVDHIVPQSFLKDDSIDNKVLTRSDKARGKSDNVPSEEVVKKMKNYWRQLLNAKLITQRKFDNLTKAERGGLSELDKAGFIKRQLVETRQITKHVAQILDSRMNTKYDENDKLIREVKVITLKSKLVSDFRKDFQFYKVREINNYHHAHDAYLNAVVGTALIKKYPKLESEFVYGDYKVYDVRKMIAKSEQEIGKATAKYFFYSNIMNFFKTEITLANGEIRKRPLIETNGETGEIVWDKGRDFATVRKVLSMPQVNIVKKTEVQTGGFSKESILPKRNSDKLIARKKDWDPKKYGGFDSPTVAYSVLVVAKVEKGKSKKLKSVKELLGITIMERSSFEKNPIDFLEAKGYKEVKKDLIIKLPKYSLFELENGRKRMLASAGELQKGNELALPSKYVNFLYLASHYEKLKGSPEDNEQKQLFVEQHKHYLDEIIEQISEFSKRVILADANLDKVLSAYNKHRDKPIREQAENIIHLFTLTNLGAPAAFKYFDTTIDRKRYTSTKEVLDATLIHQSITGLYETRIDLSQLGGDGGGGGGGGGGGTAPLEEEYRLFLEAPIQNVTLLEQWKREIPKVWAEINPPGLASTQAPIHVQLLSTALPVRVRQYPITLEAKRSLRETIRKFRAAGILRPVHSPWNTPLLPVRKSGTSEYRMVQDLREVNKRVETIHPTVPNPYTLLSLLPPDRIWYSVLDLKDAFFCIPLAPESQLIFAFEWADAEEGESGQLTWTRLPQGFKNSPTLFNEALNRDLQGFRLDHPSVSLLQYVDDLLIAADTQAACLSATRDLLMTLAELGYRVSGKKAQLCQEEVTYLGFKIHKGSRSLSNSRTQAILQIPVPKTKRQVREFLGKIGYCRLFIPGFAELAQPLYAATRPGNDPLVWGEKEEEAFQSLKLALTQPPALALPSLDKPFQLFVEETSGAAKGVLTQALGPWKRPVAYLSKRLDPVAAGWPRCLRAIAAAALLTREASKLTFGQDIEITSSHNLESLLRSPPDKWLTNARITQYQVLLLDPPRVRFKQTAALNPATLLPETDDTLPIHHCLDTLDSLTSTRPDLTDQPLAQAEATLFTDGSSYIRDGKRYAGAAVVTLDSVIWAEPLPIGTSAQKAELIALTKALEWSKDKSVNIYTDSRYAFATLHVHGMIYRERGWLTAGGKAIKNAPEILALLTAVWLPKRVAVMHCKGHQKDDAPTSTGNRRADEVAREVAIRPLSTQATISAGKRTADGSEFEKRTADGSEFESPKKKAKVE

SEQ ID NO: 6266 - protein, 2098 aa, synthetic construct
MPAAKRVKLDGGDKKYSIGLDIGTNSVGWAVITDEYKVPSKKFKVLGNTDRHSIKKNLIGALLFDSGETAEATRLKRTARRRYTRRKNRICYLQEIFSNEMAKVDDSFFHRLEESFLVEEDKKHERHPIFGNIVDEVAYHEKYPTIYHLRKKLVDSTDKADLRLIYLALAHMIKFRGHFLIEGDLNPDNSDVDKLFIQLVQTYNQLFEENPINASGVDAKAILSARLSKSRRLENLIAQLPGEKKNGLFGNLIALSLGLTPNFKSNFDLAEDAKLQLSKDTYDDDLDNLLAQIGDQYADLFLAAKNLSDAILLSDILRVNTEITKAPLSASMIKRYDEHHQDLTLLKALVRQQLPEKYKEIFFDQSKNGYAGYIDGGASQEEFYKFIKPILEKMDGTEELLVKLNREDLLRKQRTFDNGSIPHQIHLGELHAILRRQEDFYPFLKDNREKIEKILTFRIPYYVGPLARGNSRFAWMTRKSEETITPWNFEEVVDKGASAQSFIERMTNFDKNLPNEKVLPKHSLLYEYFTVYNELTKVKYVTEGMRKPAFLSGEQKKAIVDLLFKTNRKVTVKQLKEDYFKKIECFDSVEISGVEDRFNASLGTYHDLLKIIKDKDFLDNEENEDILEDIVLTLTLFEDREMIEERLKTYAHLFDDKVMKQLKRRRYTGWGRLSRKLINGIRDKQSGKTILDFLKSDGFANRNFMQLIHDDSLTFKEDIQKAQVSGQGDSLHEHIANLAGSPAIKKGILQTVKVVDELVKVMGRHKPENIVIEMARENQTTQKGQKNSRERMKRIEEGIKELGSQILKEHPVENTQLQNEKLYLYYLQNGRDMYVDQELDINRLSDYDVDHIVPQSFLKDDSIDNKVLTRSDKARGKSDNVPSEEVVKKMKNYWRQLLNAKLITQRKFDNLTKAERGGLSELDKAGFIKRQLVETRQITKHVAQILDSRMNTKYDENDKLIREVKVITLKSKLVSDFRKDFQFYKVREINNYHHAHDAYLNAVVGTALIKKYPKLESEFVYGDYKVYDVRKMIAKSEQEIGKATAKYFFYSNIMNFFKTEITLANGEIRKRPLIETNGETGEIVWDKGRDFATVRKVLSMPQVNIVKKTEVQTGGFSKESILPKRNSDKLIARKKDWDPKKYGGFDSPTVAYSVLVVAKVEKGKSKKLKSVKELLGITIMERSSFEKNPIDFLEAKGYKEVKKDLIIKLPKYSLFELENGRKRMLASAGELQKGNELALPSKYVNFLYLASHYEKLKGSPEDNEQKQLFVEQHKHYLDEIIEQISEFSKRVILADANLDKVLSAYNKHRDKPIREQAENIIHLFTLTNLGAPAAFKYFDTTIDRKRYTSTKEVLDATLIHQSITGLYETRIDLSQLGGDGGGGGGGGGGGTVSLQDEHRLFDIPVTTSLPDVWLQDFPQAWAETGGLGRAKCQAPIIIDLKPTAVPVSIKQYPMSLEAHMGIRQHIIKFLELGVLRPCRSPWNTPLLPVKKPGTQDYRPVQDLREINKRTVDIHPTVPNPYNLLSTLKPDYSWYTVLDLKDAFFCLPLAPQSQELFAFEWKDPERGISGQLTWTRLPQGFKNSPTLFNEALHRDLTDFRTQHPEVTLLQYVDDLLLAAPTKKACTQGTRHLLQELGEKGYRASAKKAQICQTKVTYLGYILSEGKRWLTPGRIETVARIPPPRNPREVREFLGKAGFCRLFIPGFAELAAPLYALTKPSTPFTWQTEHQLAFEALKKALLSAPALGLPDTSKPFTLFLDERQGIAKGVLTQKLGPWKRPVAYLSKKLDPVAAGWPPCLRIMAATAMLVKDSAKLTLGQPLTVITPHTLEAIVRQPPDRWITNARLTHYQALLLDTDRVQFGPPVTLNPATLLPVPENQPSPHDCRQVLAETHGTREDLKDQELPDADHTWYTDGSSYLDSGTRRAGAAVVDGHNTIWAQSLPPGTSAQKAELIALTKALELSKGKKANIYTDSRYAFATAHTHGSIYERRGWLTSEGKEIKNKAEIIALLKALFLPQEVAIIHCPGHQKGQDPVAVGNRQADRVARQAAMAEVLTLATEPDNTSHITAGKRTADGSEFEKRTADGSEFESPKKKAKVE

SEQ ID NO: 6267 - protein, 2091 aa, synthetic construct
MPAAKRVKLDGGDKKYSIGLDIGTNSVGWAVITDEYKVPSKKFKVLGNTDRHSIKKNLIGALLFDSGETAEATRLKRTARRRYTRRKNRICYLQEIFSNEMAKVDDSFFHRLEESFLVEEDKKHERHPIFGNIVDEVAYHEKYPTIYHLRKKLVDSTDKADLRLIYLALAHMIKFRGHFLIEGDLNPDNSDVDKLFIQLVQTYNQLFEENPINASGVDAKAILSARLSKSRRLENLIAQLPGEKKNGLFGNLIALSLGLTPNFKSNFDLAEDAKLQLSKDTYDDDLDNLLAQIGDQYADLFLAAKNLSDAILLSDILRVNTEITKAPLSASMIKRYDEHHQDLTLLKALVRQQLPEKYKEIFFDQSKNGYAGYIDGGASQEEFYKFIKPILEKMDGTEELLVKLNREDLLRKQRTFDNGSIPHQIHLGELHAILRRQEDFYPFLKDNREKIEKILTFRIPYYVGPLARGNSRFAWMTRKSEETITPWNFEEVVDKGASAQSFIERMTNFDKNLPNEKVLPKHSLLYEYFTVYNELTKVKYVTEGMRKPAFLSGEQKKAIVDLLFKTNRKVTVKQLKEDYFKKIECFDSVEISGVEDRFNASLGTYHDLLKIIKDKDFLDNEENEDILEDIVLTLTLFEDREMIEERLKTYAHLFDDKVMKQLKRRRYTGWGRLSRKLINGIRDKQSGKTILDFLKSDGFANRNFMQLIHDDSLTFKEDIQKAQVSGQGDSLHEHIANLAGSPAIKKGILQTVKVVDELVKVMGRHKPENIVIEMARENQTTQKGQKNSRERMKRIEEGIKELGSQILKEHPVENTQLQNEKLYLYYLQNGRDMYVDQELDINRLSDYDVDHIVPQSFLKDDSIDNKVLTRSDKARGKSDNVPSEEVVKKMKNYWRQLLNAKLITQRKFDNLTKAERGGLSELDKAGFIKRQLVETRQITKHVAQILDSRMNTKYDENDKLIREVKVITLKSKLVSDFRKDFQFYKVREINNYHHAHDAYLNAVVGTALIKKYPKLESEFVYGDYKVYDVRKMIAKSEQEIGKATAKYFFYSNIMNFFKTEITLANGEIRKRPLIETNGETGEIVWDKGRDFATVRKVLSMPQVNIVKKTEVQTGGFSKESILPKRNSDKLIARKKDWDPKKYGGFDSPTVAYSVLVVAKVEKGKSKKLKSVKELLGITIMERSSFEKNPIDFLEAKGYKEVKKDLIIKLPKYSLFELENGRKRMLASAGELQKGNELALPSKYVNFLYLASHYEKLKGSPEDNEQKQLFVEQHKHYLDEIIEQISEFSKRVILADANLDKVLSAYNKHRDKPIREQAENIIHLFTLTNLGAPAAFKYFDTTIDRKRYTSTKEVLDATLIHQSITGLYETRIDLSQLGGDGGGGGGGGGGGTLQLEEEYRLFEPESTQKQEMDIWLKNFPQAWAETGGMGTAHCQAPVLIQLKATATPISIRQYPMPHEAYQGIKPHIRRMLDQGILKPCQSPWNTPLLPVKKPGTEDYRPVQDLREVNKRVEDIHPTVPNPYNLLSTLPPSHPWYTVLDLKDAFFCLRLHSESQLLFAFEWRDPEIGLSGQLTWTRLPQGFKNSPTLFNEALHSDLADFRVRYPALVLLQYVDDLLLAAATRTECLEGTKALLETLGNKGYRASAKKAQICLQEVTYLGYSLKDGQRWLTKARKEAILSIPVPKNSRQVREFLGKAGYCRLFIPGFAELAAPLYPLTRPGTLFQWGTEQQLAFEDIKKALLSSPALGLPDITKPFELFIDENSGFAKGVLVQKLGPWKRPVAYLSKKLDTVASGWPPCLRMVAAIAILVKDAGKLTLGQPLTILTSHPVEALVRQPPNKWLSNARMTHYQAMLLDAERVHFGPTVSLNPATLLPLPSGGNHHDCLQILAETHGTRPDLTDQPLPDADLTWYTDGSSFIRNGEREAGAAVTTESEVIWAAPLPPGTSAQRAELIALTQALKMAEGKKLTVYTDSRYAFATTHVHGEIYRRRGWLTSEGKEIKNKNEILALLEALFLPKRLSIIHCPGHQKGDSPQAKGNRLADDTAKKAATETHSSLTVLPAGKRTADGSEFEKRTADGSEFESPKKKAKVE

SEQ ID NO: 6268 - protein, 2123 aa, synthetic construct
MPAAKRVKLDGGDKKYSIGLDIGTNSVGWAVITDEYKVPSKKFKVLGNTDRHSIKKNLIGALLFDSGETAEATRLKRTARRRYTRRKNRICYLQEIFSNEMAKVDDSFFHRLEESFLVEEDKKHERHPIFGNIVDEVAYHEKYPTIYHLRKKLVDSTDKADLRLIYLALAHMIKFRGHFLIEGDLNPDNSDVDKLFIQLVQTYNQLFEENPINASGVDAKAILSARLSKSRRLENLIAQLPGEKKNGLFGNLIALSLGLTPNFKSNFDLAEDAKLQLSKDTYDDDLDNLLAQIGDQYADLFLAAKNLSDAILLSDILRVNTEITKAPLSASMIKRYDEHHQDLTLLKALVRQQLPEKYKEIFFDQSKNGYAGYIDGGASQEEFYKFIKPILEKMDGTEELLVKLNREDLLRKQRTFDNGSIPHQIHLGELHAILRRQEDFYPFLKDNREKIEKILTFRIPYYVGPLARGNSRFAWMTRKSEETITPWNFEEVVDKGASAQSFIERMTNFDKNLPNEKVLPKHSLLYEYFTVYNELTKVKYVTEGMRKPAFLSGEQKKAIVDLLFKTNRKVTVKQLKEDYFKKIECFDSVEISGVEDRFNASLGTYHDLLKIIKDKDFLDNEENEDILEDIVLTLTLFEDREMIEERLKTYAHLFDDKVMKQLKRRRYTGWGRLSRKLINGIRDKQSGKTILDFLKSDGFANRNFMQLIHDDSLTFKEDIQKAQVSGQGDSLHEHIANLAGSPAIKKGILQTVKVVDELVKVMGRHKPENIVIEMARENQTTQKGQKNSRERMKRIEEGIKELGSQILKEHPVENTQLQNEKLYLYYLQNGRDMYVDQELDINRLSDYDVDHIVPQSFLKDDSIDNKVLTRSDKARGKSDNVPSEEVVKKMKNYWRQLLNAKLITQRKFDNLTKAERGGLSELDKAGFIKRQLVETRQITKHVAQILDSRMNTKYDENDKLIREVKVITLKSKLVSDFRKDFQFYKVREINNYHHAHDAYLNAVVGTALIKKYPKLESEFVYGDYKVYDVRKMIAKSEQEIGKATAKYFFYSNIMNFFKTEITLANGEIRKRPLIETNGETGEIVWDKGRDFATVRKVLSMPQVNIVKKTEVQTGGFSKESILPKRNSDKLIARKKDWDPKKYGGFDSPTVAYSVLVVAKVEKGKSKKLKSVKELLGITIMERSSFEKNPIDFLEAKGYKEVKKDLIIKLPKYSLFELENGRKRMLASAGELQKGNELALPSKYVNFLYLASHYEKLKGSPEDNEQKQLFVEQHKHYLDEIIEQISEFSKRVILADANLDKVLSAYNKHRDKPIREQAENIIHLFTLTNLGAPAAFKYFDTTIDRKRYTSTKEVLDATLIHQSITGLYETRIDLSQLGGDGGGGGGGGGGGLLGRDLLTKLKAQIQFSTEGPQVTWEDRPAMCLVLNLEEEYRLHEKPVPPSIDPSWLQLFPMVWAEKAGMGLANQVPPVVVELKSDASPVAVRQYPMSKEAREGIRPHIQRFLDLGILVPCQSPWNTPLLPVKKPGTNDYRPVQDLREVNKRVQDIHPTVPNPYNLLSSLPPSHTWYSVLDLKDAFFCLKLHPNSQPLFAFEWRDPEKGNTGQLTWTRLPQGFKNSPTLFNEALHRDLASFRALNPQVVMLQYVDDLLVAAPTYRDCKEGTRRLLQELSKLGYRVSAKKAQLCREEVTYLGYLLKGGKRWLTPARKATVMKIPTPTTPRQVREFLGTAGFCRLWIPGFASLAAPLYPLTRPKVPFTWTEAHQEAFGRIKEALLSAPALALPDLTKPFALYVDEKEGVARGVLTQTLGPWRRPVAYLSKKLDPVASGWPTCLKAIAAVALLLKDADKLTLGQNVLVIAPHNLESIVRQPPDRWMTNARMTHYQSLLLNERVSFAPPAILNPATLLPVESDDTPIHICSEILAEETGTRPDLRDQPLPGVPAWYTDGSSFIMDGRRQAGAAIVDNKRTVWASNLPEGTSAQKAELIALTQALRLAEGKSINIYTDSRYAFATAHVHGAIYKQRGWLTSAGKDIKNKEEILALLEAIHLPKRVAIIHCPGHQRGTDPVATGNRKADEAAKQAAQSTRILTETTKNAGKRTADGSEFEKRTADGSEFESPKKKAKVE

SEQ ID NO: 6269 - protein, 2123 aa, synthetic construct
MPAAKRVKLDGGDKKYSIGLDIGTNSVGWAVITDEYKVPSKKFKVLGNTDRHSIKKNLIGALLFDSGETAEATRLKRTARRRYTRRKNRICYLQEIFSNEMAKVDDSFFHRLEESFLVEEDKKHERHPIFGNIVDEVAYHEKYPTIYHLRKKLVDSTDKADLRLIYLALAHMIKFRGHFLIEGDLNPDNSDVDKLFIQLVQTYNQLFEENPINASGVDAKAILSARLSKSRRLENLIAQLPGEKKNGLFGNLIALSLGLTPNFKSNFDLAEDAKLQLSKDTYDDDLDNLLAQIGDQYADLFLAAKNLSDAILLSDILRVNTEITKAPLSASMIKRYDEHHQDLTLLKALVRQQLPEKYKEIFFDQSKNGYAGYIDGGASQEEFYKFIKPILEKMDGTEELLVKLNREDLLRKQRTFDNGSIPHQIHLGELHAILRRQEDFYPFLKDNREKIEKILTFRIPYYVGPLARGNSRFAWMTRKSEETITPWNFEEVVDKGASAQSFIERMTNFDKNLPNEKVLPKHSLLYEYFTVYNELTKVKYVTEGMRKPAFLSGEQKKAIVDLLFKTNRKVTVKQLKEDYFKKIECFDSVEISGVEDRFNASLGTYHDLLKIIKDKDFLDNEENEDILEDIVLTLTLFEDREMIEERLKTYAHLFDDKVMKQLKRRRYTGWGRLSRKLINGIRDKQSGKTILDFLKSDGFANRNFMQLIHDDSLTFKEDIQKAQVSGQGDSLHEHIANLAGSPAIKKGILQTVKVVDELVKVMGRHKPENIVIEMARENQTTQKGQKNSRERMKRIEEGIKELGSQILKEHPVENTQLQNEKLYLYYLQNGRDMYVDQELDINRLSDYDVDHIVPQSFLKDDSIDNKVLTRSDKARGKSDNVPSEEVVKKMKNYWRQLLNAKLITQRKFDNLTKAERGGLSELDKAGFIKRQLVETRQITKHVAQILDSRMNTKYDENDKLIREVKVITLKSKLVSDFRKDFQFYKVREINNYHHAHDAYLNAVVGTALIKKYPKLESEFVYGDYKVYDVRKMIAKSEQEIGKATAKYFFYSNIMNFFKTEITLANGEIRKRPLIETNGETGEIVWDKGRDFATVRKVLSMPQVNIVKKTEVQTGGFSKESILPKRNSDKLIARKKDWDPKKYGGFDSPTVAYSVLVVAKVEKGKSKKLKSVKELLGITIMERSSFEKNPIDFLEAKGYKEVKKDLIIKLPKYSLFELENGRKRMLASAGELQKGNELALPSKYVNFLYLASHYEKLKGSPEDNEQKQLFVEQHKHYLDEIIEQISEFSKRVILADANLDKVLSAYNKHRDKPIREQAENIIHLFTLTNLGAPAAFKYFDTTIDRKRYTSTKEVLDATLIHQSITGLYETRIDLSQLGGDGGGGGGGGGGGLLGRDLLTKLKAQIQFSTEGPQVTWEDRPAMCLVLNLEEEYRLHEKPVPPSIDPSWLQLFPMVWAEKAGMGLANQVPPVVVELKSDASPVAVRQYPMSKEAREGIRPHIQRFLDLGILVPCQSPWNTPLLPVKKPGTNDYRPVQDLREVNKRVQDIHPTVPNPYNLLSSLPPSHTWYSVLDLKDAFFCLKLHPNSQPLFAFEWRDPEKGNTGQLTWTRLPQGFKNSPTLFNEALHRDLASFRALNPQVVMLQYVDDLLVAAPTYRDCKEGTRRLLQELSKLGYRVSAKKAQLCREEVTYLGYLLKGGKRWLTPARKATVMKIPTPTTPRQVREFLGKAGFCRLFIPGFASLAAPLYPLTRPKVPFTWTEAHQEAFGRIKEALLSAPALALPDLTKPFALYVDEKEGVARGVLTQTLGPWRRPVAYLSKKLDPVASGWPTCLKAIAAVALLLKDADKLTLGQNVLVIAPHNLESIVRQPPDRWMTNARMTHYQSLLLNERVSFAPPAILNPATLLPVESDDTPIHICSEILAEETGTRPDLRDQPLPGVPAWYTDGSSFIMDGRRQAGAAIVDNKRTVWASNLPEGTSAQKAELIALTQALRLAEGKSINIYTDSRYAFATAHVHGAIYKQRGWLTSAGKDIKNKEEILALLEAIHLPKRVAIIHCPGHQRGTDPVATGNRKADEAAKQAAQSTRILTETTKNAGKRTADGSEFEKRTADGSEFESPKKKAKVE

SEQ ID NO: 6270 - protein, 2092 aa, synthetic construct
MPAAKRVKLDGGDKKYSIGLDIGTNSVGWAVITDEYKVPSKKFKVLGNTDRHSIKKNLIGALLFDSGETAEATRLKRTARRRYTRRKNRICYLQEIFSNEMAKVDDSFFHRLEESFLVEEDKKHERHPIFGNIVDEVAYHEKYPTIYHLRKKLVDSTDKADLRLIYLALAHMIKFRGHFLIEGDLNPDNSDVDKLFIQLVQTYNQLFEENPINASGVDAKAILSARLSKSRRLENLIAQLPGEKKNGLFGNLIALSLGLTPNFKSNFDLAEDAKLQLSKDTYDDDLDNLLAQIGDQYADLFLAAKNLSDAILLSDILRVNTEITKAPLSASMIKRYDEHHQDLTLLKALVRQQLPEKYKEIFFDQSKNGYAGYIDGGASQEEFYKFIKPILEKMDGTEELLVKLNREDLLRKQRTFDNGSIPHQIHLGELHAILRRQEDFYPFLKDNREKIEKILTFRIPYYVGPLARGNSRFAWMTRKSEETITPWNFEEVVDKGASAQSFIERMTNFDKNLPNEKVLPKHSLLYEYFTVYNELTKVKYVTEGMRKPAFLSGEQKKAIVDLLFKTNRKVTVKQLKEDYFKKIECFDSVEISGVEDRFNASLGTYHDLLKIIKDKDFLDNEENEDILEDIVLTLTLFEDREMIEERLKTYAHLFDDKVMKQLKRRRYTGWGRLSRKLINGIRDKQSGKTILDFLKSDGFANRNFMQLIHDDSLTFKEDIQKAQVSGQGDSLHEHIANLAGSPAIKKGILQTVKVVDELVKVMGRHKPENIVIEMARENQTTQKGQKNSRERMKRIEEGIKELGSQILKEHPVENTQLQNEKLYLYYLQNGRDMYVDQELDINRLSDYDVDHIVPQSFLKDDSIDNKVLTRSDKARGKSDNVPSEEVVKKMKNYWRQLLNAKLITQRKFDNLTKAERGGLSELDKAGFIKRQLVETRQITKHVAQILDSRMNTKYDENDKLIREVKVITLKSKLVSDFRKDFQFYKVREINNYHHAHDAYLNAVVGTALIKKYPKLESEFVYGDYKVYDVRKMIAKSEQEIGKATAKYFFYSNIMNFFKTEITLANGEIRKRPLIETNGETGEIVWDKGRDFATVRKVLSMPQVNIVKKTEVQTGGFSKESILPKRNSDKLIARKKDWDPKKYGGFDSPTVAYSVLVVAKVEKGKSKKLKSVKELLGITIMERSSFEKNPIDFLEAKGYKEVKKDLIIKLPKYSLFELENGRKRMLASAGELQKGNELALPSKYVNFLYLASHYEKLKGSPEDNEQKQLFVEQHKHYLDEIIEQISEFSKRVILADANLDKVLSAYNKHRDKPIREQAENIIHLFTLTNLGAPAAFKYFDTTIDRKRYTSTKEVLDATLIHQSITGLYETRIDLSQLGGDGGGGGGGGGGGTLNLEDEYRLYETSAEPEVSPGSTWLSDFPQAWAETGGMGLAVRQAPLIIPLKATSTPVSIKQYPMSQEAKLGIKPHIQRLLDQGILVPCQSPWNTPLLPVKKPGTNDYRPVQDLREVNKRVEDIHPTVPNPYNLLSGLPPSHRWYTVLDLKDAFFCLRLHPTSQPLFAFEWRDPGMGISGQLTWTRLPQGFKNSPTLFNEALHRDLADFRIQHPDLILLQYVDDILLAATSELDCQQGTRALLLTLGNLGYRASAKKAQLCQKQVKYLGYLLKEGQRWLTEARKETVMGQPTPKTPRQLREFLGTAGFCRLWIPGFAEMAAPLYPLTKPGTLFNWGPDQQKAYQEIKQALLTAPALGLPDLTKPFELFVDEKQGYAKGVLTQKLGPWRRPVAYLSKKLDPVAAGWPPCLRMVAAIAVLRKDAGKLTMGQPLVILAPHAVEALVKQPPDRWLSNARMTHYQAMLLDTDRVQFGPVVALNPATLLPLPEEGAPHDCLEILAETHGTRPDLTDQPIPDADHTWYTDGSSFLQEGQRKAGAAVTTETEVIWARALPAGTSAQRAELIALTQALKMAEGKRLNVYTDSRYAFATAHIHGEIYRRRGWLTSEGREIKNKSEILALLKALFLPKRLSIIHCLGHQKGDSAEARGNRLADQAAREAAIKTPPDTSTLLAGKRTADGSEFEKRTADGSEFESPKKKAKVE

SEQ ID NO: 6271 - protein, 2092 aa, synthetic construct
MPAAKRVKLDGGDKKYSIGLDIGTNSVGWAVITDEYKVPSKKFKVLGNTDRHSIKKNLIGALLFDSGETAEATRLKRTARRRYTRRKNRICYLQEIFSNEMAKVDDSFFHRLEESFLVEEDKKHERHPIFGNIVDEVAYHEKYPTIYHLRKKLVDSTDKADLRLIYLALAHMIKFRGHFLIEGDLNPDNSDVDKLFIQLVQTYNQLFEENPINASGVDAKAILSARLSKSRRLENLIAQLPGEKKNGLFGNLIALSLGLTPNFKSNFDLAEDAKLQLSKDTYDDDLDNLLAQIGDQYADLFLAAKNLSDAILLSDILRVNTEITKAPLSASMIKRYDEHHQDLTLLKALVRQQLPEKYKEIFFDQSKNGYAGYIDGGASQEEFYKFIKPILEKMDGTEELLVKLNREDLLRKQRTFDNGSIPHQIHLGELHAILRRQEDFYPFLKDNREKIEKILTFRIPYYVGPLARGNSRFAWMTRKSEETITPWNFEEVVDKGASAQSFIERMTNFDKNLPNEKVLPKHSLLYEYFTVYNELTKVKYVTEGMRKPAFLSGEQKKAIVDLLFKTNRKVTVKQLKEDYFKKIECFDSVEISGVEDRFNASLGTYHDLLKIIKDKDFLDNEENEDILEDIVLTLTLFEDREMIEERLKTYAHLFDDKVMKQLKRRRYTGWGRLSRKLINGIRDKQSGKTILDFLKSDGFANRNFMQLIHDDSLTFKEDIQKAQVSGQGDSLHEHIANLAGSPAIKKGILQTVKVVDELVKVMGRHKPENIVIEMARENQTTQKGQKNSRERMKRIEEGIKELGSQILKEHPVENTQLQNEKLYLYYLQNGRDMYVDQELDINRLSDYDVDHIVPQSFLKDDSIDNKVLTRSDKARGKSDNVPSEEVVKKMKNYWRQLLNAKLITQRKFDNLTKAERGGLSELDKAGFIKRQLVETRQITKHVAQILDSRMNTKYDENDKLIREVKVITLKSKLVSDFRKDFQFYKVREINNYHHAHDAYLNAVVGTALIKKYPKLESEFVYGDYKVYDVRKMIAKSEQEIGKATAKYFFYSNIMNFFKTEITLANGEIRKRPLIETNGETGEIVWDKGRDFATVRKVLSMPQVNIVKKTEVQTGGFSKESILPKRNSDKLIARKKDWDPKKYGGFDSPTVAYSVLVVAKVEKGKSKKLKSVKELLGITIMERSSFEKNPIDFLEAKGYKEVKKDLIIKLPKYSLFELENGRKRMLASAGELQKGNELALPSKYVNFLYLASHYEKLKGSPEDNEQKQLFVEQHKHYLDEIIEQISEFSKRVILADANLDKVLSAYNKHRDKPIREQAENIIHLFTLTNLGAPAAFKYFDTTIDRKRYTSTKEVLDATLIHQSITGLYETRIDLSQLGGDGGGGGGGGGGGTLNLEDEYRLYETSAEPEVSPGSTWLSDFPQAWAETGGMGLAVRQAPLIIPLKATSTPVSIKQYPMSQEAKLGIKPHIQRLLDQGILVPCQSPWNTPLLPVKKPGTNDYRPVQDLREVNKRVEDIHPTVPNPYNLLSGLPPSHRWYTVLDLKDAFFCLRLHPTSQPLFAFEWRDPGMGISGQLTWTRLPQGFKNSPTLFNEALHRDLADFRIQHPDLILLQYVDDILLAATSELDCQQGTRALLLTLGNLGYRASAKKAQLCQKQVKYLGYLLKEGQRWLTEARKETVMGQPTPKTPRQLREFLGKAGFCRLFIPGFAEMAAPLYPLTKPGTLFNWGPDQQKAYQEIKQALLTAPALGLPDLTKPFELFVDEKQGYAKGVLTQKLGPWRRPVAYLSKKLDPVAAGWPPCLRMVAAIAVLRKDAGKLTMGQPLVILAPHAVEALVKQPPDRWLSNARMTHYQAMLLDTDRVQFGPVVALNPATLLPLPEEGAPHDCLEILAETHGTRPDLTDQPIPDADHTWYTDGSSFLQEGQRKAGAAVTTETEVIWARALPAGTSAQRAELIALTQALKMAEGKRLNVYTDSRYAFATAHIHGEIYRRRGWLTSEGREIKNKSEILALLKALFLPKRLSIIHCLGHQKGDSAEARGNRLADQAAREAAIKTPPDTSTLLAGKRTADGSEFEKRTADGSEFESPKKKAKVE

SEQ ID NO: 6272 - protein, 2090 aa, synthetic construct
MPAAKRVKLDGGDKKYSIGLDIGTNSVGWAVITDEYKVPSKKFKVLGNTDRHSIKKNLIGALLFDSGETAEATRLKRTARRRYTRRKNRICYLQEIFSNEMAKVDDSFFHRLEESFLVEEDKKHERHPIFGNIVDEVAYHEKYPTIYHLRKKLVDSTDKADLRLIYLALAHMIKFRGHFLIEGDLNPDNSDVDKLFIQLVQTYNQLFEENPINASGVDAKAILSARLSKSRRLENLIAQLPGEKKNGLFGNLIALSLGLTPNFKSNFDLAEDAKLQLSKDTYDDDLDNLLAQIGDQYADLFLAAKNLSDAILLSDILRVNTEITKAPLSASMIKRYDEHHQDLTLLKALVRQQLPEKYKEIFFDQSKNGYAGYIDGGASQEEFYKFIKPILEKMDGTEELLVKLNREDLLRKQRTFDNGSIPHQIHLGELHAILRRQEDFYPFLKDNREKIEKILTFRIPYYVGPLARGNSRFAWMTRKSEETITPWNFEEVVDKGASAQSFIERMTNFDKNLPNEKVLPKHSLLYEYFTVYNELTKVKYVTEGMRKPAFLSGEQKKAIVDLLFKTNRKVTVKQLKEDYFKKIECFDSVEISGVEDRFNASLGTYHDLLKIIKDKDFLDNEENEDILEDIVLTLTLFEDREMIEERLKTYAHLFDDKVMKQLKRRRYTGWGRLSRKLINGIRDKQSGKTILDFLKSDGFANRNFMQLIHDDSLTFKEDIQKAQVSGQGDSLHEHIANLAGSPAIKKGILQTVKVVDELVKVMGRHKPENIVIEMARENQTTQKGQKNSRERMKRIEEGIKELGSQILKEHPVENTQLQNEKLYLYYLQNGRDMYVDQELDINRLSDYDVDHIVPQSFLKDDSIDNKVLTRSDKARGKSDNVPSEEVVKKMKNYWRQLLNAKLITQRKFDNLTKAERGGLSELDKAGFIKRQLVETRQITKHVAQILDSRMNTKYDENDKLIREVKVITLKSKLVSDFRKDFQFYKVREINNYHHAHDAYLNAVVGTALIKKYPKLESEFVYGDYKVYDVRKMIAKSEQEIGKATAKYFFYSNIMNFFKTEITLANGEIRKRPLIETNGETGEIVWDKGRDFATVRKVLSMPQVNIVKKTEVQTGGFSKESILPKRNSDKLIARKKDWDPKKYGGFDSPTVAYSVLVVAKVEKGKSKKLKSVKELLGITIMERSSFEKNPIDFLEAKGYKEVKKDLIIKLPKYSLFELENGRKRMLASAGELQKGNELALPSKYVNFLYLASHYEKLKGSPEDNEQKQLFVEQHKHYLDEIIEQISEFSKRVILADANLDKVLSAYNKHRDKPIREQAENIIHLFTLTNLGAPAAFKYFDTTIDRKRYTSTKEVLDATLIHQSITGLYETRIDLSQLGGDGGGGGGGGGGGVLNLEEEYRLHEKPVPSSIDPSWLQLFPTVWAERAGMGLANQVPPVVVELRSGASPVAVRQYPMSKEAREGIRPHIQRFLDLGVLVPCQSPWNTPLLPVKKPGTNDYRPVQDLREINKRVQDIHPTVPNPYNLLSSLPPSHTWYSVLDLKDAFFCLKLHPNSQPLFAFEWRDPEKGNTGQLTWTRLPQGFKNSPTLFNEALHRDLAPFRALNPQVVLLQYVDDLLVAAPTYRDCKEGTQKLLQELSKLGYRVSAKKAQLCQKEVTYLGYLLKEGKRWLTPARKATVMKIPPPTTPRQVREFLGKAGFCRLFIPGFASLAAPLYPLTKPSIPFIWTEEHQKAFDRIKEALLSAPALALPDLTKPFTLYVDERAGVARGVLTQTLGPWRRPVAYLSKKLDPVASGWPTCLKAVAAVALLLKDADKLTLGQNVTVIASHSLESIVRQPPDRWMTNARMTHYQSLLLNERVSFAPPAVLNPATLLPVESEATPVHRCSEILAEETGTRRDLKDQPLPGVPAWYTDGSSFIAEGKRRAGAAIVDGKRTVWASSLPEGTSAQKAELVALTQALRLAEGKDINIYTDSRYAFATAHIHGAIYKQRGWLTSAGKDIKNKEEILALLEAIHLPKRVAIIHCPGHQKGNDPVATGNRRADEAAKQAALSTRVLAETTKPAGKRTADGSEFEKRTADGSEFESPKKKAKVE

SEQ ID NO: 6273 - protein, 2092 aa, synthetic construct
MPAAKRVKLDGGDKKYSIGLDIGTNSVGWAVITDEYKVPSKKFKVLGNTDRHSIKKNLIGALLFDSGETAEATRLKRTARRRYTRRKNRICYLQEIFSNEMAKVDDSFFHRLEESFLVEEDKKHERHPIFGNIVDEVAYHEKYPTIYHLRKKLVDSTDKADLRLIYLALAHMIKFRGHFLIEGDLNPDNSDVDKLFIQLVQTYNQLFEENPINASGVDAKAILSARLSKSRRLENLIAQLPGEKKNGLFGNLIALSLGLTPNFKSNFDLAEDAKLQLSKDTYDDDLDNLLAQIGDQYADLFLAAKNLSDAILLSDILRVNTEITKAPLSASMIKRYDEHHQDLTLLKALVRQQLPEKYKEIFFDQSKNGYAGYIDGGASQEEFYKFIKPILEKMDGTEELLVKLNREDLLRKQRTFDNGSIPHQIHLGELHAILRRQEDFYPFLKDNREKIEKILTFRIPYYVGPLARGNSRFAWMTRKSEETITPWNFEEVVDKGASAQSFIERMTNFDKNLPNEKVLPKHSLLYEYFTVYNELTKVKYVTEGMRKPAFLSGEQKKAIVDLLFKTNRKVTVKQLKEDYFKKIECFDSVEISGVEDRFNASLGTYHDLLKIIKDKDFLDNEENEDILEDIVLTLTLFEDREMIEERLKTYAHLFDDKVMKQLKRRRYTGWGRLSRKLINGIRDKQSGKTILDFLKSDGFANRNFMQLIHDDSLTFKEDIQKAQVSGQGDSLHEHIANLAGSPAIKKGILQTVKVVDELVKVMGRHKPENIVIEMARENQTTQKGQKNSRERMKRIEEGIKELGSQILKEHPVENTQLQNEKLYLYYLQNGRDMYVDQELDINRLSDYDVDHIVPQSFLKDDSIDNKVLTRSDKARGKSDNVPSEEVVKKMKNYWRQLLNAKLITQRKFDNLTKAERGGLSELDKAGFIKRQLVETRQITKHVAQILDSRMNTKYDENDKLIREVKVITLKSKLVSDFRKDFQFYKVREINNYHHAHDAYLNAVVGTALIKKYPKLESEFVYGDYKVYDVRKMIAKSEQEIGKATAKYFFYSNIMNFFKTEITLANGEIRKRPLIETNGETGEIVWDKGRDFATVRKVLSMPQVNIVKKTEVQTGGFSKESILPKRNSDKLIARKKDWDPKKYGGFDSPTVAYSVLVVAKVEKGKSKKLKSVKELLGITIMERSSFEKNPIDFLEAKGYKEVKKDLIIKLPKYSLFELENGRKRMLASAGELQKGNELALPSKYVNFLYLASHYEKLKGSPEDNEQKQLFVEQHKHYLDEIIEQISEFSKRVILADANLDKVLSAYNKHRDKPIREQAENIIHLFTLTNLGAPAAFKYFDTTIDRKRYTSTKEVLDATLIHQSITGLYETRIDLSQLGGDGGGGGGGGGGGTLNIEDEYRLHETSKEPDVPLGSTWLSDFPQAWAETGGMGLAVRQAPLIIPLKATSTPVSIKQYPMSQEARLGIKPHIQRLLDQGILVPCQSPWNTPLLPVKKPGTNDYRPVQDLREVNKRVEDIHPTVPNPYNLLSGLPPSHQWYTVLDLKDAFFCLRLHPTSQPLFAFEWRDPEMGISGQLTWTRLPQGFKNSPTLFNEALHRDLADFRIQHPDLILLQYVDDLLLAATSEQDCQRGTRALLQTLGNLGYRASAKKAQICQKQVKYLGYLLKEGQRWLTEARKETVMGQPTPKTPRQLREFLGKAGFCRLFIPGFAEMAAPLYPLTKPGTLFNWGPDQQKAYQEIKQALLTAPALGLPDLTKPFELFVDEKQGYAKGVLTQKLGPWRRPVAYLSKKLDPVAAGWPPCLRMVAAIAVLTKDAGKLTMGQPLVILAPHAVEALVKQPPDRWLSNARMTHYQAMLLDTDRVQFGPVVALNPATLLPLPEKEAPHDCLEILAETHGTRPDLTDQPIPDADYTWYTDGSSFLQEGQRRAGAAVTTETEVIWARALPAGTSAQRAELIALTQALKMAEGKKLNVYTDSRYAFATAHVHGEIYRRRGWLTSEGREIKNKNEILALLKALFLPKRLSIIHCPGHQKGNSAEARGNRMADQAAREAAMKAVLETSTLLAGKRTADGSEFEKRTADGSEFESPKKKAKVE

SEQ ID NO: 6274 - protein, 2095 aa, synthetic construct
MPAAKRVKLDGGDKKYSIGLDIGTNSVGWAVITDEYKVPSKKFKVLGNTDRHSIKKNLIGALLFDSGETAEATRLKRTARRRYTRRKNRICYLQEIFSNEMAKVDDSFFHRLEESFLVEEDKKHERHPIFGNIVDEVAYHEKYPTIYHLRKKLVDSTDKADLRLIYLALAHMIKFRGHFLIEGDLNPDNSDVDKLFIQLVQTYNQLFEENPINASGVDAKAILSARLSKSRRLENLIAQLPGEKKNGLFGNLIALSLGLTPNFKSNFDLAEDAKLQLSKDTYDDDLDNLLAQIGDQYADLFLAAKNLSDAILLSDILRVNTEITKAPLSASMIKRYDEHHQDLTLLKALVRQQLPEKYKEIFFDQSKNGYAGYIDGGASQEEFYKFIKPILEKMDGTEELLVKLNREDLLRKQRTFDNGSIPHQIHLGELHAILRRQEDFYPFLKDNREKIEKILTFRIPYYVGPLARGNSRFAWMTRKSEETITPWNFEEVVDKGASAQSFIERMTNFDKNLPNEKVLPKHSLLYEYFTVYNELTKVKYVTEGMRKPAFLSGEQKKAIVDLLFKTNRKVTVKQLKEDYFKKIECFDSVEISGVEDRFNASLGTYHDLLKIIKDKDFLDNEENEDILEDIVLTLTLFEDREMIEERLKTYAHLFDDKVMKQLKRRRYTGWGRLSRKLINGIRDKQSGKTILDFLKSDGFANRNFMQLIHDDSLTFKEDIQKAQVSGQGDSLHEHIANLAGSPAIKKGILQTVKVVDELVKVMGRHKPENIVIEMARENQTTQKGQKNSRERMKRIEEGIKELGSQILKEHPVENTQLQNEKLYLYYLQNGRDMYVDQELDINRLSDYDVDHIVPQSFLKDDSIDNKVLTRSDKARGKSDNVPSEEVVKKMKNYWRQLLNAKLITQRKFDNLTKAERGGLSELDKAGFIKRQLVETRQITKHVAQILDSRMNTKYDENDKLIREVKVITLKSKLVSDFRKDFQFYKVREINNYHHAHDAYLNAVVGTALIKKYPKLESEFVYGDYKVYDVRKMIAKSEQEIGKATAKYFFYSNIMNFFKTEITLANGEIRKRPLIETNGETGEIVWDKGRDFATVRKVLSMPQVNIVKKTEVQTGGFSKESILPKRNSDKLIARKKDWDPKKYGGFDSPTVAYSVLVVAKVEKGKSKKLKSVKELLGITIMERSSFEKNPIDFLEAKGYKEVKKDLIIKLPKYSLFELENGRKRMLASAGELQKGNELALPSKYVNFLYLASHYEKLKGSPEDNEQKQLFVEQHKHYLDEIIEQISEFSKRVILADANLDKVLSAYNKHRDKPIREQAENIIHLFTLTNLGAPAAFKYFDTTIDRKRYTSTKEVLDATLIHQSITGLYETRIDLSQLGGDGGGGGGGGGGGGTAPLEEEYRLFLEAPIQNVTLLEQWKREIPKVWAEINPPGLASTQAPIHVQLLSTALPVRVRQYPITLEAKRSLRETIRKFRAAGILRPVHSPWNTPLLPVRKSGTSEYRMVQDLREVNKRVETIHPTVPNPYTLLSLLPPDRIWYSVLDLKDAFFCIPLAPESQLIFAFEWADAEEGESGQLTWTRLPQGFKNSPTLFDEALNRDLQGFRLDHPSVSLLQYVDDLLIAADTQAACLSATRDLLMTLAELGYRVSGKKAQLCQEEVTYLGFKIHKGSRSLSNSRTQAILQIPVPKTKRQVREFLGTIGYCRLWIPGFAELAQPLYAATRGGNDPLVWGEKEEEAFQSLKLALTQPPALALPSLDKPFQLFVEETSGAAKGVLTQALGPWKRPVAYLSKRLDPVAAGWPRCLRAIAAAALLTREASKLTFGQDIEITSSHNLESLLRSPPDKWLTNARITQYQVLLLDPPRVRFKQTAALNPATLLPETDDTLPIHHCLDTLDSLTSTRPDLTDQPLAQAEATLFTDGSSYIRDGKRYAGAAVVTLDSVIWAEPLPIGTSAQKAELIALTKALEWSKDKSVNIYTDSRYAFATLHVHGMIYRERGLLTAGGKAIKNAPEILALLTAVWLPKRVAVMHCKGHQKDDAPTSTGNRRADEVAREVAIRPLSTQATISAGKRTADGSEFEKRTADGSEFESPKKKAKVE

SEQ ID NO: 6275 - protein, 2095 aa, synthetic construct
MPAAKRVKLDGGDKKYSIGLDIGTNSVGWAVITDEYKVPSKKFKVLGNTDRHSIKKNLIGALLFDSGETAEATRLKRTARRRYTRRKNRICYLQEIFSNEMAKVDDSFFHRLEESFLVEEDKKHERHPIFGNIVDEVAYHEKYPTIYHLRKKLVDSTDKADLRLIYLALAHMIKFRGHFLIEGDLNPDNSDVDKLFIQLVQTYNQLFEENPINASGVDAKAILSARLSKSRRLENLIAQLPGEKKNGLFGNLIALSLGLTPNFKSNFDLAEDAKLQLSKDTYDDDLDNLLAQIGDQYADLFLAAKNLSDAILLSDILRVNTEITKAPLSASMIKRYDEHHQDLTLLKALVRQQLPEKYKEIFFDQSKNGYAGYIDGGASQEEFYKFIKPILEKMDGTEELLVKLNREDLLRKQRTFDNGSIPHQIHLGELHAILRRQEDFYPFLKDNREKIEKILTFRIPYYVGPLARGNSRFAWMTRKSEETITPWNFEEVVDKGASAQSFIERMTNFDKNLPNEKVLPKHSLLYEYFTVYNELTKVKYVTEGMRKPAFLSGEQKKAIVDLLFKTNRKVTVKQLKEDYFKKIECFDSVEISGVEDRFNASLGTYHDLLKIIKDKDFLDNEENEDILEDIVLTLTLFEDREMIEERLKTYAHLFDDKVMKQLKRRRYTGWGRLSRKLINGIRDKQSGKTILDFLKSDGFANRNFMQLIHDDSLTFKEDIQKAQVSGQGDSLHEHIANLAGSPAIKKGILQTVKVVDELVKVMGRHKPENIVIEMARENQTTQKGQKNSRERMKRIEEGIKELGSQILKEHPVENTQLQNEKLYLYYLQNGRDMYVDQELDINRLSDYDVDHIVPQSFLKDDSIDNKVLTRSDKARGKSDNVPSEEVVKKMKNYWRQLLNAKLITQRKFDNLTKAERGGLSELDKAGFIKRQLVETRQITKHVAQILDSRMNTKYDENDKLIREVKVITLKSKLVSDFRKDFQFYKVREINNYHHAHDAYLNAVVGTALIKKYPKLESEFVYGDYKVYDVRKMIAKSEQEIGKATAKYFFYSNIMNFFKTEITLANGEIRKRPLIETNGETGEIVWDKGRDFATVRKVLSMPQVNIVKKTEVQTGGFSKESILPKRNSDKLIARKKDWDPKKYGGFDSPTVAYSVLVVAKVEKGKSKKLKSVKELLGITIMERSSFEKNPIDFLEAKGYKEVKKDLIIKLPKYSLFELENGRKRMLASAGELQKGNELALPSKYVNFLYLASHYEKLKGSPEDNEQKQLFVEQHKHYLDEIIEQISEFSKRVILADANLDKVLSAYNKHRDKPIREQAENIIHLFTLTNLGAPAAFKYFDTTIDRKRYTSTKEVLDATLIHQSITGLYETRIDLSQLGGDGGGGGGGGGGGGTAPLEEEYRLFLEAPIQNVTLLEQWKREIPKVWAEINPPGLASTQAPIHVQLLSTALPVRVRQYPITLEAKRSLRETIRKFRAAGILRPVHSPWNTPLLPVRKSGTSEYRMVQDLREVNKRVETIHPTVPNPYTLLSLLPPDRIWYSVLDLKDAFFCIPLAPESQLIFAFEWADAEEGESGQLTWTRLPQGFKNSPTLFNEALNRDLQGFRLDHPSVSLLQYVDDLLIAADTQAACLSATRDLLMTLAELGYRVSGKKAQLCQEEVTYLGFKIHKGSRSLSNSRTQAILQIPVPKTKRQVREFLGKIGYCRLFIPGFAELAQPLYAATRPGNDPLVWGEKEEEAFQSLKLALTQPPALALPSLDKPFQLFVEETSGAAKGVLTQALGPWKRPVAYLSKRLDPVAAGWPRCLRAIAAAALLTREASKLTFGQDIEITSSHNLESLLRSPPDKWLTNARITQYQVLLLDPPRVRFKQTAALNPATLLPETDDTLPIHHCLDTLDSLTSTRPDLTDQPLAQAEATLFTDGSSYIRDGKRYAGAAVVTLDSVIWAEPLPIGTSAQKAELIALTKALEWSKDKSVNIYTDSRYAFATLHVHGMIYRERGWLTAGGKAIKNAPEILALLTAVWLPKRVAVMHCKGHQKDDAPTSTGNRRADEVAREVAIRPLSTQATISAGKRTADGSEFEKRTADGSEFESPKKKAKVE

SEQ ID NO: 6276 - protein, 2099 aa, synthetic construct
MPAAKRVKLDGGDKKYSIGLDIGTNSVGWAVITDEYKVPSKKFKVLGNTDRHSIKKNLIGALLFDSGETAEATRLKRTARRRYTRRKNRICYLQEIFSNEMAKVDDSFFHRLEESFLVEEDKKHERHPIFGNIVDEVAYHEKYPTIYHLRKKLVDSTDKADLRLIYLALAHMIKFRGHFLIEGDLNPDNSDVDKLFIQLVQTYNQLFEENPINASGVDAKAILSARLSKSRRLENLIAQLPGEKKNGLFGNLIALSLGLTPNFKSNFDLAEDAKLQLSKDTYDDDLDNLLAQIGDQYADLFLAAKNLSDAILLSDILRVNTEITKAPLSASMIKRYDEHHQDLTLLKALVRQQLPEKYKEIFFDQSKNGYAGYIDGGASQEEFYKFIKPILEKMDGTEELLVKLNREDLLRKQRTFDNGSIPHQIHLGELHAILRRQEDFYPFLKDNREKIEKILTFRIPYYVGPLARGNSRFAWMTRKSEETITPWNFEEVVDKGASAQSFIERMTNFDKNLPNEKVLPKHSLLYEYFTVYNELTKVKYVTEGMRKPAFLSGEQKKAIVDLLFKTNRKVTVKQLKEDYFKKIECFDSVEISGVEDRFNASLGTYHDLLKIIKDKDFLDNEENEDILEDIVLTLTLFEDREMIEERLKTYAHLFDDKVMKQLKRRRYTGWGRLSRKLINGIRDKQSGKTILDFLKSDGFANRNFMQLIHDDSLTFKEDIQKAQVSGQGDSLHEHIANLAGSPAIKKGILQTVKVVDELVKVMGRHKPENIVIEMARENQTTQKGQKNSRERMKRIEEGIKELGSQILKEHPVENTQLQNEKLYLYYLQNGRDMYVDQELDINRLSDYDVDHIVPQSFLKDDSIDNKVLTRSDKARGKSDNVPSEEVVKKMKNYWRQLLNAKLITQRKFDNLTKAERGGLSELDKAGFIKRQLVETRQITKHVAQILDSRMNTKYDENDKLIREVKVITLKSKLVSDFRKDFQFYKVREINNYHHAHDAYLNAVVGTALIKKYPKLESEFVYGDYKVYDVRKMIAKSEQEIGKATAKYFFYSNIMNFFKTEITLANGEIRKRPLIETNGETGEIVWDKGRDFATVRKVLSMPQVNIVKKTEVQTGGFSKESILPKRNSDKLIARKKDWDPKKYGGFDSPTVAYSVLVVAKVEKGKSKKLKSVKELLGITIMERSSFEKNPIDFLEAKGYKEVKKDLIIKLPKYSLFELENGRKRMLASAGELQKGNELALPSKYVNFLYLASHYEKLKGSPEDNEQKQLFVEQHKHYLDEIIEQISEFSKRVILADANLDKVLSAYNKHRDKPIREQAENIIHLFTLTNLGAPAAFKYFDTTIDRKRYTSTKEVLDATLIHQSITGLYETRIDLSQLGGDGGGGGGGGGGGGTVSLQDEHRLFDIPVTTSLPDVWLQDFPQAWAETGGLGRAKCQAPIIIDLKPTAVPVSIKQYPMSLEAHMGIRQHIIKFLELGVLRPCRSPWNTPLLPVKKPGTQDYRPVQDLREINKRTVDIHPTVPNPYNLLSTLKPDYSWYTVLDLKDAFFCLPLAPQSQELFAFEWKDPERGISGQLTWTRLPQGFKNSPTLFDEALHRDLTDFRTQHPEVTLLQYVDDLLLAAPTKKACTQGTRHLLQELGEKGYRASAKKAQICQTKVTYLGYILSEGKRWLTPGRIETVARIPPPRNPREVREFLGTAGFCRLWIPGFAELAAPLYALTKESTPFTWQTEHQLAFEALKKALLSAPALGLPDTSKPFTLFLDERQGIAKGVLTQKLGPWKRPVAYLSKKLDPVAAGWPPCLRIMAATAMLVKDSAKLTLGQPLTVITPHTLEAIVRQPPDRWITNARLTHYQALLLDTDRVQFGPPVTLNPATLLPVPENQPSPHDCRQVLAETHGTREDLKDQELPDADHTWYTDGSSYLDSGTRRAGAAVVDGHNTIWAQSLPPGTSAQKAELIALTKALELSKGKKANIYTDSRYAFATAHTHGSIYERRGLLTSEGKEIKNKAEIIALLKALFLPQEVAIIHCPGHQKGQDPVAVGNRQADRVARQAAMAEVLTLATEPDNTSHITAGKRTADGSEFEKRTADGSEFESPKKKAKVE

SEQ ID NO: 6277 - protein, 2091 aa, synthetic construct
MPAAKRVKLDGGDKKYSIGLDIGTNSVGWAVITDEYKVPSKKFKVLGNTDRHSIKKNLIGALLFDSGETAEATRLKRTARRRYTRRKNRICYLQEIFSNEMAKVDDSFFHRLEESFLVEEDKKHERHPIFGNIVDEVAYHEKYPTIYHLRKKLVDSTDKADLRLIYLALAHMIKFRGHFLIEGDLNPDNSDVDKLFIQLVQTYNQLFEENPINASGVDAKAILSARLSKSRRLENLIAQLPGEKKNGLFGNLIALSLGLTPNFKSNFDLAEDAKLQLSKDTYDDDLDNLLAQIGDQYADLFLAAKNLSDAILLSDILRVNTEITKAPLSASMIKRYDEHHQDLTLLKALVRQQLPEKYKEIFFDQSKNGYAGYIDGGASQEEFYKFIKPILEKMDGTEELLVKLNREDLLRKQRTFDNGSIPHQIHLGELHAILRRQEDFYPFLKDNREKIEKILTFRIPYYVGPLARGNSRFAWMTRKSEETITPWNFEEVVDKGASAQSFIERMTNFDKNLPNEKVLPKHSLLYEYFTVYNELTKVKYVTEGMRKPAFLSGEQKKAIVDLLFKTNRKVTVKQLKEDYFKKIECFDSVEISGVEDRFNASLGTYHDLLKIIKDKDFLDNEENEDILEDIVLTLTLFEDREMIEERLKTYAHLFDDKVMKQLKRRRYTGWGRLSRKLINGIRDKQSGKTILDFLKSDGFANRNFMQLIHDDSLTFKEDIQKAQVSGQGDSLHEHIANLAGSPAIKKGILQTVKVVDELVKVMGRHKPENIVIEMARENQTTQKGQKNSRERMKRIEEGIKELGSQILKEHPVENTQLQNEKLYLYYLQNGRDMYVDQELDINRLSDYDVDHIVPQSFLKDDSIDNKVLTRSDKARGKSDNVPSEEVVKKMKNYWRQLLNAKLITQRKFDNLTKAERGGLSELDKAGFIKRQLVETRQITKHVAQILDSRMNTKYDENDKLIREVKVITLKSKLVSDFRKDFQFYKVREINNYHHAHDAYLNAVVGTALIKKYPKLESEFVYGDYKVYDVRKMIAKSEQEIGKATAKYFFYSNIMNFFKTEITLANGEIRKRPLIETNGETGEIVWDKGRDFATVRKVLSMPQVNIVKKTEVQTGGFSKESILPKRNSDKLIARKKDWDPKKYGGFDSPTVAYSVLVVAKVEKGKSKKLKSVKELLGITIMERSSFEKNPIDFLEAKGYKEVKKDLIIKLPKYSLFELENGRKRMLASAGELQKGNELALPSKYVNFLYLASHYEKLKGSPEDNEQKQLFVEQHKHYLDEIIEQISEFSKRVILADANLDKVLSAYNKHRDKPIREQAENIIHLFTLTNLGAPAAFKYFDTTIDRKRYTSTKEVLDATLIHQSITGLYETRIDLSQLGGDGGGGGGGGGGGGVLNLEEEYRLHEKPVPSSIDPSWLQLFPTVWAERAGMGLANQVPPVVVELRSGASPVAVRQYPMSKEAREGIRPHIQKFLDLGVLVPCRSPWNTPLLPVKKPGTNDYRPVQDLREINKRVQDIHPTVPNPYNLLSSLPPSYTWYSVLDLKDAFFCLRLHPNSQPLFAFEWKDPEKGNTGQLTWTRLPQGFKNSPTLFNEALHRDLAPFRALNPQVVLLQYVDDLLVAAPTYEDCKKGTQKLLQELSKLGYRVSAKKAQLCQREVTYLGYLLKEGKRWLTPARKATVMKIPVPTTPRQVREFLGTAGFCRLWIPGFASLAAPLYPLTKPSIPFIWTEEHQQAFDHIKKALLSAPALALPDLTKPFTLYIDERAGVARGVLTQTLGPWRRPVAYLSKKLDPVASGWPTCLKAVAAVALLLKDADKLTLGQNVTVIASHSLESIVRQPPDRWMTNARMTHYQSLLLNERVSFAPPAVLNPATLLPVESEATPVHRCSEILAEETGTRRDLEDQPLPGVPTWYTDGSSFITEGKRRAGAPIVDGKRTVWASSLPEGTSAQKAELVALTQALRLAEGKNINIYTDSRYAFATAHIHGAIYKQRGWLTSAGKDIKNKEEILALLEAIHLPRRVAIIHCPGHQRGSNPVATGNRRADEAAKQAALSTRVLAGTTKPAGKRTADGSEFEKRTADGSEFESPKKKAKVE

SEQ ID NO: 6278 - protein, 2124 aa, synthetic construct
MPAAKRVKLDGGDKKYSIGLDIGTNSVGWAVITDEYKVPSKKFKVLGNTDRHSIKKNLIGALLFDSGETAEATRLKRTARRRYTRRKNRICYLQEIFSNEMAKVDDSFFHRLEESFLVEEDKKHERHPIFGNIVDEVAYHEKYPTIYHLRKKLVDSTDKADLRLIYLALAHMIKFRGHFLIEGDLNPDNSDVDKLFIQLVQTYNQLFEENPINASGVDAKAILSARLSKSRRLENLIAQLPGEKKNGLFGNLIALSLGLTPNFKSNFDLAEDAKLQLSKDTYDDDLDNLLAQIGDQYADLFLAAKNLSDAILLSDILRVNTEITKAPLSASMIKRYDEHHQDLTLLKALVRQQLPEKYKEIFFDQSKNGYAGYIDGGASQEEFYKFIKPILEKMDGTEELLVKLNREDLLRKQRTFDNGSIPHQIHLGELHAILRRQEDFYPFLKDNREKIEKILTFRIPYYVGPLARGNSRFAWMTRKSEETITPWNFEEVVDKGASAQSFIERMTNFDKNLPNEKVLPKHSLLYEYFTVYNELTKVKYVTEGMRKPAFLSGEQKKAIVDLLFKTNRKVTVKQLKEDYFKKIECFDSVEISGVEDRFNASLGTYHDLLKIIKDKDFLDNEENEDILEDIVLTLTLFEDREMIEERLKTYAHLFDDKVMKQLKRRRYTGWGRLSRKLINGIRDKQSGKTILDFLKSDGFANRNFMQLIHDDSLTFKEDIQKAQVSGQGDSLHEHIANLAGSPAIKKGILQTVKVVDELVKVMGRHKPENIVIEMARENQTTQKGQKNSRERMKRIEEGIKELGSQILKEHPVENTQLQNEKLYLYYLQNGRDMYVDQELDINRLSDYDVDHIVPQSFLKDDSIDNKVLTRSDKARGKSDNVPSEEVVKKMKNYWRQLLNAKLITQRKFDNLTKAERGGLSELDKAGFIKRQLVETRQITKHVAQILDSRMNTKYDENDKLIREVKVITLKSKLVSDFRKDFQFYKVREINNYHHAHDAYLNAVVGTALIKKYPKLESEFVYGDYKVYDVRKMIAKSEQEIGKATAKYFFYSNIMNFFKTEITLANGEIRKRPLIETNGETGEIVWDKGRDFATVRKVLSMPQVNIVKKTEVQTGGFSKESILPKRNSDKLIARKKDWDPKKYGGFDSPTVAYSVLVVAKVEKGKSKKLKSVKELLGITIMERSSFEKNPIDFLEAKGYKEVKKDLIIKLPKYSLFELENGRKRMLASAGELQKGNELALPSKYVNFLYLASHYEKLKGSPEDNEQKQLFVEQHKHYLDEIIEQISEFSKRVILADANLDKVLSAYNKHRDKPIREQAENIIHLFTLTNLGAPAAFKYFDTTIDRKRYTSTKEVLDATLIHQSITGLYETRIDLSQLGGDGGGGGGGGGGGGLLGRDLLTKLKAQIQFSTEGPQVTWEDRPAMCLVLNLEEEYRLHEKPVPPSIDPSWLQLFPMVWAEKAGMGLANQVPPVVVELKSDASPVAVRQYPMSKEAREGIRPHIQRFLDLGILVPCQSPWNTPLLPVKKPGTNDYRPVQDLREVNKRVQDIHPTVPNPYNLLSSLPPSHTWYSVLDLKDAFFCLKLHPNSQPLFAFEWRDPEKGNTGQLTWTRLPQGFKNSPTLFNEALHRDLASFRALNPQVVMLQYVDDLLVAAPTYRDCKEGTRRLLQELSKLGYRVSAKKAQLCREEVTYLGYLLKGGKRWLTPARKATVMKIPTPTTPRQVREFLGTAGFCRLWIPGFASLAAPLYPLTRPKVPFTWTEAHQEAFGRIKEALLSAPALALPDLTKPFALYVDEKEGVARGVLTQTLGPWRRPVAYLSKKLDPVASGWPTCLKAIAAVALLLKDADKLTLGQNVLVIAPHNLESIVRQPPDRWMTNARMTHYQSLLLNERVSFAPPAILNPATLLPVESDDTPIHICSEILAEETGTRPDLRDQPLPGVPAWYTDGSSFIMDGRRQAGAAIVDNKRTVWASNLPEGTSAQKAELIALTQALRLAEGKSINIYTDSRYAFATAHVHGAIYKQRGWLTSAGKDIKNKEEILALLEAIHLPKRVAIIHCPGHQRGTDPVATGNRKADEAAKQAAQSTRILTETTKNAGKRTADGSEFEKRTADGSEFESPKKKAKVE

SEQ ID NO: 6279 - protein, 2124 aa, synthetic construct
MPAAKRVKLDGGDKKYSIGLDIGTNSVGWAVITDEYKVPSKKFKVLGNTDRHSIKKNLIGALLFDSGETAEATRLKRTARRRYTRRKNRICYLQEIFSNEMAKVDDSFFHRLEESFLVEEDKKHERHPIFGNIVDEVAYHEKYPTIYHLRKKLVDSTDKADLRLIYLALAHMIKFRGHFLIEGDLNPDNSDVDKLFIQLVQTYNQLFEENPINASGVDAKAILSARLSKSRRLENLIAQLPGEKKNGLFGNLIALSLGLTPNFKSNFDLAEDAKLQLSKDTYDDDLDNLLAQIGDQYADLFLAAKNLSDAILLSDILRVNTEITKAPLSASMIKRYDEHHQDLTLLKALVRQQLPEKYKEIFFDQSKNGYAGYIDGGASQEEFYKFIKPILEKMDGTEELLVKLNREDLLRKQRTFDNGSIPHQIHLGELHAILRRQEDFYPFLKDNREKIEKILTFRIPYYVGPLARGNSRFAWMTRKSEETITPWNFEEVVDKGASAQSFIERMTNFDKNLPNEKVLPKHSLLYEYFTVYNELTKVKYVTEGMRKPAFLSGEQKKAIVDLLFKTNRKVTVKQLKEDYFKKIECFDSVEISGVEDRFNASLGTYHDLLKIIKDKDFLDNEENEDILEDIVLTLTLFEDREMIEERLKTYAHLFDDKVMKQLKRRRYTGWGRLSRKLINGIRDKQSGKTILDFLKSDGFANRNFMQLIHDDSLTFKEDIQKAQVSGQGDSLHEHIANLAGSPAIKKGILQTVKVVDELVKVMGRHKPENIVIEMARENQTTQKGQKNSRERMKRIEEGIKELGSQILKEHPVENTQLQNEKLYLYYLQNGRDMYVDQELDINRLSDYDVDHIVPQSFLKDDSIDNKVLTRSDKARGKSDNVPSEEVVKKMKNYWRQLLNAKLITQRKFDNLTKAERGGLSELDKAGFIKRQLVETRQITKHVAQILDSRMNTKYDENDKLIREVKVITLKSKLVSDFRKDFQFYKVREINNYHHAHDAYLNAVVGTALIKKYPKLESEFVYGDYKVYDVRKMIAKSEQEIGKATAKYFFYSNIMNFFKTEITLANGEIRKRPLIETNGETGEIVWDKGRDFATVRKVLSMPQVNIVKKTEVQTGGFSKESILPKRNSDKLIARKKDWDPKKYGGFDSPTVAYSVLVVAKVEKGKSKKLKSVKELLGITIMERSSFEKNPIDFLEAKGYKEVKKDLIIKLPKYSLFELENGRKRMLASAGELQKGNELALPSKYVNFLYLASHYEKLKGSPEDNEQKQLFVEQHKHYLDEIIEQISEFSKRVILADANLDKVLSAYNKHRDKPIREQAENIIHLFTLTNLGAPAAFKYFDTTIDRKRYTSTKEVLDATLIHQSITGLYETRIDLSQLGGDGGGGGGGGGGGGLLGRDLLTKLKAQIQFSTEGPQVTWEDRPAMCLVLNLEEEYRLHEKPVPPSIDPSWLQLFPMVWAEKAGMGLANQVPPVVVELKSDASPVAVRQYPMSKEAREGIRPHIQRFLDLGILVPCQSPWNTPLLPVKKPGTNDYRPVQDLREVNKRVQDIHPTVPNPYNLLSSLPPSHTWYSVLDLKDAFFCLKLHPNSQPLFAFEWRDPEKGNTGQLTWTRLPQGFKNSPTLFNEALHRDLASFRALNPQVVMLQYVDDLLVAAPTYRDCKEGTRRLLQELSKLGYRVSAKKAQLCREEVTYLGYLLKGGKRWLTPARKATVMKIPTPTTPRQVREFLGKAGFCRLFIPGFASLAAPLYPLTRPKVPFTWTEAHQEAFGRIKEALLSAPALALPDLTKPFALYVDEKEGVARGVLTQTLGPWRRPVAYLSKKLDPVASGWPTCLKAIAAVALLLKDADKLTLGQNVLVIAPHNLESIVRQPPDRWMTNARMTHYQSLLLNERVSFAPPAILNPATLLPVESDDTPIHICSEILAEETGTRPDLRDQPLPGVPAWYTDGSSFIMDGRRQAGAAIVDNKRTVWASNLPEGTSAQKAELIALTQALRLAEGKSINIYTDSRYAFATAHVHGAIYKQRGWLTSAGKDIKNKEEILALLEAIHLPKRVAIIHCPGHQRGTDPVATGNRKADEAAKQAAQSTRILTETTKNAGKRTADGSEFEKRTADGSEFESPKKKAKVE

SEQ ID NO: 6280 - protein, 2093 aa, synthetic construct
MPAAKRVKLDGGDKKYSIGLDIGTNSVGWAVITDEYKVPSKKFKVLGNTDRHSIKKNLIGALLFDSGETAEATRLKRTARRRYTRRKNRICYLQEIFSNEMAKVDDSFFHRLEESFLVEEDKKHERHPIFGNIVDEVAYHEKYPTIYHLRKKLVDSTDKADLRLIYLALAHMIKFRGHFLIEGDLNPDNSDVDKLFIQLVQTYNQLFEENPINASGVDAKAILSARLSKSRRLENLIAQLPGEKKNGLFGNLIALSLGLTPNFKSNFDLAEDAKLQLSKDTYDDDLDNLLAQIGDQYADLFLAAKNLSDAILLSDILRVNTEITKAPLSASMIKRYDEHHQDLTLLKALVRQQLPEKYKEIFFDQSKNGYAGYIDGGASQEEFYKFIKPILEKMDGTEELLVKLNREDLLRKQRTFDNGSIPHQIHLGELHAILRRQEDFYPFLKDNREKIEKILTFRIPYYVGPLARGNSRFAWMTRKSEETITPWNFEEVVDKGASAQSFIERMTNFDKNLPNEKVLPKHSLLYEYFTVYNELTKVKYVTEGMRKPAFLSGEQKKAIVDLLFKTNRKVTVKQLKEDYFKKIECFDSVEISGVEDRFNASLGTYHDLLKIIKDKDFLDNEENEDILEDIVLTLTLFEDREMIEERLKTYAHLFDDKVMKQLKRRRYTGWGRLSRKLINGIRDKQSGKTILDFLKSDGFANRNFMQLIHDDSLTFKEDIQKAQVSGQGDSLHEHIANLAGSPAIKKGILQTVKVVDELVKVMGRHKPENIVIEMARENQTTQKGQKNSRERMKRIEEGIKELGSQILKEHPVENTQLQNEKLYLYYLQNGRDMYVDQELDINRLSDYDVDHIVPQSFLKDDSIDNKVLTRSDKARGKSDNVPSEEVVKKMKNYWRQLLNAKLITQRKFDNLTKAERGGLSELDKAGFIKRQLVETRQITKHVAQILDSRMNTKYDENDKLIREVKVITLKSKLVSDFRKDFQFYKVREINNYHHAHDAYLNAVVGTALIKKYPKLESEFVYGDYKVYDVRKMIAKSEQEIGKATAKYFFYSNIMNFFKTEITLANGEIRKRPLIETNGETGEIVWDKGRDFATVRKVLSMPQVNIVKKTEVQTGGFSKESILPKRNSDKLIARKKDWDPKKYGGFDSPTVAYSVLVVAKVEKGKSKKLKSVKELLGITIMERSSFEKNPIDFLEAKGYKEVKKDLIIKLPKYSLFELENGRKRMLASAGELQKGNELALPSKYVNFLYLASHYEKLKGSPEDNEQKQLFVEQHKHYLDEIIEQISEFSKRVILADANLDKVLSAYNKHRDKPIREQAENIIHLFTLTNLGAPAAFKYFDTTIDRKRYTSTKEVLDATLIHQSITGLYETRIDLSQLGGDGGGGGGGGGGGGTLNLEDEYRLYETSAEPEVSPGSTWLSDFPQAWAETGGMGLAVRQAPLIIPLKATSTPVSIKQYPMSQEAKLGIKPHIQRLLDQGILVPCQSPWNTPLLPVKKPGTNDYRPVQDLREVNKRVEDIHPTVPNPYNLLSGLPPSHRWYTVLDLKDAFFCLRLHPTSQPLFAFEWRDPGMGISGQLTWTRLPQGFKNSPTLFNEALHRDLADFRIQHPDLILLQYVDDILLAATSELDCQQGTRALLLTLGNLGYRASAKKAQLCQKQVKYLGYLLKEGQRWLTEARKETVMGQPTPKTPRQLREFLGKAGFCRLFIPGFAEMAAPLYPLTKPGTLFNWGPDQQKAYQEIKQALLTAPALGLPDLTKPFELFVDEKQGYAKGVLTQKLGPWRRPVAYLSKKLDPVAAGWPPCLRMVAAIAVLRKDAGKLTMGQPLVILAPHAVEALVKQPPDRWLSNARMTHYQAMLLDTDRVQFGPVVALNPATLLPLPEEGAPHDCLEILAETHGTRPDLTDQPIPDADHTWYTDGSSFLQEGQRKAGAAVTTETEVIWARALPAGTSAQRAELIALTQALKMAEGKRLNVYTDSRYAFATAHIHGEIYRRRGWLTSEGREIKNKSEILALLKALFLPKRLSIIHCLGHQKGDSAEARGNRLADQAAREAAIKTPPDTSTLLAGKRTADGSEFEKRTADGSEFESPKKKAKVE

SEQ ID NO: 6281 - protein, 2093 aa, synthetic construct
MPAAKRVKLDGGDKKYSIGLDIGTNSVGWAVITDEYKVPSKKFKVLGNTDRHSIKKNLIGALLFDSGETAEATRLKRTARRRYTRRKNRICYLQEIFSNEMAKVDDSFFHRLEESFLVEEDKKHERHPIFGNIVDEVAYHEKYPTIYHLRKKLVDSTDKADLRLIYLALAHMIKFRGHFLIEGDLNPDNSDVDKLFIQLVQTYNQLFEENPINASGVDAKAILSARLSKSRRLENLIAQLPGEKKNGLFGNLIALSLGLTPNFKSNFDLAEDAKLQLSKDTYDDDLDNLLAQIGDQYADLFLAAKNLSDAILLSDILRVNTEITKAPLSASMIKRYDEHHQDLTLLKALVRQQLPEKYKEIFFDQSKNGYAGYIDGGASQEEFYKFIKPILEKMDGTEELLVKLNREDLLRKQRTFDNGSIPHQIHLGELHAILRRQEDFYPFLKDNREKIEKILTFRIPYYVGPLARGNSRFAWMTRKSEETITPWNFEEVVDKGASAQSFIERMTNFDKNLPNEKVLPKHSLLYEYFTVYNELTKVKYVTEGMRKPAFLSGEQKKAIVDLLFKTNRKVTVKQLKEDYFKKIECFDSVEISGVEDRFNASLGTYHDLLKIIKDKDFLDNEENEDILEDIVLTLTLFEDREMIEERLKTYAHLFDDKVMKQLKRRRYTGWGRLSRKLINGIRDKQSGKTILDFLKSDGFANRNFMQLIHDDSLTFKEDIQKAQVSGQGDSLHEHIANLAGSPAIKKGILQTVKVVDELVKVMGRHKPENIVIEMARENQTTQKGQKNSRERMKRIEEGIKELGSQILKEHPVENTQLQNEKLYLYYLQNGRDMYVDQELDINRLSDYDVDHIVPQSFLKDDSIDNKVLTRSDKARGKSDNVPSEEVVKKMKNYWRQLLNAKLITQRKFDNLTKAERGGLSELDKAGFIKRQLVETRQITKHVAQILDSRMNTKYDENDKLIREVKVITLKSKLVSDFRKDFQFYKVREINNYHHAHDAYLNAVVGTALIKKYPKLESEFVYGDYKVYDVRKMIAKSEQEIGKATAKYFFYSNIMNFFKTEITLANGEIRKRPLIETNGETGEIVWDKGRDFATVRKVLSMPQVNIVKKTEVQTGGFSKESILPKRNSDKLIARKKDWDPKKYGGFDSPTVAYSVLVVAKVEKGKSKKLKSVKELLGITIMERSSFEKNPIDFLEAKGYKEVKKDLIIKLPKYSLFELENGRKRMLASAGELQKGNELALPSKYVNFLYLASHYEKLKGSPEDNEQKQLFVEQHKHYLDEIIEQISEFSKRVILADANLDKVLSAYNKHRDKPIREQAENIIHLFTLTNLGAPAAFKYFDTTIDRKRYTSTKEVLDATLIHQSITGLYETRIDLSQLGGDGGGGGGGGGGGGLGIEDEYRLHETSTEPDVSLGSTWLSDFPQAWAETGGMGLAVRQAPLIIPLKATSTPVSIQQYPMSHEARLGIKPHIQRLLDQGILVPCQSPWNTPLLPVKKPGTNDYRPVQDLREVNKRVEDIHPTVPNPYNLLSGLPPSHQWYTVLDLKDAFFCLRLHPTSQPLFAFEWRDPGMGISGQLTWTRLPQGFKNSPTLFNEALHRDLADFRIQHPDLILLQYVDDILLAATSELDCQQGTRALLQTLGDLGYRASAKKAQICQKQVKYLGYLLREGQRWLTEARKETVMGQPVPKTPRQLREFLGKAGFCRLFIPGFAEMAAPLYPLTKPGTLFSWGPDQQKAYQEIKQALLTAPALGLPDLTKPFELFVDEKQGYAKGVLTQKLGPWRRPVAYLSKKLDPVAAGWPPCLRMVAAIAVLTKDAGKLTMGQPLVILAPHAVEALVKQPPDRWLSNARMTHYQAMLLDTDRVQFGPVVALNPATLLPLPEEGAPHDCLEILAETHGTRPDLTDQPIPDADHTWYTDGSSFLQEGQRKAGAAVTTETEVIWAGALPAGTSAQRAELIALTQALKMAEGKRLNVYTDSRYAFATAHIHGEIYRRRGWLTSEGREIKNKSEILALLKALFLPKRLSIIHCLGHQKGDSAEARGNRLADQAAREAAIKTPPDTSTLLIAGKRTADGSEFEKRTADGSEFESPKKKAKVE

SEQ ID NO: 6282 - protein, 2093 aa, synthetic construct; identical to SEQ ID NO: 6281

SEQ ID NO: 6283 - protein, 2093 aa, synthetic construct
MPAAKRVKLDGGDKKYSIGLDIGTNSVGWAVITDEYKVPSKKFKVLGNTDRHSIKKNLIGALLFDSGETAEATRLKRTARRRYTRRKNRICYLQEIFSNEMAKVDDSFFHRLEESFLVEEDKKHERHPIFGNIVDEVAYHEKYPTIYHLRKKLVDSTDKADLRLIYLALAHMIKFRGHFLIEGDLNPDNSDVDKLFIQLVQTYNQLFEENPINASGVDAKAILSARLSKSRRLENLIAQLPGEKKNGLFGNLIALSLGLTPNFKSNFDLAEDAKLQLSKDTYDDDLDNLLAQIGDQYADLFLAAKNLSDAILLSDILRVNTEITKAPLSASMIKRYDEHHQDLTLLKALVRQQLPEKYKEIFFDQSKNGYAGYIDGGASQEEFYKFIKPILEKMDGTEELLVKLNREDLLRKQRTFDNGSIPHQIHLGELHAILRRQEDFYPFLKDNREKIEKILTFRIPYYVGPLARGNSRFAWMTRKSEETITPWNFEEVVDKGASAQSFIERMTNFDKNLPNEKVLPKHSLLYEYFTVYNELTKVKYVTEGMRKPAFLSGEQKKAIVDLLFKTNRKVTVKQLKEDYFKKIECFDSVEISGVEDRFNASLGTYHDLLKIIKDKDFLDNEENEDILEDIVLTLTLFEDREMIEERLKTYAHLFDDKVMKQLKRRRYTGWGRLSRKLINGIRDKQSGKTILDFLKSDGFANRNFMQLIHDDSLTFKEDIQKAQVSGQGDSLHEHIANLAGSPAIKKGILQTVKVVDELVKVMGRHKPENIVIEMARENQTTQKGQKNSRERMKRIEEGIKELGSQILKEHPVENTQLQNEKLYLYYLQNGRDMYVDQELDINRLSDYDVDHIVPQSFLKDDSIDNKVLTRSDKARGKSDNVPSEEVVKKMKNYWRQLLNAKLITQRKFDNLTKAERGGLSELDKAGFIKRQLVETRQITKHVAQILDSRMNTKYDENDKLIREVKVITLKSKLVSDFRKDFQFYKVREINNYHHAHDAYLNAVVGTALIKKYPKLESEFVYGDYKVYDVRKMIAKSEQEIGKATAKYFFYSNIMNFFKTEITLANGEIRKRPLIETNGETGEIVWDKGRDFATVRKVLSMPQVNIVKKTEVQTGGFSKESILPKRNSDKLIARKKDWDPKKYGGFDSPTVAYSVLVVAKVEKGKSKKLKSVKELLGITIMERSSFEKNPIDFLEAKGYKEVKKDLIIKLPKYSLFELENGRKRMLASAGELQKGNELALPSKYVNFLYLASHYEKLKGSPEDNEQKQLFVEQHKHYLDEIIEQISEFSKRVILADANLDKVLSAYNKHRDKPIREQAENIIHLFTLTNLGAPAAFKYFDTTIDRKRYTSTKEVLDATLIHQSITGLYETRIDLSQLGGDGGGGGGGGGGGGTLNIEDEYRLHETSKEPDVSLGSTWLSDFPQAWAETGGMGLAVRQAPLIIPLKATSTPVSIKQYPMSQEARLGIKPHIQRLLDQGILVPCQSPWNTPLLPVKKPGTNDYRPVQDLREVNKRVEDIHPTVPNPYNLLSGLPPSHQWYTVLDLKDAFFCLRLHPTSQPLFAFEWRDPEMGISGQLTWTRLPQGFKNSPTLFNEALHRDLAGFRIQHPDLILLQYVDDLLLAATSELDCQQGTRALLQTLGDLGYRASAKKAQICQKQVKYLGYLLKEGQRWLTEARKETVMGQPIPKTPRQLREFLGTAGFCRLWIPGFAEMAAPLYPLTKPGTLFNWGPDQQKAFQEIKQALLTAPALGLPDLTKPFELFVDEKQGYAKGVLTQKLGPWRRPVAYLSKKLDPVAAGWPPCLRMVAAIAVLTKDAGKLTMGQPLVILAPHAVEALVKQPPDRWLSNARMTHYQALLLDTDRVQFGPVVALNPATLLPLPEEGLQHDCLDILAEAHGTRSDLMDQPLPDADHTWYTDGSSFLQEGQRKAGAAVTTETEVIWARALPAGTSAQRAELIALTQALKMAEGKKLNVYTDSRYAFATAHIHGEIYRRRGWLTSEGKEIKNKDEILALLKALFLPKRLSIIHCPGHQKGNSAEARGNRMADQAAREVATRETPETSTLLAGKRTADGSEFEKRTADGSEFESPKKKAKVE

SEQ ID NO: 6284 - protein, 2093 aa, synthetic construct
MPAAKRVKLDGGDKKYSIGLDIGTNSVGWAVITDEYKVPSKKFKVLGNTDRHSIKKNLIGALLFDSGETAEATRLKRTARRRYTRRKNRICYLQEIFSNEMAKVDDSFFHRLEESFLVEEDKKHERHPIFGNIVDEVAYHEKYPTIYHLRKKLVDSTDKADLRLIYLALAHMIKFRGHFLIEGDLNPDNSDVDKLFIQLVQTYNQLFEENPINASGVDAKAILSARLSKSRRLENLIAQLPGEKKNGLFGNLIALSLGLTPNFKSNFDLAEDAKLQLSKDTYDDDLDNLLAQIGDQYADLFLAAKNLSDAILLSDILRVNTEITKAPLSASMIKRYDEHHQDLTLLKALVRQQLPEKYKEIFFDQSKNGYAGYIDGGASQEEFYKFIKPILEKMDGTEELLVKLNREDLLRKQRTFDNGSIPHQIHLGELHAILRRQEDFYPFLKDNREKIEKILTFRIPYYVGPLARGNSRFAWMTRKSEETITPWNFEEVVDKGASAQSFIERMTNFDKNLPNEKVLPKHSLLYEYFTVYNELTKVKYVTEGMRKPAFLSGEQKKAIVDLLFKTNRKVTVKQLKEDYFKKIECFDSVEISGVEDRFNASLGTYHDLLKIIKDKDFLDNEENEDILEDIVLTLTLFEDREMIEERLKTYAHLFDDKVMKQLKRRRYTGWGRLSRKLINGIRDKQSGKTILDFLKSDGFANRNFMQLIHDDSLTFKEDIQKAQVSGQGDSLHEHIANLAGSPAIKKGILQTVKVVDELVKVMGRHKPENIVIEMARENQTTQKGQKNSRERMKRIEEGIKELGSQILKEHPVENTQLQNEKLYLYYLQNGRDMYVDQELDINRLSDYDVDHIVPQSFLKDDSIDNKVLTRSDKARGKSDNVPSEEVVKKMKNYWRQLLNAKLITQRKFDNLTKAERGGLSELDKAGFIKRQLVETRQITKHVAQILDSRMNTKYDENDKLIREVKVITLKSKLVSDFRKDFQFYKVREINNYHHAHDAYLNAVVGTALIKKYPKLESEFVYGDYKVYDVRKMIAKSEQEIGKATAKYFFYSNIMNFFKTEITLANGEIRKRPLIETNGETGEIVWDKGRDFATVRKVLSMPQVNIVKKTEVQTGGFSKESILPKRNSDKLIARKKDWDPKKYGGFDSPTVAYSVLVVAKVEKGKSKKLKSVKELLGITIMERSSFEKNPIDFLEAKGYKEVKKDLIIKLPKYSLFELENGRKRMLASAGELQKGNELALPSKYVNFLYLASHYEKLKGSPEDNEQKQLFVEQHKHYLDEIIEQISEFSKRVILADANLDKVLSAYNKHRDKPIREQAENIIHLFTLTNLGAPAAFKYFDTTIDRKRYTSTKEVLDATLIHQSITGLYETRIDLSQLGGDGGGGGGGGGGGGTLNIEDEHRLHETSKEPDVSLGSTWLSDFPQAWAETGGMGLAVRQAPLIIPLKATSTPVSIKQYPMSQEARLGIKPHIQRLLDQGILVPCQSPWNTPLLPVKKPGTNDYRPVQDLREVNKRVEDIHPTVPNPYNLLSGLPPSHQWYTVLDLKDAFFCLRLHPTSQPLFAFEWRDPEMGISGQLTWTRLPQGFKNSPTLFNEALHRDLADFRIQHPDLILLQYVDDLLLAATSELDCQQGTRALLQTLGNLGYRASAKKAQICQKQVKYLGYLLKEGQRWLTEARKETVMGQPTPKTPRQLREFLGKAGFCRLFIPGFAEMAAPLYPLTKPGTLFNWGPDQQKAYQEIKQALLTAPALGLPDLTKPFELFVDEKQGYAKGVLTQKLGPWRRPVAYLSKKLDPVAAGWPPCLRMVAAIAVLTKDAGKLTMGQPLVILAPHAVEALVKQPPDRWLSNARMTHYQALLLDTDRVQFGPVVALNPATLLPLPEEGLQHNCLDILAEAHGTRPDLTDQPLPDADHTWYTDGSSLLQEGQRKAGAAVTTETEVIWAKALPAGTSAQRAELIALTQALKMAEGKKLNVYTDSRYAFATAHIHGEIYRRRGWLTSEGKEIKNKDEILALLKALFLPKRLSIIHCPGHQKGHSAEARGNRMADQAARKAAITETPDTSTLLAGKRTADGSEFEKRTADGSEFESPKKKAKVE

SEQ ID NO: 6285 - protein, 2093 aa, synthetic construct; identical to SEQ ID NO: 6284

SEQ ID NO: 6286 - protein, 2091 aa, synthetic construct
MPAAKRVKLDGGDKKYSIGLDIGTNSVGWAVITDEYKVPSKKFKVLGNTDRHSIKKNLIGALLFDSGETAEATRLKRTARRRYTRRKNRICYLQEIFSNEMAKVDDSFFHRLEESFLVEEDKKHERHPIFGNIVDEVAYHEKYPTIYHLRKKLVDSTDKADLRLIYLALAHMIKFRGHFLIEGDLNPDNSDVDKLFIQLVQTYNQLFEENPINASGVDAKAILSARLSKSRRLENLIAQLPGEKKNGLFGNLIALSLGLTPNFKSNFDLAEDAKLQLSKDTYDDDLDNLLAQIGDQYADLFLAAKNLSDAILLSDILRVNTEITKAPLSASMIKRYDEHHQDLTLLKALVRQQLPEKYKEIFFDQSKNGYAGYIDGGASQEEFYKFIKPILEKMDGTEELLVKLNREDLLRKQRTFDNGSIPHQIHLGELHAILRRQEDFYPFLKDNREKIEKILTFRIPYYVGPLARGNSRFAWMTRKSEETITPWNFEEVVDKGASAQSFIERMTNFDKNLPNEKVLPKHSLLYEYFTVYNELTKVKYVTEGMRKPAFLSGEQKKAIVDLLFKTNRKVTVKQLKEDYFKKIECFDSVEISGVEDRFNASLGTYHDLLKIIKDKDFLDNEENEDILEDIVLTLTLFEDREMIEERLKTYAHLFDDKVMKQLKRRRYTGWGRLSRKLINGIRDKQSGKTILDFLKSDGFANRNFMQLIHDDSLTFKEDIQKAQVSGQGDSLHEHIANLAGSPAIKKGILQTVKVVDELVKVMGRHKPENIVIEMARENQTTQKGQKNSRERMKRIEEGIKELGSQILKEHPVENTQLQNEKLYLYYLQNGRDMYVDQELDINRLSDYDVDHIVPQSFLKDDSIDNKVLTRSDKARGKSDNVPSEEVVKKMKNYWRQLLNAKLITQRKFDNLTKAERGGLSELDKAGFIKRQLVETRQITKHVAQILDSRMNTKYDENDKLIREVKVITLKSKLVSDFRKDFQFYKVREINNYHHAHDAYLNAVVGTALIKKYPKLESEFVYGDYKVYDVRKMIAKSEQEIGKATAKYFFYSNIMNFFKTEITLANGEIRKRPLIETNGETGEIVWDKGRDFATVRKVLSMPQVNIVKKTEVQTGGFSKESILPKRNSDKLIARKKDWDPKKYGGFDSPTVAYSVLVVAKVEKGKSKKLKSVKELLGITIMERSSFEKNPIDFLEAKGYKEVKKDLIIKLPKYSLFELENGRKRMLASAGELQKGNELALPSKYVNFLYLASHYEKLKGSPEDNEQKQLFVEQHKHYLDEIIEQISEFSKRVILADANLDKVLSAYNKHRDKPIREQAENIIHLFTLTNLGAPAAFKYFDTTIDRKRYTSTKEVLDATLIHQSITGLYETRIDLSQLGGDGGGGGGGGGGGGVLNLEEEYRLHEKPVPSSIDPSWLQLFPTVWAERAGMGLANQVPPVVVELRSGASPVAVRQYPMSKEAREGIRPHIQRFLDLGVLVPCQSPWNTPLLPVKKPGTNDYRPVQDLREINKRVQDIHPTVPNPYNLLSSLPPSHTWYSVLDLKDAFFCLKLHPNSQPLFAFEWRDPEKGNTGQLTWTRLPQGFKNSPTLFNEALHRDLAPFRALNPQVVLLQYVDDLLVAAPTYRDCKEGTQKLLQELSKLGYRVSAKKAQLCQKEVTYLGYLLKEGKRWLTPARKATVMKIPPPTTPRQVREFLGKAGFCRLFIPGFASLAAPLYPLTKPSIPFIWTEEHQKAFDRIKEALLSAPALALPDLTKPFTLYVDERAGVARGVLTQTLGPWRRPVAYLSKKLDPVASGWPTCLKAVAAVALLLKDADKLTLGQNVTVIASHSLESIVRQPPDRWMTNARMTHYQSLLLNERVSFAPPAVLNPATLLPVESEATPVHRCSEILAEETGTRRDLKDQPLPGVPAWYTDGSSFIAEGKRRAGAAIVDGKRTVWASSLPEGTSAQKAELVALTQALRLAEGKDINIYTDSRYAFATAHIHGAIYKQRGWLTSAGKDIKNKEEILALLEAIHLPKRVAIIHCPGHQKGNDPVATGNRRADEAAKQAALSTRVLAETTKPAGKRTADGSEFEKRTADGSEFESPKKKAKVE

SEQ ID NO: 6287 - protein, 2093 aa, synthetic construct
MPAAKRVKLDGGDKKYSIGLDIGTNSVGWAVITDEYKVPSKKFKVLGNTDRHSIKKNLIGALLFDSGETAEATRLKRTARRRYTRRKNRICYLQEIFSNEMAKVDDSFFHRLEESFLVEEDKKHERHPIFGNIVDEVAYHEKYPTIYHLRKKLVDSTDKADLRLIYLALAHMIKFRGHFLIEGDLNPDNSDVDKLFIQLVQTYNQLFEENPINASGVDAKAILSARLSKSRRLENLIAQLPGEKKNGLFGNLIALSLGLTPNFKSNFDLAEDAKLQLSKDTYDDDLDNLLAQIGDQYADLFLAAKNLSDAILLSDILRVNTEITKAPLSASMIKRYDEHHQDLTLLKALVRQQLPEKYKEIFFDQSKNGYAGYIDGGASQEEFYKFIKPILEKMDGTEELLVKLNREDLLRKQRTFDNGSIPHQIHLGELHAILRRQEDFYPFLKDNREKIEKILTFRIPYYVGPLARGNSRFAWMTRKSEETITPWNFEEVVDKGASAQSFIERMTNFDKNLPNEKVLPKHSLLYEYFTVYNELTKVKYVTEGMRKPAFLSGEQKKAIVDLLFKTNRKVTVKQLKEDYFKKIECFDSVEISGVEDRFNASLGTYHDLLKIIKDKDFLDNEENEDILEDIVLTLTLFEDREMIEERLKTYAHLFDDKVMKQLKRRRYTGWGRLSRKLINGIRDKQSGKTILDFLKSDGFANRNFMQLIHDDSLTFKEDIQKAQVSGQGDSLHEHIANLAGSPAIKKGILQTVKVVDELVKVMGRHKPENIVIEMARENQTTQKGQKNSRERMKRIEEGIKELGSQILKEHPVENTQLQNEKLYLYYLQNGRDMYVDQELDINRLSDYDVDHIVPQSFLKDDSIDNKVLTRSDKARGKSDNVPSEEVVKKMKNYWRQLLNAKLITQRKFDNLTKAERGGLSELDKAGFIKRQLVETRQITKHVAQILDSRMNTKYDENDKLIREVKVITLKSKLVSDFRKDFQFYKVREINNYHHAHDAYLNAVVGTALIKKYPKLESEFVYGDYKVYDVRKMIAKSEQEIGKATAKYFFYSNIMNFFKTEITLANGEIRKRPLIETNGETGEIVWDKGRDFATVRKVLSMPQVNIVKKTEVQTGGFSKESILPKRNSDKLIARKKDWDPKKYGGFDSPTVAYSVLVVAKVEKGKSKKLKSVKELLGITIMERSSFEKNPIDFLEAKGYKEVKKDLIIKLPKYSLFELENGRKRMLASAGELQKGNELALPSKYVNFLYLASHYEKLKGSPEDNEQKQLFVEQHKHYLDEIIEQISEFSKRVILADANLDKVLSAYNKHRDKPIREQAENIIHLFTLTNLGAPAAFKYFDTTIDRKRYTSTKEVLDATLIHQSITGLYETRIDLSQLGGDGGGGGGGGGGGGTLNIEDEYRLHETSKEPDVPLGSTWLSDFPQAWAETGGMGLAVRQAPLIIPLKATSTPVSIKQYPMSQEARLGIKPHIQRLLDQGILVPCQSPWNTPLLPVKKPGTNDYRPVQDLREVNKRVEDIHPTVPNPYNLLSGLPPSHQWYTVLDLKDAFFCLRLHPTSQPLFAFEWRDPEMGISGQLTWTRLPQGFKNSPTLFNEALHRDLADFRIQHPDLILLQYVDDLLLAATSEQDCQRGTRALLQTLGNLGYRASAKKAQICQKQVKYLGYLLKEGQRWLTEARKETVMGQPTPKTPRQLREFLGTAGFCRLWIPGFAEMAAPLYPLTKPGTLFNWGPDQQKAYQEIKQALLTAPALGLPDLTKPFELFVDEKQGYAKGVLTQKLGPWRRPVAYLSKKLDPVAAGWPPCLRMVAAIAVLTKDAGKLTMGQPLVILAPHAVEALVKQPPDRWLSNARMTHYQAMLLDTDRVQFGPVVALNPATLLPLPEKEAPHDCLEILAETHGTRPDLTDQPIPDADYTWYTDGSSFLQEGQRRAGAAVTTETEVIWARALPAGTSAQRAELIALTQALKMAEGKKLNVYTDSRYAFATAHVHGEIYRRRGWLTSEGREIKNKNEILALLKALFLPKRLSIIHCPGHQKGNSAEARGNRMADQAAREAAMKAVLETSTLLAGKRTADGSEFEKRTADGSEFESPKKKAKVE

SEQ ID NO: 6288 - protein, 2093 aa, synthetic construct
MPAAKRVKLDGGDKKYSIGLDIGTNSVGWAVITDEYKVPSKKFKVLGNTDRHSIKKNLIGALLFDSGETAEATRLKRTARRRYTRRKNRICYLQEIFSNEMAKVDDSFFHRLEESFLVEEDKKHERHPIFGNIVDEVAYHEKYPTIYHLRKKLVDSTDKADLRLIYLALAHMIKFRGHFLIEGDLNPDNSDVDKLFIQLVQTYNQLFEENPINASGVDAKAILSARLSKSRRLENLIAQLPGEKKNGLFGNLIALSLGLTPNFKSNFDLAEDAKLQLSKDTYDDDLDNLLAQIGDQYADLFLAAKNLSDAILLSDILRVNTEITKAPLSASMIKRYDEHHQDLTLLKALVRQQLPEKYKEIFFDQSKNGYAGYIDGGASQEEFYKFIKPILEKMDGTEELLVKLNREDLLRKQRTFDNGSIPHQIHLGELHAILRRQEDFYPFLKDNREKIEKILTFRIPYYVGPLARGNSRFAWMTRKSEETITPWNFEEVVDKGASAQSFIERMTNFDKNLPNEKVLPKHSLLYEYFTVYNELTKVKYVTEGMRKPAFLSGEQKKAIVDLLFKTNRKVTVKQLKEDYFKKIECFDSVEISGVEDRFNASLGTYHDLLKIIKDKDFLDNEENEDILEDIVLTLTLFEDREMIEERLKTYAHLFDDKVMKQLKRRRYTGWGRLSRKLINGIRDKQSGKTILDFLKSDGFANRNFMQLIHDDSLTFKEDIQKAQVSGQGDSLHEHIANLAGSPAIKKGILQTVKVVDELVKVMGRHKPENIVIEMARENQTTQKGQKNSRERMKRIEEGIKELGSQILKEHPVENTQLQNEKLYLYYLQNGRDMYVDQELDINRLSDYDVDHIVPQSFLKDDSIDNKVLTRSDKARGKSDNVPSEEVVKKMKNYWRQLLNAKLITQRKFDNLTKAERGGLSELDKAGFIKRQLVETRQITKHVAQILDSRMNTKYDENDKLIREVKVITLKSKLVSDFRKDFQFYKVREINNYHHAHDAYLNAVVGTALIKKYPKLESEFVYGDYKVYDVRKMIAKSEQEIGKATAKYFFYSNIMNFFKTEITLANGEIRKRPLIETNGETGEIVWDKGRDFATVRKVLSMPQVNIVKKTEVQTGGFSKESILPKRNSDKLIARKKDWDPKKYGGFDSPTVAYSVLVVAKVEKGKSKKLKSVKELLGITIMERSSFEKNPIDFLEAKGYKEVKKDLIIKLPKYSLFELENGRKRMLASAGELQKGNELALPSKYVNFLYLASHYEKLKGSPEDNEQKQLFVEQHKHYLDEIIEQISEFSKRVILADANLDKVLSAYNKHRDKPIREQAENIIHLFTLTNLGAPAAFKYFDTTIDRKRYTSTKEVLDATLIHQSITGLYETRIDLSQLGGDGGGGGGGGGGGGTLNIEDEYRLHETSKEPDVPLGSTWLSDFPQAWAETGGMGLAVRQAPLIIPLKATSTPVSIKQYPMSQEARLGIKPHIQRLLDQGILVPCQSPWNTPLLPVKKPGTNDYRPVQDLREVNKRVEDIHPTVPNPYNLLSGLPPSHQWYTVLDLKDAFFCLRLHPTSQPLFAFEWRDPEMGISGQLTWTRLPQGFKNSPTLFNEALHRDLADFRIQHPDLILLQYVDDLLLAATSEQDCQRGTRALLQTLGNLGYRASAKKAQICQKQVKYLGYLLKEGQRWLTEARKETVMGQPTPKTPRQLREFLGKAGFCRLFIPGFAEMAAPLYPLTKPGTLFNWGPDQQKAYQEIKQALLTAPALGLPDLTKPFELFVDEKQGYAKGVLTQKLGPWRRPVAYLSKKLDPVAAGWPPCLRMVAAIAVLTKDAGKLTMGQPLVILAPHAVEALVKQPPDRWLSNARMTHYQAMLLDTDRVQFGPVVALNPATLLPLPEKEAPHDCLEILAETHGTRPDLTDQPIPDADYTWYTDGSSFLQEGQRRAGAAVTTETEVIWARALPAGTSAQRAELIALTQALKMAEGKKLNVYTDSRYAFATAHVHGEIYRRRGWLTSEGREIKNKNEILALLKALFLPKRLSIIHCPGHQKGNSAEARGNRMADQAAREAAMKAVLETSTLLAGKRTADGSEFEKRTADGSEFESPKKKAKVE

SEQ ID NO: 6289 - protein, 2090 aa, synthetic construct
MPAAKRVKLDGGDKKYSIGLDIGTNSVGWAVITDEYKVPSKKFKVLGNTDRHSIKKNLIGALLFDSGETAEATRLKRTARRRYTRRKNRICYLQEIFSNEMAKVDDSFFHRLEESFLVEEDKKHERHPIFGNIVDEVAYHEKYPTIYHLRKKLVDSTDKADLRLIYLALAHMIKFRGHFLIEGDLNPDNSDVDKLFIQLVQTYNQLFEENPINASGVDAKAILSARLSKSRRLENLIAQLPGEKKNGLFGNLIALSLGLTPNFKSNFDLAEDAKLQLSKDTYDDDLDNLLAQIGDQYADLFLAAKNLSDAILLSDILRVNTEITKAPLSASMIKRYDEHHQDLTLLKALVRQQLPEKYKEIFFDQSKNGYAGYIDGGASQEEFYKFIKPILEKMDGTEELLVKLNREDLLRKQRTFDNGSIPHQIHLGELHAILRRQEDFYPFLKDNREKIEKILTFRIPYYVGPLARGNSRFAWMTRKSEETITPWNFEEVVDKGASAQSFIERMTNFDKNLPNEKVLPKHSLLYEYFTVYNELTKVKYVTEGMRKPAFLSGEQKKAIVDLLFKTNRKVTVKQLKEDYFKKIECFDSVEISGVEDRFNASLGTYHDLLKIIKDKDFLDNEENEDILEDIVLTLTLFEDREMIEERLKTYAHLFDDKVMKQLKRRRYTGWGRLSRKLINGIRDKQSGKTILDFLKSDGFANRNFMQLIHDDSLTFKEDIQKAQVSGQGDSLHEHIANLAGSPAIKKGILQTVKVVDELVKVMGRHKPENIVIEMARENQTTQKGQKNSRERMKRIEEGIKELGSQILKEHPVENTQLQNEKLYLYYLQNGRDMYVDQELDINRLSDYDVDHIVPQSFLKDDSIDNKVLTRSDKARGKSDNVPSEEVVKKMKNYWRQLLNAKLITQRKFDNLTKAERGGLSELDKAGFIKRQLVETRQITKHVAQILDSRMNTKYDENDKLIREVKVITLKSKLVSDFRKDFQFYKVREINNYHHAHDAYLNAVVGTALIKKYPKLESEFVYGDYKVYDVRKMIAKSEQEIGKATAKYFFYSNIMNFFKTEITLANGEIRKRPLIETNGETGEIVWDKGRDFATVRKVLSMPQVNIVKKTEVQTGGFSKESILPKRNSDKLIARKKDWDPKKYGGFDSPTVAYSVLVVAKVEKGKSKKLKSVKELLGITIMERSSFEKNPIDFLEAKGYKEVKKDLIIKLPKYSLFELENGRKRMLASAGELQKGNELALPSKYVNFLYLASHYEKLKGSPEDNEQKQLFVEQHKHYLDEIIEQISEFSKRVILADANLDKVLSAYNKHRDKPIREQAENIIHLFTLTNLGAPAAFKYFDTTIDRKRYTSTKEVLDATLIHQSITGLYETRIDLSQLGGDGGGSSGGTAPLEEEYRLFLEAPIQNVTLLEQWKREIPKVWAEINPPGLASTQAPIHVQLLSTALPVRVRQYPITLEAKRSLRETIRKFRAAGILRPVHSPWNTPLLPVRKSGTSEYRMVQDLREVNKRVETIHPTVPNPYTLLSLLPPDRIWYSVLDLKDAFFCIPLAPESQLIFAFEWADAEEGESGQLTWTRLPQGFKNSPTLFNEALNRDLQGFRLDHPSVSLLQYVDDLLIAADTQAACLSATRDLLMTLAELGYRVSGKKAQLCQEEVTYLGFKIHKGSRSLSNSRTQAILQIPVPKTKRQVREFLGTIGYCRLWIPGFAELAQPLYAATRPGNDPLVWGEKEEEAFQSLKLALTQPPALALPSLDKPFQLFVEETSGAAKGVLTQALGPWKRPVAYLSKRLDPVAAGWPRCLRAIAAAALLTREASKLTFGQDIEITSSHNLESLLRSPPDKWLTNARITQYQVLLLDPPRVRFKQTAALNPATLLPETDDTLPIHHCLDTLDSLTSTRPDLTDQPLAQAEATLFTDGSSYIRDGKRYAGAAVVTLDSVIWAEPLPIGTSAQKAELIALTKALEWSKDKSVNIYTDSRYAFATLHVHGMIYRERGWLTAGGKAIKNAPEILALLTAVWLPKRVAVMHCKGHQKDDAPTSTGNRRADEVAREVAIRPLSTQATISAGKRTADGSEFEKRTADGSEFESPKKKAKVE

SEQ ID NO: 6290 - protein, 2210 aa, synthetic construct
MPAAKRVKLDGGDKKYSIGLDIGTNSVGWAVITDEYKVPSKKFKVLGNTDRHSIKKNLIGALLFDSGETAEATRLKRTARRRYTRRKNRICYLQEIFSNEMAKVDDSFFHRLEESFLVEEDKKHERHPIFGNIVDEVAYHEKYPTIYHLRKKLVDSTDKADLRLIYLALAHMIKFRGHFLIEGDLNPDNSDVDKLFIQLVQTYNQLFEENPINASGVDAKAILSARLSKSRRLENLIAQLPGEKKNGLFGNLIALSLGLTPNFKSNFDLAEDAKLQLSKDTYDDDLDNLLAQIGDQYADLFLAAKNLSDAILLSDILRVNTEITKAPLSASMIKRYDEHHQDLTLLKALVRQQLPEKYKEIFFDQSKNGYAGYIDGGASQEEFYKFIKPILEKMDGTEELLVKLNREDLLRKQRTFDNGSIPHQIHLGELHAILRRQEDFYPFLKDNREKIEKILTFRIPYYVGPLARGNSRFAWMTRKSEETITPWNFEEVVDKGASAQSFIERMTNFDKNLPNEKVLPKHSLLYEYFTVYNELTKVKYVTEGMRKPAFLSGEQKKAIVDLLFKTNRKVTVKQLKEDYFKKIECFDSVEISGVEDRFNASLGTYHDLLKIIKDKDFLDNEENEDILEDIVLTLTLFEDREMIEERLKTYAHLFDDKVMKQLKRRRYTGWGRLSRKLINGIRDKQSGKTILDFLKSDGFANRNFMQLIHDDSLTFKEDIQKAQVSGQGDSLHEHIANLAGSPAIKKGILQTVKVVDELVKVMGRHKPENIVIEMARENQTTQKGQKNSRERMKRIEEGIKELGSQILKEHPVENTQLQNEKLYLYYLQNGRDMYVDQELDINRLSDYDVDHIVPQSFLKDDSIDNKVLTRSDKARGKSDNVPSEEVVKKMKNYWRQLLNAKLITQRKFDNLTKAERGGLSELDKAGFIKRQLVETRQITKHVAQILDSRMNTKYDENDKLIREVKVITLKSKLVSDFRKDFQFYKVREINNYHHAHDAYLNAVVGTALIKKYPKLESEFVYGDYKVYDVRKMIAKSEQEIGKATAKYFFYSNIMNFFKTEITLANGEIRKRPLIETNGETGEIVWDKGRDFATVRKVLSMPQVNIVKKTEVQTGGFSKESILPKRNSDKLIARKKDWDPKKYGGFDSPTVAYSVLVVAKVEKGKSKKLKSVKELLGITIMERSSFEKNPIDFLEAKGYKEVKKDLIIKLPKYSLFELENGRKRMLASAGELQKGNELALPSKYVNFLYLASHYEKLKGSPEDNEQKQLFVEQHKHYLDEIIEQISEFSKRVILADANLDKVLSAYNKHRDKPIREQAENIIHLFTLTNLGAPAAFKYFDTTIDRKRYTSTKEVLDATLIHQSITGLYETRIDLSQLGGDGGGSSGGTLGDQGSRGSDPLPEPRVTLTVEGIPTEFLVNTGAEHSVLTKPMGKMGSKRTVVAGATGSKVYPWTTKRLLKIGQKQVTHSFLVIPECPAPLLGRDLLTKLKAQIQFSTEGPQVTWEDRPAMCLVLNLEEEYRLHEKPVPPSIDPSWLQLFPMVWAEKAGMGLANQVPPVVVELKSDASPVAVRQYPMSKEAREGIRPHIQRFLDLGILVPCQSPWNTPLLPVKKPGTNDYRPVQDLREVNKRVQDIHPTVPNPYNLLSSLPPSHTWYSVLDLKDAFFCLKLHPNSQPLFAFEWRDPEKGNTGQLTWTRLPQGFKNSPTLFNEALHRDLASFRALNPQVVMLQYVDDLLVAAPTYRDCKEGTRRLLQELSKLGYRVSAKKAQLCREEVTYLGYLLKGGKRWLTPARKATVMKIPTPTTPRQVREFLGTAGFCRLWIPGFASLAAPLYPLTRPKVPFTWTEAHQEAFGRIKEALLSAPALALPDLTKPFALYVDEKEGVARGVLTQTLGPWRRPVAYLSKKLDPVASGWPTCLKAIAAVALLLKDADKLTLGQNVLVIAPHNLESIVRQPPDRWMTNARMTHYQSLLLNERVSFAPPAILNPATLLPVESDDTPIHICSEILAEETGTRPDLRDQPLPGVPAWYTDGSSFIMDGRRQAGAAIVDNKRTVWASNLPEGTSAQKAELIALTQALRLAEGKSINIYTDSRYAFATAHVHGAIYKQRGWLTSAGKDIKNKEEILALLEAIHLPKRVAIIHCPGHQRGTDPVATGNRKADEAAKQAAQSTRILTETTKNAGKRTADGSEFEKRTADGSEFESPKKKAKVE

SEQ ID NO: 6291 - protein, 2088 aa, synthetic construct
MPAAKRVKLDGGDKKYSIGLDIGTNSVGWAVITDEYKVPSKKFKVLGNTDRHSIKKNLIGALLFDSGETAEATRLKRTARRRYTRRKNRICYLQEIFSNEMAKVDDSFFHRLEESFLVEEDKKHERHPIFGNIVDEVAYHEKYPTIYHLRKKLVDSTDKADLRLIYLALAHMIKFRGHFLIEGDLNPDNSDVDKLFIQLVQTYNQLFEENPINASGVDAKAILSARLSKSRRLENLIAQLPGEKKNGLFGNLIALSLGLTPNFKSNFDLAEDAKLQLSKDTYDDDLDNLLAQIGDQYADLFLAAKNLSDAILLSDILRVNTEITKAPLSASMIKRYDEHHQDLTLLKALVRQQLPEKYKEIFFDQSKNGYAGYIDGGASQEEFYKFIKPILEKMDGTEELLVKLNREDLLRKQRTFDNGSIPHQIHLGELHAILRRQEDFYPFLKDNREKIEKILTFRIPYYVGPLARGNSRFAWMTRKSEETITPWNFEEVVDKGASAQSFIERMTNFDKNLPNEKVLPKHSLLYEYFTVYNELTKVKYVTEGMRKPAFLSGEQKKAIVDLLFKTNRKVTVKQLKEDYFKKIECFDSVEISGVEDRFNASLGTYHDLLKIIKDKDFLDNEENEDILEDIVLTLTLFEDREMIEERLKTYAHLFDDKVMKQLKRRRYTGWGRLSRKLINGIRDKQSGKTILDFLKSDGFANRNFMQLIHDDSLTFKEDIQKAQVSGQGDSLHEHIANLAGSPAIKKGILQTVKVVDELVKVMGRHKPENIVIEMARENQTTQKGQKNSRERMKRIEEGIKELGSQILKEHPVENTQLQNEKLYLYYLQNGRDMYVDQELDINRLSDYDVDHIVPQSFLKDDSIDNKVLTRSDKARGKSDNVPSEEVVKKMKNYWRQLLNAKLITQRKFDNLTKAERGGLSELDKAGFIKRQLVETRQITKHVAQILDSRMNTKYDENDKLIREVKVITLKSKLVSDFRKDFQFYKVREINNYHHAHDAYLNAVVGTALIKKYPKLESEFVYGDYKVYDVRKMIAKSEQEIGKATAKYFFYSNIMNFFKTEITLANGEIRKRPLIETNGETGEIVWDKGRDFATVRKVLSMPQVNIVKKTEVQTGGFSKESILPKRNSDKLIARKKDWDPKKYGGFDSPTVAYSVLVVAKVEKGKSKKLKSVKELLGITIMERSSFEKNPIDFLEAKGYKEVKKDLIIKLPKYSLFELENGRKRMLASAGELQKGNELALPSKYVNFLYLASHYEKLKGSPEDNEQKQLFVEQHKHYLDEIIEQISEFSKRVILADANLDKVLSAYNKHRDKPIREQAENIIHLFTLTNLGAPAAFKYFDTTIDRKRYTSTKEVLDATLIHQSITGLYETRIDLSQLGGDGGGSSGGTLNLEDEYRLYETSAEPEVSPGSTWLSDFPQAWAETGGMGLAVRQAPLIIPLKATSTPVSIKQYPMSQEAKLGIKPHIQRLLDQGILVPCQSPWNTPLLPVKKPGTNDYRPVQDLREVNKRVEDIHPTVPNPYNLLSGLPPSHRWYTVLDLKDAFFCLRLHPTSQPLFAFEWRDPGMGISGQLTWTRLPQGFKNSPTLFNEALHRDLADFRIQHPDLILLQYVDDILLAATSELDCQQGTRALLLTLGNLGYRASAKKAQLCQKQVKYLGYLLKEGQRWLTEARKETVMGQPTPKTPRQLREFLGKAGFCRLFIPGFAEMAAPLYPLTKPGTLFNWGPDQQKAYQEIKQALLTAPALGLPDLTKPFELFVDEKQGYAKGVLTQKLGPWRRPVAYLSKKLDPVAAGWPPCLRMVAAIAVLRKDAGKLTMGQPLVILAPHAVEALVKQPPDRWLSNARMTHYQAMLLDTDRVQFGPVVALNPATLLPLPEEGAPHDCLEILAETHGTRPDLTDQPIPDADHTWYTDGSSFLQEGQRKAGAAVTTETEVIWARALPAGTSAQRAELIALTQALKMAEGKRLNVYTDSRYAFATAHIHGEIYRRRGWLTSEGREIKNKSEILALLKALFLPKRLSIIHCLGHQKGDSAEARGNRLADQAAREAAIKTPPDTSTLLAGKRTADGSEFEKRTADGSEFESPKKKAKVE

SEQ ID NO: 6292 - protein, 2088 aa, synthetic construct
MPAAKRVKLDGGDKKYSIGLDIGTNSVGWAVITDEYKVPSKKFKVLGNTDRHSIKKNLIGALLFDSGETAEATRLKRTARRRYTRRKNRICYLQEIFSNEMAKVDDSFFHRLEESFLVEEDKKHERHPIFGNIVDEVAYHEKYPTIYHLRKKLVDSTDKADLRLIYLALAHMIKFRGHFLIEGDLNPDNSDVDKLFIQLVQTYNQLFEENPINASGVDAKAILSARLSKSRRLENLIAQLPGEKKNGLFGNLIALSLGLTPNFKSNFDLAEDAKLQLSKDTYDDDLDNLLAQIGDQYADLFLAAKNLSDAILLSDILRVNTEITKAPLSASMIKRYDEHHQDLTLLKALVRQQLPEKYKEIFFDQSKNGYAGYIDGGASQEEFYKFIKPILEKMDGTEELLVKLNREDLLRKQRTFDNGSIPHQIHLGELHAILRRQEDFYPFLKDNREKIEKILTFRIPYYVGPLARGNSRFAWMTRKSEETITPWNFEEVVDKGASAQSFIERMTNFDKNLPNEKVLPKHSLLYEYFTVYNELTKVKYVTEGMRKPAFLSGEQKKAIVDLLFKTNRKVTVKQLKEDYFKKIECFDSVEISGVEDRFNASLGTYHDLLKIIKDKDFLDNEENEDILEDIVLTLTLFEDREMIEERLKTYAHLFDDKVMKQLKRRRYTGWGRLSRKLINGIRDKQSGKTILDFLKSDGFANRNFMQLIHDDSLTFKEDIQKAQVSGQGDSLHEHIANLAGSPAIKKGILQTVKVVDELVKVMGRHKPENIVIEMARENQTTQKGQKNSRERMKRIEEGIKELGSQILKEHPVENTQLQNEKLYLYYLQNGRDMYVDQELDINRLSDYDVDHIVPQSFLKDDSIDNKVLTRSDKARGKSDNVPSEEVVKKMKNYWRQLLNAKLITQRKFDNLTKAERGGLSELDKAGFIKRQLVETRQITKHVAQILDSRMNTKYDENDKLIREVKVITLKSKLVSDFRKDFQFYKVREINNYHHAHDAYLNAVVGTALIKKYPKLESEFVYGDYKVYDVRKMIAKSEQEIGKATAKYFFYSNIMNFFKTEITLANGEIRKRPLIETNGETGEIVWDKGRDFATVRKVLSMPQVNIVKKTEVQTGGFSKESILPKRNSDKLIARKKDWDPKKYGGFDSPTVAYSVLVVAKVEKGKSKKLKSVKELLGITIMERSSFEKNPIDFLEAKGYKEVKKDLIIKLPKYSLFELENGRKRMLASAGELQKGNELALPSKYVNFLYLASHYEKLKGSPEDNEQKQLFVEQHKHYLDEIIEQISEFSKRVILADANLDKVLSAYNKHRDKPIREQAENIIHLFTLTNLGAPAAFKYFDTTIDRKRYTSTKEVLDATLIHQSITGLYETRIDLSQLGGDGGGSSGGTLGIEDEYRLHETSTEPDVSLGSTWLSDFPQAWAETGGMGLAVRQAPLIIPLKATSTPVSIQQYPMSHEARLGIKPHIQRLLDQGILVPCQSPWNTPLLPVKKPGTNDYRPVQDLREVNKRVEDIHPTVPNPYNLLSGLPPSHQWYTVLDLKDAFFCLRLHPTSQPLFAFEWRDPGMGISGQLTWTRLPQGFKNSPTLFNEALHRDLADFRIQHPDLILLQYVDDILLAATSELDCQQGTRALLQTLGDLGYRASAKKAQICQKQVKYLGYLLREGQRWLTEARKETVMGQPVPKTPRQLREFLGTAGFCRLWIPGFAEMAAPLYPLTKPGTLFSWGPDQQKAYQEIKQALLTAPALGLPDLTKPFELFVDEKQGYAKGVLTQKLGPWRRPVAYLSKKLDPVAAGWPPCLRMVAAIAVLTKDAGKLTMGQPLVILAPHAVEALVKQPPDRWLSNARMTHYQAMLLDTDRVQFGPVVALNPATLLPLPEEGAPHDCLEILAETHGTRPDLTDQPIPDADHTWYTDGSSFLQEGQRKAGAAVTTETEVIWAGALPAGTSAQRAELIALTQALKMAEGKRLNVYTDSRYAFATAHIHGEIYRRRGWLTSEGREIKNKSEILALLKALFLPKRLSIIHCLGHQKGDSAEARGNRLADQAAREAAIKTPPDTSTLLAGKRTADGSEFEKRTADGSEFESPKKKAKVE

SEQ ID NO: 6293 - protein, 2080 aa, synthetic construct
MPAAKRVKLDGGDKKYSIGLDIGTNSVGWAVITDEYKVPSKKFKVLGNTDRHSIKKNLIGALLFDSGETAEATRLKRTARRRYTRRKNRICYLQEIFSNEMAKVDDSFFHRLEESFLVEEDKKHERHPIFGNIVDEVAYHEKYPTIYHLRKKLVDSTDKADLRLIYLALAHMIKFRGHFLIEGDLNPDNSDVDKLFIQLVQTYNQLFEENPINASGVDAKAILSARLSKSRRLENLIAQLPGEKKNGLFGNLIALSLGLTPNFKSNFDLAEDAKLQLSKDTYDDDLDNLLAQIGDQYADLFLAAKNLSDAILLSDILRVNTEITKAPLSASMIKRYDEHHQDLTLLKALVRQQLPEKYKEIFFDQSKNGYAGYIDGGASQEEFYKFIKPILEKMDGTEELLVKLNREDLLRKQRTFDNGSIPHQIHLGELHAILRRQEDFYPFLKDNREKIEKILTFRIPYYVGPLARGNSRFAWMTRKSEETITPWNFEEVVDKGASAQSFIERMTNFDKNLPNEKVLPKHSLLYEYFTVYNELTKVKYVTEGMRKPAFLSGEQKKAIVDLLFKTNRKVTVKQLKEDYFKKIECFDSVEISGVEDRFNASLGTYHDLLKIIKDKDFLDNEENEDILEDIVLTLTLFEDREMIEERLKTYAHLFDDKVMKQLKRRRYTGWGRLSRKLINGIRDKQSGKTILDFLKSDGFANRNFMQLIHDDSLTFKEDIQKAQVSGQGDSLHEHIANLAGSPAIKKGILQTVKVVDELVKVMGRHKPENIVIEMARENQTTQKGQKNSRERMKRIEEGIKELGSQILKEHPVENTQLQNEKLYLYYLQNGRDMYVDQELDINRLSDYDVDHIVPQSFLKDDSIDNKVLTRSDKARGKSDNVPSEEVVKKMKNYWRQLLNAKLITQRKFDNLTKAERGGLSELDKAGFIKRQLVETRQITKHVAQILDSRMNTKYDENDKLIREVKVITLKSKLVSDFRKDFQFYKVREINNYHHAHDAYLNAVVGTALIKKYPKLESEFVYGDYKVYDVRKMIAKSEQEIGKATAKYFFYSNIMNFFKTEITLANGEIRKRPLIETNGETGEIVWDKGRDFATVRKVLSMPQVNIVKKTEVQTGGFSKESILPKRNSDKLIARKKDWDPKKYGGFDSPTVAYSVLVVAKVEKGKSKKLKSVKELLGITIMERSSFEKNPIDFLEAKGYKEVKKDLIIKLPKYSLFELENGRKRMLASAGELQKGNELALPSKYVNFLYLASHYEKLKGSPEDNEQKQLFVEQHKHYLDEIIEQISEFSKRVILADANLDKVLSAYNKHRDKPIREQAENIIHLFTLTNLGAPAAFKYFDTTIDRKRYTSTKEVLDATLIHQSITGLYETRIDLSQLGGDGGGSSGGLDDEYRLYSPLVKPDQNIQFWLEQFPQAWAETAGMGLAKQVPPQVIQLKASATPVSVRQYPLSKEAQEGIRPHVQRLIQQGILVPVQSPWNTPLLPVRKPGTNDYRPVQDLREVNKRVQDIHPTVPNPYNLLCALPPQRSWYTVLDLKDAFFCLRLHPTSQPLFAFEWRDPGTGRTGQLTWTRLPQGFKNSPTIFNEALHRDLANFRIQHPQVTLLQYVDDLLLAGATKQDCLEGTKALLLELSDLGYRASAKKAQICRREVTYLGYSLRDGQRWLTEARKKTVVQIPAPTTAKQVREFLGKAGFCRLFIPGFATLAAPLYPLTKPKGEFSWAPEHQKAFDAIKKALLSAPALALPDVTKPFTLYVDERKGVARGVLTQTLGPWRRPVAYLSKKLDPVASGWPVCLKAIAAVAILVKDADKLTLGQNITVIAPHALENIVRQPPDRWMTNARMTHYQSLLLTERVTFAPPAALNPATLLPEETDEPVTHDCHQLLIEETGVRKDLTDIPLTGEVLTWFTDGSSYVVEGKRMAGAAVVDGTRTIWASSLPEGTSAQKAELMALTQALRLAEGKSINIYTDSRYAFATAHVHGAIYKQRGWLTSAGREIKNKEEILSLLEALHLPKRLAIIHCPGHQKAKDPISRGNQMADRVAKQAAQGVNLLPAGKRTADGSEFEKRTADGSEFESPKKKAKVE

SEQ ID NO: 6294 - protein, 2080 aa, synthetic construct; identical to SEQ ID NO: 6293

SEQ ID NO: 6295 - protein, 2168 aa, synthetic construct
MPAAKRVKLDGGDKKYSIGLDIGTNSVGWAVITDEYKVPSKKFKVLGNTDRHSIKKNLIGALLFDSGETAEATRLKRTARRRYTRRKNRICYLQEIFSNEMAKVDDSFFHRLEESFLVEEDKKHERHPIFGNIVDEVAYHEKYPTIYHLRKKLVDSTDKADLRLIYLALAHMIKFRGHFLIEGDLNPDNSDVDKLFIQLVQTYNQLFEENPINASGVDAKAILSARLSKSRRLENLIAQLPGEKKNGLFGNLIALSLGLTPNFKSNFDLAEDAKLQLSKDTYDDDLDNLLAQIGDQYADLFLAAKNLSDAILLSDILRVNTEITKAPLSASMIKRYDEHHQDLTLLKALVRQQLPEKYKEIFFDQSKNGYAGYIDGGASQEEFYKFIKPILEKMDGTEELLVKLNREDLLRKQRTFDNGSIPHQIHLGELHAILRRQEDFYPFLKDNREKIEKILTFRIPYYVGPLARGNSRFAWMTRKSEETITPWNFEEVVDKGASAQSFIERMTNFDKNLPNEKVLPKHSLLYEYFTVYNELTKVKYVTEGMRKPAFLSGEQKKAIVDLLFKTNRKVTVKQLKEDYFKKIECFDSVEISGVEDRFNASLGTYHDLLKIIKDKDFLDNEENEDILEDIVLTLTLFEDREMIEERLKTYAHLFDDKVMKQLKRRRYTGWGRLSRKLINGIRDKQSGKTILDFLKSDGFANRNFMQLIHDDSLTFKEDIQKAQVSGQGDSLHEHIANLAGSPAIKKGILQTVKVVDELVKVMGRHKPENIVIEMARENQTTQKGQKNSRERMKRIEEGIKELGSQILKEHPVENTQLQNEKLYLYYLQNGRDMYVDQELDINRLSDYDVDHIVPQSFLKDDSIDNKVLTRSDKARGKSDNVPSEEVVKKMKNYWRQLLNAKLITQRKFDNLTKAERGGLSELDKAGFIKRQLVETRQITKHVAQILDSRMNTKYDENDKLIREVKVITLKSKLVSDFRKDFQFYKVREINNYHHAHDAYLNAVVGTALIKKYPKLESEFVYGDYKVYDVRKMIAKSEQEIGKATAKYFFYSNIMNFFKTEITLANGEIRKRPLIETNGETGEIVWDKGRDFATVRKVLSMPQVNIVKKTEVQTGGFSKESILPKRNSDKLIARKKDWDPKKYGGFDSPTVAYSVLVVAKVEKGKSKKLKSVKELLGITIMERSSFEKNPIDFLEAKGYKEVKKDLIIKLPKYSLFELENGRKRMLASAGELQKGNELALPSKYVNFLYLASHYEKLKGSPEDNEQKQLFVEQHKHYLDEIIEQISEFSKRVILADANLDKVLSAYNKHRDKPIREQAENIIHLFTLTNLGAPAAFKYFDTTIDRKRYTSTKEVLDATLIHQSITGLYETRIDLSQLGGDGGGSSGGMDPLQLLQPLEAEIKGTKLKAHWNSGATITCVPQAFLEEEVPIKNIWIKTIHGEKEQPVYYLTFKIQGRKVEAEVISSPYDYILVSPSDIPWLMKKPLQLTTLVPLQEYEERLLKQTMLTGSYKEKLQSLFLKYDALWQHWENQVGHRRIKPHHIATGTVNPRPQKQYPINPKAKASIQTVINDLLKQGVLIQQNSIMNTPVYPVPKPDGKWRMVLDYREVNKTIPLIAAQNQHSAGILSSIFRGKYKTTLDLSNGFWAHSITPESYWLTAFTWLGQQYCWTRLPQGFLNSPALFNADVVDLLKEVPNVQVYVDDIYISHDDPREHLEQLEKVFSLLLNAGYVVSLKKSEIAQHEVEFLGFNITKEGRGLTETFKQKLLNITPPRDLKQLQSILGLLNFARNFIPNFSELVKPLYNIIATAPGKYITWTTDNSQQLQNIISMLNSAENLEERNPEVRLIMKVNTSPSAGYIRFYNEFAKRPIMYLNYVYTKAEVKFTNTEKLLTTIHKGLIKALDLGMGQEILVYSPIVSMTKIQKTPLPERKALPIRWITWMSYLEDPRIQFHYDKTLPELQQVPTVTDDIIAKIKHPSEFSMVFYTDGSAIKHPNVNKSHNAGMGIAQVQFKPEFTVINTWSIPLGDHTAQLAEVAAVEFACKKALKIDGPVLIVTDSFYVAESVNKELPYWQSNGFFNNKKKPLKHVSKWKSIADCIQLKPDIIIIHEKGHQPTASTFHTEGNNLADKLATQGSYVVNAGKRTADGSEFEKRTADGSEFESPKKKAKVE

SEQ ID NO: 6296 - protein, 2079 aa, synthetic construct
MPAAKRVKLDGGDKKYSIGLDIGTNSVGWAVITDEYKVPSKKFKVLGNTDRHSIKKNLIGALLFDSGETAEATRLKRTARRRYTRRKNRICYLQEIFSNEMAKVDDSFFHRLEESFLVEEDKKHERHPIFGNIVDEVAYHEKYPTIYHLRKKLVDSTDKADLRLIYLALAHMIKFRGHFLIEGDLNPDNSDVDKLFIQLVQTYNQLFEENPINASGVDAKAILSARLSKSRRLENLIAQLPGEKKNGLFGNLIALSLGLTPNFKSNFDLAEDAKLQLSKDTYDDDLDNLLAQIGDQYADLFLAAKNLSDAILLSDILRVNTEITKAPLSASMIKRYDEHHQDLTLLKALVRQQLPEKYKEIFFDQSKNGYAGYIDGGASQEEFYKFIKPILEKMDGTEELLVKLNREDLLRKQRTFDNGSIPHQIHLGELHAILRRQEDFYPFLKDNREKIEKILTFRIPYYVGPLARGNSRFAWMTRKSEETITPWNFEEVVDKGASAQSFIERMTNFDKNLPNEKVLPKHSLLYEYFTVYNELTKVKYVTEGMRKPAFLSGEQKKAIVDLLFKTNRKVTVKQLKEDYFKKIECFDSVEISGVEDRFNASLGTYHDLLKIIKDKDFLDNEENEDILEDIVLTLTLFEDREMIEERLKTYAHLFDDKVMKQLKRRRYTGWGRLSRKLINGIRDKQSGKTILDFLKSDGFANRNFMQLIHDDSLTFKEDIQKAQVSGQGDSLHEHIANLAGSPAIKKGILQTVKVVDELVKVMGRHKPENIVIEMARENQTTQKGQKNSRERMKRIEEGIKELGSQILKEHPVENTQLQNEKLYLYYLQNGRDMYVDQELDINRLSDYDVDHIVPQSFLKDDSIDNKVLTRSDKARGKSDNVPSEEVVKKMKNYWRQLLNAKLITQRKFDNLTKAERGGLSELDKAGFIKRQLVETRQITKHVAQILDSRMNTKYDENDKLIREVKVITLKSKLVSDFRKDFQFYKVREINNYHHAHDAYLNAVVGTALIKKYPKLESEFVYGDYKVYDVRKMIAKSEQEIGKATAKYFFYSNIMNFFKTEITLANGEIRKRPLIETNGETGEIVWDKGRDFATVRKVLSMPQVNIVKKTEVQTGGFSKESILPKRNSDKLIARKKDWDPKKYGGFDSPTVAYSVLVVAKVEKGKSKKLKSVKELLGITIMERSSFEKNPIDFLEAKGYKEVKKDLIIKLPKYSLFELENGRKRMLASAGELQKGNELALPSKYVNFLYLASHYEKLKGSPEDNEQKQLFVEQHKHYLDEIIEQISEFSKRVILADANLDKVLSAYNKHRDKPIREQAENIIHLFTLTNLGAPAAFKYFDTTIDRKRYTSTKEVLDATLIHQSITGLYETRIDLSQLGGDGGGSSGGVPWLTQQPLQLTILVPLQEYQDRILNKTALPEEQKQQLKALFTKYDNLWQHWENQVGHRKIRPHNIATGDYPPRPQKQYPINPKAKPSIQIVIDDLLKQGVLTPQNSTMNTPVYPVPKPDGRWRMVLDYREVNKTIPLTAAQNQHSAGILATIVRQKYKTTLDLANGFWAHPITPDSYWLTAFTWQGKQYCWTRLPQGFLNSPALFTADAVDLLKEVPNVQVYVDDIYLSHDNPHEHIQQLEKVFQILLQAGYVVSLKKSEIGQRTVEFLGFNITKEGRGLTDTFKTKLLNVTPPKDLKQLQSILGLLNFARNFIPNFAELVQTLYNLIASSKGKYIEWTEDNTKQLNKVIEALNTASNLEERLPDQRLVIKVNTSPSAGYVRYYNESGKKPIMYLNYVFSKAELKFSMLEKLLTTMHKALIKAMDLAMGQEILVYSPIVSMTKIQKTPLPERKALPIRWITWMTYLEDPRIQFHYDKTLPELKHIPDVYTSSIPPLKHPSQYEGVFCTDGSAIKSPDPTKSNNAGMGIVHAIYNPEYKILNQWSIPLGHHTAQMAEIAAVEFACKKALKVPGPVLVITDSFYVAESANKELPYWKSNGFVNNKKEPLKHISKWKSIAECLSIKPDITIQHEKGHQPINTSIHTEGNALADKLATQGSYVVNAGKRTADGSEFEKRTADGSEFESPKKKAKVE

SEQ ID NO: 6297 - protein, 2088 aa, synthetic construct
MPAAKRVKLDGGDKKYSIGLDIGTNSVGWAVITDEYKVPSKKFKVLGNTDRHSIKKNLIGALLFDSGETAEATRLKRTARRRYTRRKNRICYLQEIFSNEMAKVDDSFFHRLEESFLVEEDKKHERHPIFGNIVDEVAYHEKYPTIYHLRKKLVDSTDKADLRLIYLALAHMIKFRGHFLIEGDLNPDNSDVDKLFIQLVQTYNQLFEENPINASGVDAKAILSARLSKSRRLENLIAQLPGEKKNGLFGNLIALSLGLTPNFKSNFDLAEDAKLQLSKDTYDDDLDNLLAQIGDQYADLFLAAKNLSDAILLSDILRVNTEITKAPLSASMIKRYDEHHQDLTLLKALVRQQLPEKYKEIFFDQSKNGYAGYIDGGASQEEFYKFIKPILEKMDGTEELLVKLNREDLLRKQRTFDNGSIPHQIHLGELHAILRRQEDFYPFLKDNREKIEKILTFRIPYYVGPLARGNSRFAWMTRKSEETITPWNFEEVVDKGASAQSFIERMTNFDKNLPNEKVLPKHSLLYEYFTVYNELTKVKYVTEGMRKPAFLSGEQKKAIVDLLFKTNRKVTVKQLKEDYFKKIECFDSVEISGVEDRFNASLGTYHDLLKIIKDKDFLDNEENEDILEDIVLTLTLFEDREMIEERLKTYAHLFDDKVMKQLKRRRYTGWGRLSRKLINGIRDKQSGKTILDFLKSDGFANRNFMQLIHDDSLTFKEDIQKAQVSGQGDSLHEHIANLAGSPAIKKGILQTVKVVDELVKVMGRHKPENIVIEMARENQTTQKGQKNSRERMKRIEEGIKELGSQILKEHPVENTQLQNEKLYLYYLQNGRDMYVDQELDINRLSDYDVDHIVPQSFLKDDSIDNKVLTRSDKARGKSDNVPSEEVVKKMKNYWRQLLNAKLITQRKFDNLTKAERGGLSELDKAGFIKRQLVETRQITKHVAQILDSRMNTKYDENDKLIREVKVITLKSKLVSDFRKDFQFYKVREINNYHHAHDAYLNAVVGTALIKKYPKLESEFVYGDYKVYDVRKMIAKSEQEIGKATAKYFFYSNIMNFFKTEITLANGEIRKRPLIETNGETGEIVWDKGRDFATVRKVLSMPQVNIVKKTEVQTGGFSKESILPKRNSDKLIARKKDWDPKKYGGFDSPTVAYSVLVVAKVEKGKSKKLKSVKELLGITIMERSSFEKNPIDFLEAKGYKEVKKDLIIKLPKYSLFELENGRKRMLASAGELQKGNELALPSKYVNFLYLASHYEKLKGSPEDNEQKQLFVEQHKHYLDEIIEQISEFSKRVILADANLDKVLSAYNKHRDKPIREQAENIIHLFTLTNLGAPAAFKYFDTTIDRKRYTSTKEVLDATLIHQSITGLYETRIDLSQLGGDGGGSSGGTLNIEDEYRLHETSKEPDVPLGSTWLSDFPQAWAETGGMGLAVRQAPLIIPLKATSTPVSIKQYPMSQEARLGIKPHIQRLLDQGILVPCQSPWNTPLLPVKKPGTNDYRPVQDLREVNKRVEDIHPTVPNPYNLLSGLPPSHQWYTVLDLKDAFFCLRLHPTSQPLFAFEWRDPEMGISGQLTWTRLPQGFKNSPTLFNEALHRDLADFRIQHPDLILLQYVDDLLLAATSEQDCQRGTRALLQTLGNLGYRASAKKAQICQKQVKYLGYLLKEGQRWLTEARKETVMGQPTPKTPRQLREFLGTAGFCRLWIPGFAEMAAPLYPLTKPGTLFNWGPDQQKAYQEIKQALLTAPALGLPDLTKPFELFVDEKQGYAKGVLTQKLGPWRRPVAYLSKKLDPVAAGWPPCLRMVAAIAVLTKDAGKLTMGQPLVILAPHAVEALVKQPPDRWLSNARMTHYQAMLLDTDRVQFGPVVALNPATLLPLPEKEAPHDCLEILAETHGTRPDLTDQPIPDADYTWYTDGSSFLQEGQRRAGAAVTTETEVIWARALPAGTSAQRAELIALTQALKMAEGKKLNVYTDSRYAFATAHVHGEIYRRRGWLTSEGREIKNKNEILALLKALFLPKRLSIIHCPGHQKGNSAEARGNRMADQAAREAAMKAVLETSTLLAGKRTADGSEFEKRTADGSEFESPKKKAKVE

SEQ ID NO: 6298 - protein, 2089 aa, synthetic construct
MPAAKRVKLDGGDKKYSIGLDIGTNSVGWAVITDEYKVPSKKFKVLGNTDRHSIKKNLIGALLFDSGETAEATRLKRTARRRYTRRKNRICYLQEIFSNEMAKVDDSFFHRLEESFLVEEDKKHERHPIFGNIVDEVAYHEKYPTIYHLRKKLVDSTDKADLRLIYLALAHMIKFRGHFLIEGDLNPDNSDVDKLFIQLVQTYNQLFEENPINASGVDAKAILSARLSKSRRLENLIAQLPGEKKNGLFGNLIALSLGLTPNFKSNFDLAEDAKLQLSKDTYDDDLDNLLAQIGDQYADLFLAAKNLSDAILLSDILRVNTEITKAPLSASMIKRYDEHHQDLTLLKALVRQQLPEKYKEIFFDQSKNGYAGYIDGGASQEEFYKFIKPILEKMDGTEELLVKLNREDLLRKQRTFDNGSIPHQIHLGELHAILRRQEDFYPFLKDNREKIEKILTFRIPYYVGPLARGNSRFAWMTRKSEETITPWNFEEVVDKGASAQSFIERMTNFDKNLPNEKVLPKHSLLYEYFTVYNELTKVKYVTEGMRKPAFLSGEQKKAIVDLLFKTNRKVTVKQLKEDYFKKIECFDSVEISGVEDRFNASLGTYHDLLKIIKDKDFLDNEENEDILEDIVLTLTLFEDREMIEERLKTYAHLFDDKVMKQLKRRRYTGWGRLSRKLINGIRDKQSGKTILDFLKSDGFANRNFMQLIHDDSLTFKEDIQKAQVSGQGDSLHEHIANLAGSPAIKKGILQTVKVVDELVKVMGRHKPENIVIEMARENQTTQKGQKNSRERMKRIEEGIKELGSQILKEHPVENTQLQNEKLYLYYLQNGRDMYVDQELDINRLSDYDVDHIVPQSFLKDDSIDNKVLTRSDKARGKSDNVPSEEVVKKMKNYWRQLLNAKLITQRKFDNLTKAERGGLSELDKAGFIKRQLVETRQITKHVAQILDSRMNTKYDENDKLIREVKVITLKSKLVSDFRKDFQFYKVREINNYHHAHDAYLNAVVGTALIKKYPKLESEFVYGDYKVYDVRKMIAKSEQEIGKATAKYFFYSNIMNFFKTEITLANGEIRKRPLIETNGETGEIVWDKGRDFATVRKVLSMPQVNIVKKTEVQTGGFSKESILPKRNSDKLIARKKDWDPKKYGGFDSPTVAYSVLVVAKVEKGKSKKLKSVKELLGITIMERSSFEKNPIDFLEAKGYKEVKKDLIIKLPKYSLFELENGRKRMLASAGELQKGNELALPSKYVNFLYLASHYEKLKGSPEDNEQKQLFVEQHKHYLDEIIEQISEFSKRVILADANLDKVLSAYNKHRDKPIREQAENIIHLFTLTNLGAPAAFKYFDTTIDRKRYTSTKEVLDATLIHQSITGLYETRIDLSQLGGDGGGSSGSSGGVLNLEEEYRLHEKPVPSSIDPSWLQLFPTVWAERAGMGLANQVPPVVVELRSGASPVAVRQYPMSKEAREGIRPHIQKFLDLGVLVPCRSPWNTPLLPVKKPGTNDYRPVQDLREINKRVQDIHPTVPNPYNLLSSLPPSYTWYSVLDLKDAFFCLRLHPNSQPLFAFEWKDPEKGNTGQLTWTRLPQGFKNSPTLFDEALHRDLAPFRALNPQVVLLQYVDDLLVAAPTYEDCKKGTQKLLQELSKLGYRVSAKKAQLCQREVTYLGYLLKEGKRWLTPARKATVMKIPVPTTPRQVREFLGTAGFCRLWIPGFASLAAPLYPLTKESIPFIWTEEHQQAFDHIKKALLSAPALALPDLTKPFTLYIDERAGVARGVLTQTLGPWRRPVAYLSKKLDPVASGWPTCLKAVAAVALLLKDADKLTLGQNVTVIASHSLESIVRQPPDRWMTNARMTHYQSLLLNERVSFAPPAVLNPATLLPVESEATPVHRCSEILAEETGTRRDLEDQPLPGVPTWYTDGSSFITEGKRRAGAPIVDGKRTVWASSLPEGTSAQKAELVALTQALRLAEGKNINIYTDSRYAFATAHIHGAIYKQRGLLTSAGKDIKNKEEILALLEAIHLPRRVAIIHCPGHQRGSNPVATGNRRADEAAKQAALSTRVLAGTTKPAGKRTADGSEFEKRTADGSEFESPKKKAKVE

SEQ ID NO: 6299 - protein, 2213 aa, synthetic construct
MPAAKRVKLDGGDKKYSIGLDIGTNSVGWAVITDEYKVPSKKFKVLGNTDRHSIKKNLIGALLFDSGETAEATRLKRTARRRYTRRKNRICYLQEIFSNEMAKVDDSFFHRLEESFLVEEDKKHERHPIFGNIVDEVAYHEKYPTIYHLRKKLVDSTDKADLRLIYLALAHMIKFRGHFLIEGDLNPDNSDVDKLFIQLVQTYNQLFEENPINASGVDAKAILSARLSKSRRLENLIAQLPGEKKNGLFGNLIALSLGLTPNFKSNFDLAEDAKLQLSKDTYDDDLDNLLAQIGDQYADLFLAAKNLSDAILLSDILRVNTEITKAPLSASMIKRYDEHHQDLTLLKALVRQQLPEKYKEIFFDQSKNGYAGYIDGGASQEEFYKFIKPILEKMDGTEELLVKLNREDLLRKQRTFDNGSIPHQIHLGELHAILRRQEDFYPFLKDNREKIEKILTFRIPYYVGPLARGNSRFAWMTRKSEETITPWNFEEVVDKGASAQSFIERMTNFDKNLPNEKVLPKHSLLYEYFTVYNELTKVKYVTEGMRKPAFLSGEQKKAIVDLLFKTNRKVTVKQLKEDYFKKIECFDSVEISGVEDRFNASLGTYHDLLKIIKDKDFLDNEENEDILEDIVLTLTLFEDREMIEERLKTYAHLFDDKVMKQLKRRRYTGWGRLSRKLINGIRDKQSGKTILDFLKSDGFANRNFMQLIHDDSLTFKEDIQKAQVSGQGDSLHEHIANLAGSPAIKKGILQTVKVVDELVKVMGRHKPENIVIEMARENQTTQKGQKNSRERMKRIEEGIKELGSQILKEHPVENTQLQNEKLYLYYLQNGRDMYVDQELDINRLSDYDVDHIVPQSFLKDDSIDNKVLTRSDKARGKSDNVPSEEVVKKMKNYWRQLLNAKLITQRKFDNLTKAERGGLSELDKAGFIKRQLVETRQITKHVAQILDSRMNTKYDENDKLIREVKVITLKSKLVSDFRKDFQFYKVREINNYHHAHDAYLNAVVGTALIKKYPKLESEFVYGDYKVYDVRKMIAKSEQEIGKATAKYFFYSNIMNFFKTEITLANGEIRKRPLIETNGETGEIVWDKGRDFATVRKVLSMPQVNIVKKTEVQTGGFSKESILPKRNSDKLIARKKDWDPKKYGGFDSPTVAYSVLVVAKVEKGKSKKLKSVKELLGITIMERSSFEKNPIDFLEAKGYKEVKKDLIIKLPKYSLFELENGRKRMLASAGELQKGNELALPSKYVNFLYLASHYEKLKGSPEDNEQKQLFVEQHKHYLDEIIEQISEFSKRVILADANLDKVLSAYNKHRDKPIREQAENIIHLFTLTNLGAPAAFKYFDTTIDRKRYTSTKEVLDATLIHQSITGLYETRIDLSQLGGDGGGSSGSSGGTLGDQGSRGSDPLPEPRVTLTVEGIPTEFLVNTGAEHSVLTKPMGKMGSKRTVVAGATGSKVYPWTTKRLLKIGQKQVTHSFLVIPECPAPLLGRDLLTKLKAQIQFSTEGPQVTWEDRPAMCLVLNLEEEYRLHEKPVPPSIDPSWLQLFPMVWAEKAGMGLANQVPPVVVELKSDASPVAVRQYPMSKEAREGIRPHIQRFLDLGILVPCQSPWNTPLLPVKKPGTNDYRPVQDLREVNKRVQDIHPTVPNPYNLLSSLPPSHTWYSVLDLKDAFFCLKLHPNSQPLFAFEWRDPEKGNTGQLTWTRLPQGFKNSPTLFNEALHRDLASFRALNPQVVMLQYVDDLLVAAPTYRDCKEGTRRLLQELSKLGYRVSAKKAQLCREEVTYLGYLLKGGKRWLTPARKATVMKIPTPTTPRQVREFLGTAGFCRLWIPGFASLAAPLYPLTRPKVPFTWTEAHQEAFGRIKEALLSAPALALPDLTKPFALYVDEKEGVARGVLTQTLGPWRRPVAYLSKKLDPVASGWPTCLKAIAAVALLLKDADKLTLGQNVLVIAPHNLESIVRQPPDRWMTNARMTHYQSLLLNERVSFAPPAILNPATLLPVESDDTPIHICSEILAEETGTRPDLRDQPLPGVPAWYTDGSSFIMDGRRQAGAAIVDNKRTVWASNLPEGTSAQKAELIALTQALRLAEGKSINIYTDSRYAFATAHVHGAIYKQRGWLTSAGKDIKNKEEILALLEAIHLPKRVAIIHCPGHQRGTDPVATGNRKADEAAKQAAQSTRILTETTKNAGKRTADGSEFEKRTADGSEFESPKKKAKVE

SEQ ID NO: 6300 - protein, 2091 aa, synthetic construct
MPAAKRVKLDGGDKKYSIGLDIGTNSVGWAVITDEYKVPSKKFKVLGNTDRHSIKKNLIGALLFDSGETAEATRLKRTARRRYTRRKNRICYLQEIFSNEMAKVDDSFFHRLEESFLVEEDKKHERHPIFGNIVDEVAYHEKYPTIYHLRKKLVDSTDKADLRLIYLALAHMIKFRGHFLIEGDLNPDNSDVDKLFIQLVQTYNQLFEENPINASGVDAKAILSARLSKSRRLENLIAQLPGEKKNGLFGNLIALSLGLTPNFKSNFDLAEDAKLQLSKDTYDDDLDNLLAQIGDQYADLFLAAKNLSDAILLSDILRVNTEITKAPLSASMIKRYDEHHQDLTLLKALVRQQLPEKYKEIFFDQSKNGYAGYIDGGASQEEFYKFIKPILEKMDGTEELLVKLNREDLLRKQRTFDNGSIPHQIHLGELHAILRRQEDFYPFLKDNREKIEKILTFRIPYYVGPLARGNSRFAWMTRKSEETITPWNFEEVVDKGASAQSFIERMTNFDKNLPNEKVLPKHSLLYEYFTVYNELTKVKYVTEGMRKPAFLSGEQKKAIVDLLFKTNRKVTVKQLKEDYFKKIECFDSVEISGVEDRFNASLGTYHDLLKIIKDKDFLDNEENEDILEDIVLTLTLFEDREMIEERLKTYAHLFDDKVMKQLKRRRYTGWGRLSRKLINGIRDKQSGKTILDFLKSDGFANRNFMQLIHDDSLTFKEDIQKAQVSGQGDSLHEHIANLAGSPAIKKGILQTVKVVDELVKVMGRHKPENIVIEMARENQTTQKGQKNSRERMKRIEEGIKELGSQILKEHPVENTQLQNEKLYLYYLQNGRDMYVDQELDINRLSDYDVDHIVPQSFLKDDSIDNKVLTRSDKARGKSDNVPSEEVVKKMKNYWRQLLNAKLITQRKFDNLTKAERGGLSELDKAGFIKRQLVETRQITKHVAQILDSRMNTKYDENDKLIREVKVITLKSKLVSDFRKDFQFYKVREINNYHHAHDAYLNAVVGTALIKKYPKLESEFVYGDYKVYDVRKMIAKSEQEIGKATAKYFFYSNIMNFFKTEITLANGEIRKRPLIETNGETGEIVWDKGRDFATVRKVLSMPQVNIVKKTEVQTGGFSKESILPKRNSDKLIARKKDWDPKKYGGFDSPTVAYSVLVVAKVEKGKSKKLKSVKELLGITIMERSSFEKNPIDFLEAKGYKEVKKDLIIKLPKYSLFELENGRKRMLASAGELQKGNELALPSKYVNFLYLASHYEKLKGSPEDNEQKQLFVEQHKHYLDEIIEQISEFSKRVILADANLDKVLSAYNKHRDKPIREQAENIIHLFTLTNLGAPAAFKYFDTTIDRKRYTSTKEVLDATLIHQSITGLYETRIDLSQLGGDGGGSSGSSGGTLGIEDEYRLHETSTEPDVSLGSTWLSDFPQAWAETGGMGLAVRQAPLIIPLKATSTPVSIQQYPMSHEARLGIKPHIQRLLDQGILVPCQSPWNTPLLPVKKPGTNDYRPVQDLREVNKRVEDIHPTVPNPYNLLSGLPPSHQWYTVLDLKDAFFCLRLHPTSQPLFAFEWRDPGMGISGQLTWTRLPQGFKNSPTLFNEALHRDLADFRIQHPDLILLQYVDDILLAATSELDCQQGTRALLQTLGDLGYRASAKKAQICQKQVKYLGYLLREGQRWLTEARKETVMGQPVPKTPRQLREFLGTAGFCRLWIPGFAEMAAPLYPLTKPGTLFSWGPDQQKAYQEIKQALLTAPALGLPDLTKPFELFVDEKQGYAKGVLTQKLGPWRRPVAYLSKKLDPVAAGWPPCLRMVAAIAVLTKDAGKLTMGQPLVILAPHAVEALVKQPPDRWLSNARMTHYQAMLLDTDRVQFGPVVALNPATLLPLPEEGAPHDCLEILAETHGTRPDLTDQPIPDADHTWYTDGSSFLQEGQRKAGAAVTTETEVIWAGALPAGTSAQRAELIALTQALKMAEGKRLNVYTDSRYAFATAHIHGEIYRRRGWLTSEGREIKNKSEILALLKALFLPKRLSIIHCLGHQKGDSAEARGNRLADQAAREAAIKTPPDTSTLLAGKRTADGSEFEKRTADGSEFESPKKKAKVE

SEQ ID NO: 6301 - protein, 2091 aa, synthetic construct
MPAAKRVKLDGGDKKYSIGLDIGTNSVGWAVITDEYKVPSKKFKVLGNTDRHSIKKNLIGALLFDSGETAEATRLKRTARRRYTRRKNRICYLQEIFSNEMAKVDDSFFHRLEESFLVEEDKKHERHPIFGNIVDEVAYHEKYPTIYHLRKKLVDSTDKADLRLIYLALAHMIKFRGHFLIEGDLNPDNSDVDKLFIQLVQTYNQLFEENPINASGVDAKAILSARLSKSRRLENLIAQLPGEKKNGLFGNLIALSLGLTPNFKSNFDLAEDAKLQLSKDTYDDDLDNLLAQIGDQYADLFLAAKNLSDAILLSDILRVNTEITKAPLSASMIKRYDEHHQDLTLLKALVRQQLPEKYKEIFFDQSKNGYAGYIDGGASQEEFYKFIKPILEKMDGTEELLVKLNREDLLRKQRTFDNGSIPHQIHLGELHAILRRQEDFYPFLKDNREKIEKILTFRIPYYVGPLARGNSRFAWMTRKSEETITPWNFEEVVDKGASAQSFIERMTNFDKNLPNEKVLPKHSLLYEYFTVYNELTKVKYVTEGMRKPAFLSGEQKKAIVDLLFKTNRKVTVKQLKEDYFKKIECFDSVEISGVEDRFNASLGTYHDLLKIIKDKDFLDNEENEDILEDIVLTLTLFEDREMIEERLKTYAHLFDDKVMKQLKRRRYTGWGRLSRKLINGIRDKQSGKTILDFLKSDGFANRNFMQLIHDDSLTFKEDIQKAQVSGQGDSLHEHIANLAGSPAIKKGILQTVKVVDELVKVMGRHKPENIVIEMARENQTTQKGQKNSRERMKRIEEGIKELGSQILKEHPVENTQLQNEKLYLYYLQNGRDMYVDQELDINRLSDYDVDHIVPQSFLKDDSIDNKVLTRSDKARGKSDNVPSEEVVKKMKNYWRQLLNAKLITQRKFDNLTKAERGGLSELDKAGFIKRQLVETRQITKHVAQILDSRMNTKYDENDKLIREVKVITLKSKLVSDFRKDFQFYKVREINNYHHAHDAYLNAVVGTALIKKYPKLESEFVYGDYKVYDVRKMIAKSEQEIGKATAKYFFYSNIMNFFKTEITLANGEIRKRPLIETNGETGEIVWDKGRDFATVRKVLSMPQVNIVKKTEVQTGGFSKESILPKRNSDKLIARKKDWDPKKYGGFDSPTVAYSVLVVAKVEKGKSKKLKSVKELLGITIMERSSFEKNPIDFLEAKGYKEVKKDLIIKLPKYSLFELENGRKRMLASAGELQKGNELALPSKYVNFLYLASHYEKLKGSPEDNEQKQLFVEQHKHYLDEIIEQISEFSKRVILADANLDKVLSAYNKHRDKPIREQAENIIHLFTLTNLGAPAAFKYFDTTIDRKRYTSTKEVLDATLIHQSITGLYETRIDLSQLGGDGGGSSGSSGGTLNIEDEHRLHETSKEPDVSLGSTWLSDFPQAWAETGGMGLAVRQAPLIIPLKATSTPVSIKQYPMSQEARLGIKPHIQRLLDQGILVPCQSPWNTPLLPVKKPGTNDYRPVQDLREVNKRVEDIHPTVPNPYNLLSGLPPSHQWYTVLDLKDAFFCLRLHPTSQPLFAFEWRDPEMGISGQLTWTRLPQGFKNSPTLFDEALHRDLADFRIQHPDLILLQYVDDLLLAATSELDCQQGTRALLQTLGNLGYRASAKKAQICQKQVKYLGYLLKEGQRWLTEARKETVMGQPTPKTPRQLREFLGTAGFCRLWIPGFAEMAAPLYPLTKTGTLFNWGPDQQKAYQEIKQALLTAPALGLPDLTKPFELFVDEKQGYAKGVLTQKLGPWRRPVAYLSKKLDPVAAGWPPCLRMVAAIAVLTKDAGKLTMGQPLVILAPHAVEALVKQPPDRWLSNARMTHYQALLLDTDRVQFGPVVALNPATLLPLPEEGLQHNCLDILAEAHGTRPDLTDQPLPDADHTWYTDGSSLLQEGQRKAGAAVTTETEVIWAKALPAGTSAQRAELIALTQALKMAEGKKLNVYTDSRYAFATAHIHGEIYRRRGLLTSEGKEIKNKDEILALLKALFLPKRLSIIHCPGHQKGHSAEARGNRMADQAARKAAITETPDTSTLLAGKRTADGSEFEKRTADGSEFESPKKKAKVE

SEQ ID NO: 6302 - protein, 2089 aa, synthetic construct
MPAAKRVKLDGGDKKYSIGLDIGTNSVGWAVITDEYKVPSKKFKVLGNTDRHSIKKNLIGALLFDSGETAEATRLKRTARRRYTRRKNRICYLQEIFSNEMAKVDDSFFHRLEESFLVEEDKKHERHPIFGNIVDEVAYHEKYPTIYHLRKKLVDSTDKADLRLIYLALAHMIKFRGHFLIEGDLNPDNSDVDKLFIQLVQTYNQLFEENPINASGVDAKAILSARLSKSRRLENLIAQLPGEKKNGLFGNLIALSLGLTPNFKSNFDLAEDAKLQLSKDTYDDDLDNLLAQIGDQYADLFLAAKNLSDAILLSDILRVNTEITKAPLSASMIKRYDEHHQDLTLLKALVRQQLPEKYKEIFFDQSKNGYAGYIDGGASQEEFYKFIKPILEKMDGTEELLVKLNREDLLRKQRTFDNGSIPHQIHLGELHAILRRQEDFYPFLKDNREKIEKILTFRIPYYVGPLARGNSRFAWMTRKSEETITPWNFEEVVDKGASAQSFIERMTNFDKNLPNEKVLPKHSLLYEYFTVYNELTKVKYVTEGMRKPAFLSGEQKKAIVDLLFKTNRKVTVKQLKEDYFKKIECFDSVEISGVEDRFNASLGTYHDLLKIIKDKDFLDNEENEDILEDIVLTLTLFEDREMIEERLKTYAHLFDDKVMKQLKRRRYTGWGRLSRKLINGIRDKQSGKTILDFLKSDGFANRNFMQLIHDDSLTFKEDIQKAQVSGQGDSLHEHIANLAGSPAIKKGILQTVKVVDELVKVMGRHKPENIVIEMARENQTTQKGQKNSRERMKRIEEGIKELGSQILKEHPVENTQLQNEKLYLYYLQNGRDMYVDQELDINRLSDYDVDHIVPQSFLKDDSIDNKVLTRSDKARGKSDNVPSEEVVKKMKNYWRQLLNAKLITQRKFDNLTKAERGGLSELDKAGFIKRQLVETRQITKHVAQILDSRMNTKYDENDKLIREVKVITLKSKLVSDFRKDFQFYKVREINNYHHAHDAYLNAVVGTALIKKYPKLESEFVYGDYKVYDVRKMIAKSEQEIGKATAKYFFYSNIMNFFKTEITLANGEIRKRPLIETNGETGEIVWDKGRDFATVRKVLSMPQVNIVKKTEVQTGGFSKESILPKRNSDKLIARKKDWDPKKYGGFDSPTVAYSVLVVAKVEKGKSKKLKSVKELLGITIMERSSFEKNPIDFLEAKGYKEVKKDLIIKLPKYSLFELENGRKRMLASAGELQKGNELALPSKYVNFLYLASHYEKLKGSPEDNEQKQLFVEQHKHYLDEIIEQISEFSKRVILADANLDKVLSAYNKHRDKPIREQAENIIHLFTLTNLGAPAAFKYFDTTIDRKRYTSTKEVLDATLIHQSITGLYETRIDLSQLGGDGGGSSGSSGGVLNLEEEYRLHEKPVPSSIDPSWLQLFPTVWAERAGMGLANQVPPVVVELRSGASPVAVRQYPMSKEAREGIRPHIQRFLDLGVLVPCQSPWNTPLLPVKKPGTNDYRPVQDLREINKRVQDIHPTVPNPYNLLSSLPPSHTWYSVLDLKDAFFCLKLHPNSQPLFAFEWRDPEKGNTGQLTWTRLPQGFKNSPTLFNEALHRDLAPFRALNPQVVLLQYVDDLLVAAPTYRDCKEGTQKLLQELSKLGYRVSAKKAQLCQKEVTYLGYLLKEGKRWLTPARKATVMKIPPPTTPRQVREFLGTAGFCRLWIPGFASLAAPLYPLTKPSIPFIWTEEHQKAFDRIKEALLSAPALALPDLTKPFTLYVDERAGVARGVLTQTLGPWRRPVAYLSKKLDPVASGWPTCLKAVAAVALLLKDADKLTLGQNVTVIASHSLESIVRQPPDRWMTNARMTHYQSLLLNERVSFAPPAVLNPATLLPVESEATPVHRCSEILAEETGTRRDLKDQPLPGVPAWYTDGSSFIAEGKRRAGAAIVDGKRTVWASSLPEGTSAQKAELVALTQALRLAEGKDINIYTDSRYAFATAHIHGAIYKQRGWLTSAGKDIKNKEEILALLEAIHLPKRVAIIHCPGHQKGNDPVATGNRRADEAAKQAALSTRVLAETTKPAGKRTADGSEFEKRTADGSEFESPKKKAKVE

SEQ ID NO: 6303 - protein, 2091 aa, synthetic construct
MPAAKRVKLDGGDKKYSIGLDIGTNSVGWAVITDEYKVPSKKFKVLGNTDRHSIKKNLIGALLFDSGETAEATRLKRTARRRYTRRKNRICYLQEIFSNEMAKVDDSFFHRLEESFLVEEDKKHERHPIFGNIVDEVAYHEKYPTIYHLRKKLVDSTDKADLRLIYLALAHMIKFRGHFLIEGDLNPDNSDVDKLFIQLVQTYNQLFEENPINASGVDAKAILSARLSKSRRLENLIAQLPGEKKNGLFGNLIALSLGLTPNFKSNFDLAEDAKLQLSKDTYDDDLDNLLAQIGDQYADLFLAAKNLSDAILLSDILRVNTEITKAPLSASMIKRYDEHHQDLTLLKALVRQQLPEKYKEIFFDQSKNGYAGYIDGGASQEEFYKFIKPILEKMDGTEELLVKLNREDLLRKQRTFDNGSIPHQIHLGELHAILRRQEDFYPFLKDNREKIEKILTFRIPYYVGPLARGNSRFAWMTRKSEETITPWNFEEVVDKGASAQSFIERMTNFDKNLPNEKVLPKHSLLYEYFTVYNELTKVKYVTEGMRKPAFLSGEQKKAIVDLLFKTNRKVTVKQLKEDYFKKIECFDSVEISGVEDRFNASLGTYHDLLKIIKDKDFLDNEENEDILEDIVLTLTLFEDREMIEERLKTYAHLFDDKVMKQLKRRRYTGWGRLSRKLINGIRDKQSGKTILDFLKSDGFANRNFMQLIHDDSLTFKEDIQKAQVSGQGDSLHEHIANLAGSPAIKKGILQTVKVVDELVKVMGRHKPENIVIEMARENQTTQKGQKNSRERMKRIEEGIKELGSQILKEHPVENTQLQNEKLYLYYLQNGRDMYVDQELDINRLSDYDVDHIVPQSFLKDDSIDNKVLTRSDKARGKSDNVPSEEVVKKMKNYWRQLLNAKLITQRKFDNLTKAERGGLSELDKAGFIKRQLVETRQITKHVAQILDSRMNTKYDENDKLIREVKVITLKSKLVSDFRKDFQFYKVREINNYHHAHDAYLNAVVGTALIKKYPKLESEFVYGDYKVYDVRKMIAKSEQEIGKATAKYFFYSNIMNFFKTEITLANGEIRKRPLIETNGETGEIVWDKGRDFATVRKVLSMPQVNIVKKTEVQTGGFSKESILPKRNSDKLIARKKDWDPKKYGGFDSPTVAYSVLVVAKVEKGKSKKLKSVKELLGITIMERSSFEKNPIDFLEAKGYKEVKKDLIIKLPKYSLFELENGRKRMLASAGELQKGNELALPSKYVNFLYLASHYEKLKGSPEDNEQKQLFVEQHKHYLDEIIEQISEFSKRVILADANLDKVLSAYNKHRDKPIREQAENIIHLFTLTNLGAPAAFKYFDTTIDRKRYTSTKEVLDATLIHQSITGLYETRIDLSQLGGDGGGSSGSSGGTLNIEDEYRLHETSKEPDVPLGSTWLSDFPQAWAETGGMGLAVRQAPLIIPLKATSTPVSIKQYPMSQEARLGIKPHIQRLLDQGILVPCQSPWNTPLLPVKKPGTNDYRPVQDLREVNKRVEDIHPTVPNPYNLLSGLPPSHQWYTVLDLKDAFFCLRLHPTSQPLFAFEWRDPEMGISGQLTWTRLPQGFKNSPTLFNEALHRDLADFRIQHPDLILLQYVDDLLLAATSEQDCQRGTRALLQTLGNLGYRASAKKAQICQKQVKYLGYLLKEGQRWLTEARKETVMGQPTPKTPRQLREFLGTAGFCRLWIPGFAEMAAPLYPLTKPGTLFNWGPDQQKAYQEIKQALLTAPALGLPDLTKPFELFVDEKQGYAKGVLTQKLGPWRRPVAYLSKKLDPVAAGWPPCLRMVAAIAVLTKDAGKLTMGQPLVILAPHAVEALVKQPPDRWLSNARMTHYQAMLLDTDRVQFGPVVALNPATLLPLPEKEAPHDCLEILAETHGTRPDLTDQPIPDADYTWYTDGSSFLQEGQRRAGAAVTTETEVIWARALPAGTSAQRAELIALTQALKMAEGKKLNVYTDSRYAFATAHVHGEIYRRRGWLTSEGREIKNKNEILALLKALFLPKRLSIIHCPGHQKGNSAEARGNRMADQAAREAAMKAVLETSTLLAGKRTADGSEFEKRTADGSEFESPKKKAKVE

SEQ ID NO: 6304 - protein, 2096 aa, synthetic construct
MPAAKRVKLDGGDKKYSIGLDIGTNSVGWAVITDEYKVPSKKFKVLGNTDRHSIKKNLIGALLFDSGETAEATRLKRTARRRYTRRKNRICYLQEIFSNEMAKVDDSFFHRLEESFLVEEDKKHERHPIFGNIVDEVAYHEKYPTIYHLRKKLVDSTDKADLRLIYLALAHMIKFRGHFLIEGDLNPDNSDVDKLFIQLVQTYNQLFEENPINASGVDAKAILSARLSKSRRLENLIAQLPGEKKNGLFGNLIALSLGLTPNFKSNFDLAEDAKLQLSKDTYDDDLDNLLAQIGDQYADLFLAAKNLSDAILLSDILRVNTEITKAPLSASMIKRYDEHHQDLTLLKALVRQQLPEKYKEIFFDQSKNGYAGYIDGGASQEEFYKFIKPILEKMDGTEELLVKLNREDLLRKQRTFDNGSIPHQIHLGELHAILRRQEDFYPFLKDNREKIEKILTFRIPYYVGPLARGNSRFAWMTRKSEETITPWNFEEVVDKGASAQSFIERMTNFDKNLPNEKVLPKHSLLYEYFTVYNELTKVKYVTEGMRKPAFLSGEQKKAIVDLLFKTNRKVTVKQLKEDYFKKIECFDSVEISGVEDRFNASLGTYHDLLKIIKDKDFLDNEENEDILEDIVLTLTLFEDREMIEERLKTYAHLFDDKVMKQLKRRRYTGWGRLSRKLINGIRDKQSGKTILDFLKSDGFANRNFMQLIHDDSLTFKEDIQKAQVSGQGDSLHEHIANLAGSPAIKKGILQTVKVVDELVKVMGRHKPENIVIEMARENQTTQKGQKNSRERMKRIEEGIKELGSQILKEHPVENTQLQNEKLYLYYLQNGRDMYVDQELDINRLSDYDVDHIVPQSFLKDDSIDNKVLTRSDKARGKSDNVPSEEVVKKMKNYWRQLLNAKLITQRKFDNLTKAERGGLSELDKAGFIKRQLVETRQITKHVAQILDSRMNTKYDENDKLIREVKVITLKSKLVSDFRKDFQFYKVREINNYHHAHDAYLNAVVGTALIKKYPKLESEFVYGDYKVYDVRKMIAKSEQEIGKATAKYFFYSNIMNFFKTEITLANGEIRKRPLIETNGETGEIVWDKGRDFATVRKVLSMPQVNIVKKTEVQTGGFSKESILPKRNSDKLIARKKDWDPKKYGGFDSPTVAYSVLVVAKVEKGKSKKLKSVKELLGITIMERSSFEKNPIDFLEAKGYKEVKKDLIIKLPKYSLFELENGRKRMLASAGELQKGNELALPSKYVNFLYLASHYEKLKGSPEDNEQKQLFVEQHKHYLDEIIEQISEFSKRVILADANLDKVLSAYNKHRDKPIREQAENIIHLFTLTNLGAPAAFKYFDTTIDRKRYTSTKEVLDATLIHQSITGLYETRIDLSQLGGDGGGSSGSSGSSGGTAPLEEEYRLFLEAPIQNVTLLEQWKREIPKVWAEINPPGLASTQAPIHVQLLSTALPVRVRQYPITLEAKRSLRETIRKFRAAGILRPVHSPWNTPLLPVRKSGTSEYRMVQDLREVNKRVETIHPTVPNPYTLLSLLPPDRIWYSVLDLKDAFFCIPLAPESQLIFAFEWADAEEGESGQLTWTRLPQGFKNSPTLFNEALNRDLQGFRLDHPSVSLLQYVDDLLIAADTQAACLSATRDLLMTLAELGYRVSGKKAQLCQEEVTYLGFKIHKGSRSLSNSRTQAILQIPVPKTKRQVREFLGTIGYCRLWIPGFAELAQPLYAATRPGNDPLVWGEKEEEAFQSLKLALTQPPALALPSLDKPFQLFVEETSGAAKGVLTQALGPWKRPVAYLSKRLDPVAAGWPRCLRAIAAAALLTREASKLTFGQDIEITSSHNLESLLRSPPDKWLTNARITQYQVLLLDPPRVRFKQTAALNPATLLPETDDTLPIHHCLDTLDSLTSTRPDLTDQPLAQAEATLFTDGSSYIRDGKRYAGAAVVTLDSVIWAEPLPIGTSAQKAELIALTKALEWSKDKSVNIYTDSRYAFATLHVHGMIYRERGWLTAGGKAIKNAPEILALLTAVWLPKRVAVMHCKGHQKDDAPTSTGNRRADEVAREVAIRPLSTQATISAGKRTADGSEFEKRTADGSEFESPKKKAKVE

SEQ ID NO: 6305 - protein, 2096 aa, synthetic construct
MPAAKRVKLDGGDKKYSIGLDIGTNSVGWAVITDEYKVPSKKFKVLGNTDRHSIKKNLIGALLFDSGETAEATRLKRTARRRYTRRKNRICYLQEIFSNEMAKVDDSFFHRLEESFLVEEDKKHERHPIFGNIVDEVAYHEKYPTIYHLRKKLVDSTDKADLRLIYLALAHMIKFRGHFLIEGDLNPDNSDVDKLFIQLVQTYNQLFEENPINASGVDAKAILSARLSKSRRLENLIAQLPGEKKNGLFGNLIALSLGLTPNFKSNFDLAEDAKLQLSKDTYDDDLDNLLAQIGDQYADLFLAAKNLSDAILLSDILRVNTEITKAPLSASMIKRYDEHHQDLTLLKALVRQQLPEKYKEIFFDQSKNGYAGYIDGGASQEEFYKFIKPILEKMDGTEELLVKLNREDLLRKQRTFDNGSIPHQIHLGELHAILRRQEDFYPFLKDNREKIEKILTFRIPYYVGPLARGNSRFAWMTRKSEETITPWNFEEVVDKGASAQSFIERMTNFDKNLPNEKVLPKHSLLYEYFTVYNELTKVKYVTEGMRKPAFLSGEQKKAIVDLLFKTNRKVTVKQLKEDYFKKIECFDSVEISGVEDRFNASLGTYHDLLKIIKDKDFLDNEENEDILEDIVLTLTLFEDREMIEERLKTYAHLFDDKVMKQLKRRRYTGWGRLSRKLINGIRDKQSGKTILDFLKSDGFANRNFMQLIHDDSLTFKEDIQKAQVSGQGDSLHEHIANLAGSPAIKKGILQTVKVVDELVKVMGRHKPENIVIEMARENQTTQKGQKNSRERMKRIEEGIKELGSQILKEHPVENTQLQNEKLYLYYLQNGRDMYVDQELDINRLSDYDVDHIVPQSFLKDDSIDNKVLTRSDKARGKSDNVPSEEVVKKMKNYWRQLLNAKLITQRKFDNLTKAERGGLSELDKAGFIKRQLVETRQITKHVAQILDSRMNTKYDENDKLIREVKVITLKSKLVSDFRKDFQFYKVREINNYHHAHDAYLNAVVGTALIKKYPKLESEFVYGDYKVYDVRKMIAKSEQEIGKATAKYFFYSNIMNFFKTEITLANGEIRKRPLIETNGETGEIVWDKGRDFATVRKVLSMPQVNIVKKTEVQTGGFSKESILPKRNSDKLIARKKDWDPKKYGGFDSPTVAYSVLVVAKVEKGKSKKLKSVKELLGITIMERSSFEKNPIDFLEAKGYKEVKKDLIIKLPKYSLFELENGRKRMLASAGELQKGNELALPSKYVNFLYLASHYEKLKGSPEDNEQKQLFVEQHKHYLDEIIEQISEFSKRVILADANLDKVLSAYNKHRDKPIREQAENIIHLFTLTNLGAPAAFKYFDTTIDRKRYTSTKEVLDATLIHQSITGLYETRIDLSQLGGDGGGSSGSSGSSGGTAPLEEEYRLFLEAPIQNVTLLEQWKREIPKVWAEINPPGLASTQAPIHVQLLSTALPVRVRQYPITLEAKRSLRETIRKFRAAGILRPVHSPWNTPLLPVRKSGTSEYRMVQDLREVNKRVETIHPTVPNPYTLLSLLPPDRIWYSVLDLKDAFFCIPLAPESQLIFAFEWADAEEGESGQLTWTRLPQGFKNSPTLFNEALNRDLQGFRLDHPSVSLLQYVDDLLIAADTQAACLSATRDLLMTLAELGYRVSGKKAQLCQEEVTYLGFKIHKGSRSLSNSRTQAILQIPVPKTKRQVREFLGKIGYCRLFIPGFAELAQPLYAATRPGNDPLVWGEKEEEAFQSLKLALTQPPALALPSLDKPFQLFVEETSGAAKGVLTQALGPWKRPVAYLSKRLDPVAAGWPRCLRAIAAAALLTREASKLTFGQDIEITSSHNLESLLRSPPDKWLTNARITQYQVLLLDPPRVRFKQTAALNPATLLPETDDTLPIHHCLDTLDSLTSTRPDLTDQPLAQAEATLFTDGSSYIRDGKRYAGAAVVTLDSVIWAEPLPIGTSAQKAELIALTKALEWSKDKSVNIYTDSRYAFATLHVHGMIYRERGWLTAGGKAIKNAPEILALLTAVWLPKRVAVMHCKGHQKDDAPTSTGNRRADEVAREVAIRPLSTQATISAGKRTADGSEFEKRTADGSEFESPKKKAKVE

SEQ ID NO: 6306 - protein, 2085 aa, synthetic construct
MPAAKRVKLDGGDKKYSIGLDIGTNSVGWAVITDEYKVPSKKFKVLGNTDRHSIKKNLIGALLFDSGETAEATRLKRTARRRYTRRKNRICYLQEIFSNEMAKVDDSFFHRLEESFLVEEDKKHERHPIFGNIVDEVAYHEKYPTIYHLRKKLVDSTDKADLRLIYLALAHMIKFRGHFLIEGDLNPDNSDVDKLFIQLVQTYNQLFEENPINASGVDAKAILSARLSKSRRLENLIAQLPGEKKNGLFGNLIALSLGLTPNFKSNFDLAEDAKLQLSKDTYDDDLDNLLAQIGDQYADLFLAAKNLSDAILLSDILRVNTEITKAPLSASMIKRYDEHHQDLTLLKALVRQQLPEKYKEIFFDQSKNGYAGYIDGGASQEEFYKFIKPILEKMDGTEELLVKLNREDLLRKQRTFDNGSIPHQIHLGELHAILRRQEDFYPFLKDNREKIEKILTFRIPYYVGPLARGNSRFAWMTRKSEETITPWNFEEVVDKGASAQSFIERMTNFDKNLPNEKVLPKHSLLYEYFTVYNELTKVKYVTEGMRKPAFLSGEQKKAIVDLLFKTNRKVTVKQLKEDYFKKIECFDSVEISGVEDRFNASLGTYHDLLKIIKDKDFLDNEENEDILEDIVLTLTLFEDREMIEERLKTYAHLFDDKVMKQLKRRRYTGWGRLSRKLINGIRDKQSGKTILDFLKSDGFANRNFMQLIHDDSLTFKEDIQKAQVSGQGDSLHEHIANLAGSPAIKKGILQTVKVVDELVKVMGRHKPENIVIEMARENQTTQKGQKNSRERMKRIEEGIKELGSQILKEHPVENTQLQNEKLYLYYLQNGRDMYVDQELDINRLSDYDVDHIVPQSFLKDDSIDNKVLTRSDKARGKSDNVPSEEVVKKMKNYWRQLLNAKLITQRKFDNLTKAERGGLSELDKAGFIKRQLVETRQITKHVAQILDSRMNTKYDENDKLIREVKVITLKSKLVSDFRKDFQFYKVREINNYHHAHDAYLNAVVGTALIKKYPKLESEFVYGDYKVYDVRKMIAKSEQEIGKATAKYFFYSNIMNFFKTEITLANGEIRKRPLIETNGETGEIVWDKGRDFATVRKVLSMPQVNIVKKTEVQTGGFSKESILPKRNSDKLIARKKDWDPKKYGGFDSPTVAYSVLVVAKVEKGKSKKLKSVKELLGITIMERSSFEKNPIDFLEAKGYKEVKKDLIIKLPKYSLFELENGRKRMLASAGELQKGNELALPSKYVNFLYLASHYEKLKGSPEDNEQKQLFVEQHKHYLDEIIEQISEFSKRVILADANLDKVLSAYNKHRDKPIREQAENIIHLFTLTNLGAPAAFKYFDTTIDRKRYTSTKEVLDATLIHQSITGLYETRIDLSQLGGDGGGSSGSSGSSGGVPWILKKPLELTIKLDLEEQQGTLLNNSILSKKGKEELKQLFEKYSALWQSWENQVGHRRIRPHKIATGTVKPTPQKQYHINPKAKPDIQIVINDLLKQGVLIQKESTMNTPVYPVPKPNGRWRMVLDYRAVNKVTPLIAVQNQHSYGILGSLFKGRYKTTIDLSNGFWAHPIVPEDYWITAFTWQGKQYCWTVLPQGFLNSPGLFTGDVVDLLQGIPNVEVYVDDVYISHDSEKEHLEYLDILFNRLKEAGYIISLKKSNIANSIVDFLGFQITNEGRGLTDTFKEKLENITAPTTLKQLQSILGLLNFARNFIPDFTELIAPLYALIPKSTKNYVPWQIEHSTTLETLITKLNGAEYLQGRKGDKTLIMKVNASYTTGYIRYYNEGEKKPISYVSIVFSKTELKFTELEKLLTTVHKGLLKALDLSMGQNIHVYSPIVSMQNIQKTPQTAKKALASRWLSWLSYLEDPRIRFFYDPQMPALKDLPAVDTGKDNKKHPSNFQHIFYTDGSAITSPTKEGHLNAGMGIVYFINKDGNLQKQQEWSISLGNHTAQFAEIAAFEFALKKCLPLGGNILVVTDSNYVAKAYNEELDVWASNGFVNNRKKPLKHISKWKSVADLKRLRPDVVVTHEPGHQKLDSSPHAYGNNLADQLATQASFKVHAGKRTADGSEFEKRTADGSEFESPKKKAKVE

SEQ ID NO: 6307 - protein, 2125 aa, synthetic construct
MPAAKRVKLDGGDKKYSIGLDIGTNSVGWAVITDEYKVPSKKFKVLGNTDRHSIKKNLIGALLFDSGETAEATRLKRTARRRYTRRKNRICYLQEIFSNEMAKVDDSFFHRLEESFLVEEDKKHERHPIFGNIVDEVAYHEKYPTIYHLRKKLVDSTDKADLRLIYLALAHMIKFRGHFLIEGDLNPDNSDVDKLFIQLVQTYNQLFEENPINASGVDAKAILSARLSKSRRLENLIAQLPGEKKNGLFGNLIALSLGLTPNFKSNFDLAEDAKLQLSKDTYDDDLDNLLAQIGDQYADLFLAAKNLSDAILLSDILRVNTEITKAPLSASMIKRYDEHHQDLTLLKALVRQQLPEKYKEIFFDQSKNGYAGYIDGGASQEEFYKFIKPILEKMDGTEELLVKLNREDLLRKQRTFDNGSIPHQIHLGELHAILRRQEDFYPFLKDNREKIEKILTFRIPYYVGPLARGNSRFAWMTRKSEETITPWNFEEVVDKGASAQSFIERMTNFDKNLPNEKVLPKHSLLYEYFTVYNELTKVKYVTEGMRKPAFLSGEQKKAIVDLLFKTNRKVTVKQLKEDYFKKIECFDSVEISGVEDRFNASLGTYHDLLKIIKDKDFLDNEENEDILEDIVLTLTLFEDREMIEERLKTYAHLFDDKVMKQLKRRRYTGWGRLSRKLINGIRDKQSGKTILDFLKSDGFANRNFMQLIHDDSLTFKEDIQKAQVSGQGDSLHEHIANLAGSPAIKKGILQTVKVVDELVKVMGRHKPENIVIEMARENQTTQKGQKNSRERMKRIEEGIKELGSQILKEHPVENTQLQNEKLYLYYLQNGRDMYVDQELDINRLSDYDVDHIVPQSFLKDDSIDNKVLTRSDKARGKSDNVPSEEVVKKMKNYWRQLLNAKLITQRKFDNLTKAERGGLSELDKAGFIKRQLVETRQITKHVAQILDSRMNTKYDENDKLIREVKVITLKSKLVSDFRKDFQFYKVREINNYHHAHDAYLNAVVGTALIKKYPKLESEFVYGDYKVYDVRKMIAKSEQEIGKATAKYFFYSNIMNFFKTEITLANGEIRKRPLIETNGETGEIVWDKGRDFATVRKVLSMPQVNIVKKTEVQTGGFSKESILPKRNSDKLIARKKDWDPKKYGGFDSPTVAYSVLVVAKVEKGKSKKLKSVKELLGITIMERSSFEKNPIDFLEAKGYKEVKKDLIIKLPKYSLFELENGRKRMLASAGELQKGNELALPSKYVNFLYLASHYEKLKGSPEDNEQKQLFVEQHKHYLDEIIEQISEFSKRVILADANLDKVLSAYNKHRDKPIREQAENIIHLFTLTNLGAPAAFKYFDTTIDRKRYTSTKEVLDATLIHQSITGLYETRIDLSQLGGDGGGSSGSSGSSGGLLGRDLLTKLKAQIQFSTEGPQVTWEDRPAMCLVLNLEEEYRLHEKPVPPSIDPSWLQLFPMVWAEKAGMGLANQVPPVVVELKSDASPVAVRQYPMSKEAREGIRPHIQRFLDLGILVPCQSPWNTPLLPVKKPGTNDYRPVQDLREVNKRVQDIHPTVPNPYNLLSSLPPSHTWYSVLDLKDAFFCLKLHPNSQPLFAFEWRDPEKGNTGQLTWTRLPQGFKNSPTLFNEALHRDLASFRALNPQVVMLQYVDDLLVAAPTYRDCKEGTRRLLQELSKLGYRVSAKKAQLCREEVTYLGYLLKGGKRWLTPARKATVMKIPTPTTPRQVREFLGTAGFCRLWIPGFASLAAPLYPLTRPKVPFTWTEAHQEAFGRIKEALLSAPALALPDLTKPFALYVDEKEGVARGVLTQTLGPWRRPVAYLSKKLDPVASGWPTCLKAIAAVALLLKDADKLTLGQNVLVIAPHNLESIVRQPPDRWMTNARMTHYQSLLLNERVSFAPPAILNPATLLPVESDDTPIHICSEILAEETGTRPDLRDQPLPGVPAWYTDGSSFIMDGRRQAGAAIVDNKRTVWASNLPEGTSAQKAELIALTQALRLAEGKSINIYTDSRYAFATAHVHGAIYKQRGWLTSAGKDIKNKEEILALLEAIHLPKRVAIIHCPGHQRGTDPVATGNRKADEAAKQAAQSTRILTETTKNAGKRTADGSEFEKRTADGSEFESPKKKAKVE

SEQ ID NO: 6308 - protein, 2094 aa, synthetic construct
MPAAKRVKLDGGDKKYSIGLDIGTNSVGWAVITDEYKVPSKKFKVLGNTDRHSIKKNLIGALLFDSGETAEATRLKRTARRRYTRRKNRICYLQEIFSNEMAKVDDSFFHRLEESFLVEEDKKHERHPIFGNIVDEVAYHEKYPTIYHLRKKLVDSTDKADLRLIYLALAHMIKFRGHFLIEGDLNPDNSDVDKLFIQLVQTYNQLFEENPINASGVDAKAILSARLSKSRRLENLIAQLPGEKKNGLFGNLIALSLGLTPNFKSNFDLAEDAKLQLSKDTYDDDLDNLLAQIGDQYADLFLAAKNLSDAILLSDILRVNTEITKAPLSASMIKRYDEHHQDLTLLKALVRQQLPEKYKEIFFDQSKNGYAGYIDGGASQEEFYKFIKPILEKMDGTEELLVKLNREDLLRKQRTFDNGSIPHQIHLGELHAILRRQEDFYPFLKDNREKIEKILTFRIPYYVGPLARGNSRFAWMTRKSEETITPWNFEEVVDKGASAQSFIERMTNFDKNLPNEKVLPKHSLLYEYFTVYNELTKVKYVTEGMRKPAFLSGEQKKAIVDLLFKTNRKVTVKQLKEDYFKKIECFDSVEISGVEDRFNASLGTYHDLLKIIKDKDFLDNEENEDILEDIVLTLTLFEDREMIEERLKTYAHLFDDKVMKQLKRRRYTGWGRLSRKLINGIRDKQSGKTILDFLKSDGFANRNFMQLIHDDSLTFKEDIQKAQVSGQGDSLHEHIANLAGSPAIKKGILQTVKVVDELVKVMGRHKPENIVIEMARENQTTQKGQKNSRERMKRIEEGIKELGSQILKEHPVENTQLQNEKLYLYYLQNGRDMYVDQELDINRLSDYDVDHIVPQSFLKDDSIDNKVLTRSDKARGKSDNVPSEEVVKKMKNYWRQLLNAKLITQRKFDNLTKAERGGLSELDKAGFIKRQLVETRQITKHVAQILDSRMNTKYDENDKLIREVKVITLKSKLVSDFRKDFQFYKVREINNYHHAHDAYLNAVVGTALIKKYPKLESEFVYGDYKVYDVRKMIAKSEQEIGKATAKYFFYSNIMNFFKTEITLANGEIRKRPLIETNGETGEIVWDKGRDFATVRKVLSMPQVNIVKKTEVQTGGFSKESILPKRNSDKLIARKKDWDPKKYGGFDSPTVAYSVLVVAKVEKGKSKKLKSVKELLGITIMERSSFEKNPIDFLEAKGYKEVKKDLIIKLPKYSLFELENGRKRMLASAGELQKGNELALPSKYVNFLYLASHYEKLKGSPEDNEQKQLFVEQHKHYLDEIIEQISEFSKRVILADANLDKVLSAYNKHRDKPIREQAENIIHLFTLTNLGAPAAFKYFDTTIDRKRYTSTKEVLDATLIHQSITGLYETRIDLSQLGGDGGGSSGSSGSSGGTLNLEDEYRLYETSAEPEVSPGSTWLSDFPQAWAETGGMGLAVRQAPLIIPLKATSTPVSIKQYPMSQEAKLGIKPHIQRLLDQGILVPCQSPWNTPLLPVKKPGTNDYRPVQDLREVNKRVEDIHPTVPNPYNLLSGLPPSHRWYTVLDLKDAFFCLRLHPTSQPLFAFEWRDPGMGISGQLTWTRLPQGFKNSPTLFNEALHRDLADFRIQHPDLILLQYVDDILLAATSELDCQQGTRALLLTLGNLGYRASAKKAQLCQKQVKYLGYLLKEGQRWLTEARKETVMGQPTPKTPRQLREFLGTAGFCRLWIPGFAEMAAPLYPLTKPGTLFNWGPDQQKAYQEIKQALLTAPALGLPDLTKPFELFVDEKQGYAKGVLTQKLGPWRRPVAYLSKKLDPVAAGWPPCLRMVAAIAVLRKDAGKLTMGQPLVILAPHAVEALVKQPPDRWLSNARMTHYQAMLLDTDRVQFGPVVALNPATLLPLPEEGAPHDCLEILAETHGTRPDLTDQPIPDADHTWYTDGSSFLQEGQRKAGAAVTTETEVIWARALPAGTSAQRAELIALTQALKMAEGKRLNVYTDSRYAFATAHIHGEIYRRRGWLTSEGREIKNKSEILALLKALFLPKRLSIIHCLGHQKGDSAEARGNRLADQAAREAAIKTPPDTSTLLAGKRTADGSEFEKRTADGSEFESPKKKAKVE

SEQ ID NO: 6309 - protein, 2094 aa, synthetic construct
MPAAKRVKLDGGDKKYSIGLDIGTNSVGWAVITDEYKVPSKKFKVLGNTDRHSIKKNLIGALLFDSGETAEATRLKRTARRRYTRRKNRICYLQEIFSNEMAKVDDSFFHRLEESFLVEEDKKHERHPIFGNIVDEVAYHEKYPTIYHLRKKLVDSTDKADLRLIYLALAHMIKFRGHFLIEGDLNPDNSDVDKLFIQLVQTYNQLFEENPINASGVDAKAILSARLSKSRRLENLIAQLPGEKKNGLFGNLIALSLGLTPNFKSNFDLAEDAKLQLSKDTYDDDLDNLLAQIGDQYADLFLAAKNLSDAILLSDILRVNTEITKAPLSASMIKRYDEHHQDLTLLKALVRQQLPEKYKEIFFDQSKNGYAGYIDGGASQEEFYKFIKPILEKMDGTEELLVKLNREDLLRKQRTFDNGSIPHQIHLGELHAILRRQEDFYPFLKDNREKIEKILTFRIPYYVGPLARGNSRFAWMTRKSEETITPWNFEEVVDKGASAQSFIERMTNFDKNLPNEKVLPKHSLLYEYFTVYNELTKVKYVTEGMRKPAFLSGEQKKAIVDLLFKTNRKVTVKQLKEDYFKKIECFDSVEISGVEDRFNASLGTYHDLLKIIKDKDFLDNEENEDILEDIVLTLTLFEDREMIEERLKTYAHLFDDKVMKQLKRRRYTGWGRLSRKLINGIRDKQSGKTILDFLKSDGFANRNFMQLIHDDSLTFKEDIQKAQVSGQGDSLHEHIANLAGSPAIKKGILQTVKVVDELVKVMGRHKPENIVIEMARENQTTQKGQKNSRERMKRIEEGIKELGSQILKEHPVENTQLQNEKLYLYYLQNGRDMYVDQELDINRLSDYDVDHIVPQSFLKDDSIDNKVLTRSDKARGKSDNVPSEEVVKKMKNYWRQLLNAKLITQRKFDNLTKAERGGLSELDKAGFIKRQLVETRQITKHVAQILDSRMNTKYDENDKLIREVKVITLKSKLVSDFRKDFQFYKVREINNYHHAHDAYLNAVVGTALIKKYPKLESEFVYGDYKVYDVRKMIAKSEQEIGKATAKYFFYSNIMNFFKTEITLANGEIRKRPLIETNGETGEIVWDKGRDFATVRKVLSMPQVNIVKKTEVQTGGFSKESILPKRNSDKLIARKKDWDPKKYGGFDSPTVAYSVLVVAKVEKGKSKKLKSVKELLGITIMERSSFEKNPIDFLEAKGYKEVKKDLIIKLPKYSLFELENGRKRMLASAGELQKGNELALPSKYVNFLYLASHYEKLKGSPEDNEQKQLFVEQHKHYLDEIIEQISEFSKRVILADANLDKVLSAYNKHRDKPIREQAENIIHLFTLTNLGAPAAFKYFDTTIDRKRYTSTKEVLDATLIHQSITGLYETRIDLSQLGGDGGGSSGSSGSSGGTLGIEDEYRLHETSTEPDVSLGSTWLSDFPQAWAETGGMGLAVRQAPLIIPLKATSTPVSIQQYPMSHEARLGIKPHIQRLLDQGILVPCQSPWNTPLLPVKKPGTNDYRPVQDLREVNKRVEDIHPTVPNPYNLLSGLPPSHQWYTVLDLKDAFFCLRLHPTSQPLFAFEWRDPGMGISGQLTWTRLPQGFKNSPTLFDEALHRDLADFRIQHPDLILLQYVDDILLAATSELDCQQGTRALLQTLGDLGYRASAKKAQICQKQVKYLGYLLREGQRWLTEARKETVMGQPVPKTPRQLREFLGTAGFCRLWIPGFAEMAAPLYPLTKTGTLFSWGPDQQKAYQEIKQALLTAPALGLPDLTKPFELFVDEKQGYAKGVLTQKLGPWRRPVAYLSKKLDPVAAGWPPCLRMVAAIAVLTKDAGKLTMGQPLVILAPHAVEALVKQPPDRWLSNARMTHYQAMLLDTDRVQFGPVVALNPATLLPLPEEGAPHDCLEILAETHGTRPDLTDQPIPDADHTWYTDGSSFLQEGQRKAGAAVTTETEVIWAGALPAGTSAQRAELIALTQALKMAEGKRLNVYTDSRYAFATAHIHGEIYRRRGLLTSEGREIKNKSEILALLKALFLPKRLSIIHCLGHQKGDSAEARGNRLADQAAREAAIKTPPDTSTLLAGKRTADGSEFEKRTADGSEFESPKKKAKVE

SEQ ID NO: 6310 - protein, 2094 aa, synthetic construct
MPAAKRVKLDGGDKKYSIGLDIGTNSVGWAVITDEYKVPSKKFKVLGNTDRHSIKKNLIGALLFDSGETAEATRLKRTARRRYTRRKNRICYLQEIFSNEMAKVDDSFFHRLEESFLVEEDKKHERHPIFGNIVDEVAYHEKYPTIYHLRKKLVDSTDKADLRLIYLALAHMIKFRGHFLIEGDLNPDNSDVDKLFIQLVQTYNQLFEENPINASGVDAKAILSARLSKSRRLENLIAQLPGEKKNGLFGNLIALSLGLTPNFKSNFDLAEDAKLQLSKDTYDDDLDNLLAQIGDQYADLFLAAKNLSDAILLSDILRVNTEITKAPLSASMIKRYDEHHQDLTLLKALVRQQLPEKYKEIFFDQSKNGYAGYIDGGASQEEFYKFIKPILEKMDGTEELLVKLNREDLLRKQRTFDNGSIPHQIHLGELHAILRRQEDFYPFLKDNREKIEKILTFRIPYYVGPLARGNSRFAWMTRKSEETITPWNFEEVVDKGASAQSFIERMTNFDKNLPNEKVLPKHSLLYEYFTVYNELTKVKYVTEGMRKPAFLSGEQKKAIVDLLFKTNRKVTVKQLKEDYFKKIECFDSVEISGVEDRFNASLGTYHDLLKIIKDKDFLDNEENEDILEDIVLTLTLFEDREMIEERLKTYAHLFDDKVMKQLKRRRYTGWGRLSRKLINGIRDKQSGKTILDFLKSDGFANRNFMQLIHDDSLTFKEDIQKAQVSGQGDSLHEHIANLAGSPAIKKGILQTVKVVDELVKVMGRHKPENIVIEMARENQTTQKGQKNSRERMKRIEEGIKELGSQILKEHPVENTQLQNEKLYLYYLQNGRDMYVDQELDINRLSDYDVDHIVPQSFLKDDSIDNKVLTRSDKARGKSDNVPSEEVVKKMKNYWRQLLNAKLITQRKFDNLTKAERGGLSELDKAGFIKRQLVETRQITKHVAQILDSRMNTKYDENDKLIREVKVITLKSKLVSDFRKDFQFYKVREINNYHHAHDAYLNAVVGTALIKKYPKLESEFVYGDYKVYDVRKMIAKSEQEIGKATAKYFFYSNIMNFFKTEITLANGEIRKRPLIETNGETGEIVWDKGRDFATVRKVLSMPQVNIVKKTEVQTGGFSKESILPKRNSDKLIARKKDWDPKKYGGFDSPTVAYSVLVVAKVEKGKSKKLKSVKELLGITIMERSSFEKNPIDFLEAKGYKEVKKDLIIKLPKYSLFELENGRKRMLASAGELQKGNELALPSKYVNFLYLASHYEKLKGSPEDNEQKQLFVEQHKHYLDEIIEQISEFSKRVILADANLDKVLSAYNKHRDKPIREQAENIIHLFTLTNLGAPAAFKYFDTTIDRKRYTSTKEVLDATLIHQSITGLYETRIDLSQLGGDGGGSSGSSGSSGGTLNIEDEYRLHETSKEPDVSLGSTWLSDFPQAWAETGGMGLAVRQAPLIIPLKATSTPVSIKQYPMSQEARLGIKPHIQRLLDQGILVPCQSPWNTPLLPVKKPGTNDYRPVQDLREVNKRVEDIHPTVPNPYNLLSGLPPSHQWYTVLDLKDAFFCLRLHPTSQPLFAFEWRDPEMGISGQLTWTRLPQGFKNSPTLFNEALHRDLAGFRIQHPDLILLQYVDDLLLAATSELDCQQGTRALLQTLGDLGYRASAKKAQICQKQVKYLGYLLKEGQRWLTEARKETVMGQPIPKTPRQLREFLGTAGFCRLWIPGFAEMAAPLYPLTKPGTLFNWGPDQQKAFQEIKQALLTAPALGLPDLTKPFELFVDEKQGYAKGVLTQKLGPWRRPVAYLSKKLDPVAAGWPPCLRMVAAIAVLTKDAGKLTMGQPLVILAPHAVEALVKQPPDRWLSNARMTHYQALLLDTDRVQFGPVVALNPATLLPLPEEGLQHDCLDILAEAHGTRSDLMDQPLPDADHTWYTDGSSFLQEGQRKAGAAVTTETEVIWARALPAGTSAQRAELIALTQALKMAEGKKLNVYTDSRYAFATAHIHGEIYRRRGWLTSEGKEIKNKDEILALLKALFLPKRLSIIHCPGHQKGNSAEARGNRMADQAAREVATRETPETSTLLAGKRTADGSEFEKRTADGSEFESPKKKAKVE

SEQ ID NO: 6311 - protein, 2094 aa, synthetic construct; identical to SEQ ID NO: 4505

SEQ ID NO: 6312 - protein, 2094 aa, synthetic construct; identical to SEQ ID NO: 4505

SEQ ID NO: 6313 - protein, 2088 aa, synthetic construct
MPAAKRVKLDGGDKKYSIGLDIGTNSVGWAVITDEYKVPSKKFKVLGNTDRHSIKKNLIGALLFDSGETAEATRLKRTARRRYTRRKNRICYLQEIFSNEMAKVDDSFFHRLEESFLVEEDKKHERHPIFGNIVDEVAYHEKYPTIYHLRKKLVDSTDKADLRLIYLALAHMIKFRGHFLIEGDLNPDNSDVDKLFIQLVQTYNQLFEENPINASGVDAKAILSARLSKSRRLENLIAQLPGEKKNGLFGNLIALSLGLTPNFKSNFDLAEDAKLQLSKDTYDDDLDNLLAQIGDQYADLFLAAKNLSDAILLSDILRVNTEITKAPLSASMIKRYDEHHQDLTLLKALVRQQLPEKYKEIFFDQSKNGYAGYIDGGASQEEFYKFIKPILEKMDGTEELLVKLNREDLLRKQRTFDNGSIPHQIHLGELHAILRRQEDFYPFLKDNREKIEKILTFRIPYYVGPLARGNSRFAWMTRKSEETITPWNFEEVVDKGASAQSFIERMTNFDKNLPNEKVLPKHSLLYEYFTVYNELTKVKYVTEGMRKPAFLSGEQKKAIVDLLFKTNRKVTVKQLKEDYFKKIECFDSVEISGVEDRFNASLGTYHDLLKIIKDKDFLDNEENEDILEDIVLTLTLFEDREMIEERLKTYAHLFDDKVMKQLKRRRYTGWGRLSRKLINGIRDKQSGKTILDFLKSDGFANRNFMQLIHDDSLTFKEDIQKAQVSGQGDSLHEHIANLAGSPAIKKGILQTVKVVDELVKVMGRHKPENIVIEMARENQTTQKGQKNSRERMKRIEEGIKELGSQILKEHPVENTQLQNEKLYLYYLQNGRDMYVDQELDINRLSDYDVDHIVPQSFLKDDSIDNKVLTRSDKARGKSDNVPSEEVVKKMKNYWRQLLNAKLITQRKFDNLTKAERGGLSELDKAGFIKRQLVETRQITKHVAQILDSRMNTKYDENDKLIREVKVITLKSKLVSDFRKDFQFYKVREINNYHHAHDAYLNAVVGTALIKKYPKLESEFVYGDYKVYDVRKMIAKSEQEIGKATAKYFFYSNIMNFFKTEITLANGEIRKRPLIETNGETGEIVWDKGRDFATVRKVLSMPQVNIVKKTEVQTGGFSKESILPKRNSDKLIARKKDWDPKKYGGFDSPTVAYSVLVVAKVEKGKSKKLKSVKELLGITIMERSSFEKNPIDFLEAKGYKEVKKDLIIKLPKYSLFELENGRKRMLASAGELQKGNELALPSKYVNFLYLASHYEKLKGSPEDNEQKQLFVEQHKHYLDEIIEQISEFSKRVILADANLDKVLSAYNKHRDKPIREQAENIIHLFTLTNLGAPAAFKYFDTTIDRKRYTSTKEVLDATLIHQSITGLYETRIDLSQLGGDGGGSSGSSGSSGGTLQLDDEYRLYSPLVKPDQNIQFWLEQFPQAWAETAGMGLAKQVPPQVIQLKASATPVSVRQYPLSKEAQEGIRPHVQRLIQQGILVPVQSPWNTPLLPVRKPGTNDYRPVQDLREVNKRVQDIHPTVPNPYNLLCALPPQRSWYTVLDLKDAFFCLRLHPTSQPLFAFEWRDPGTGRTGQLTWTRLPQGFKNSPTIFDEALHRDLANFRIQHPQVTLLQYVDDLLLAGATKQDCLEGTKALLLELSDLGYRASAKKAQICRREVTYLGYSLRDGQRWLTEARKKTVVQIPAPTTAKQVREFLGTAGFCRLWIPGFATLAAPLYPLTKEKGEFSWAPEHQKAFDAIKKALLSAPALALPDVTKPFTLYVDERKGVARGVLTQTLGPWRRPVAYLSKKLDPVASGWPVCLKAIAAVAILVKDADKLTLGQNITVIAPHALENIVRQPPDRWMTNARMTHYQSLLLTERVTFAPPAALNPATLLPEETDEPVTHDCHQLLIEETGVRKDLTDIPLTGEVLTWFTDGSSYVVEGKRMAGAAVVDGTRTIWASSLPEGTSAQKAELMALTQALRLAEGKSINIYTDSRYAFATAHVHGAIYKQRGLLTSAGREIKNKEEILSLLEALHLPKRLAIIHCPGHQKAKDPISRGNQMADRVAKQAAQGVNLLAGKRTADGSEFEKRTADGSEFESPKKKAKVE

SEQ ID NO: 6314 - protein, 2088 aa, synthetic construct; identical to SEQ ID NO: 6313

SEQ ID NO: 6315 - protein, 2099 aa, synthetic construct
MPAAKRVKLDGGDKKYSIGLDIGTNSVGWAVITDEYKVPSKKFKVLGNTDRHSIKKNLIGALLFDSGETAEATRLKRTARRRYTRRKNRICYLQEIFSNEMAKVDDSFFHRLEESFLVEEDKKHERHPIFGNIVDEVAYHEKYPTIYHLRKKLVDSTDKADLRLIYLALAHMIKFRGHFLIEGDLNPDNSDVDKLFIQLVQTYNQLFEENPINASGVDAKAILSARLSKSRRLENLIAQLPGEKKNGLFGNLIALSLGLTPNFKSNFDLAEDAKLQLSKDTYDDDLDNLLAQIGDQYADLFLAAKNLSDAILLSDILRVNTEITKAPLSASMIKRYDEHHQDLTLLKALVRQQLPEKYKEIFFDQSKNGYAGYIDGGASQEEFYKFIKPILEKMDGTEELLVKLNREDLLRKQRTFDNGSIPHQIHLGELHAILRRQEDFYPFLKDNREKIEKILTFRIPYYVGPLARGNSRFAWMTRKSEETITPWNFEEVVDKGASAQSFIERMTNFDKNLPNEKVLPKHSLLYEYFTVYNELTKVKYVTEGMRKPAFLSGEQKKAIVDLLFKTNRKVTVKQLKEDYFKKIECFDSVEISGVEDRFNASLGTYHDLLKIIKDKDFLDNEENEDILEDIVLTLTLFEDREMIEERLKTYAHLFDDKVMKQLKRRRYTGWGRLSRKLINGIRDKQSGKTILDFLKSDGFANRNFMQLIHDDSLTFKEDIQKAQVSGQGDSLHEHIANLAGSPAIKKGILQTVKVVDELVKVMGRHKPENIVIEMARENQTTQKGQKNSRERMKRIEEGIKELGSQILKEHPVENTQLQNEKLYLYYLQNGRDMYVDQELDINRLSDYDVDHIVPQSFLKDDSIDNKVLTRSDKARGKSDNVPSEEVVKKMKNYWRQLLNAKLITQRKFDNLTKAERGGLSELDKAGFIKRQLVETRQITKHVAQILDSRMNTKYDENDKLIREVKVITLKSKLVSDFRKDFQFYKVREINNYHHAHDAYLNAVVGTALIKKYPKLESEFVYGDYKVYDVRKMIAKSEQEIGKATAKYFFYSNIMNFFKTEITLANGEIRKRPLIETNGETGEIVWDKGRDFATVRKVLSMPQVNIVKKTEVQTGGFSKESILPKRNSDKLIARKKDWDPKKYGGFDSPTVAYSVLVVAKVEKGKSKKLKSVKELLGITIMERSSFEKNPIDFLEAKGYKEVKKDLIIKLPKYSLFELENGRKRMLASAGELQKGNELALPSKYVNFLYLASHYEKLKGSPEDNEQKQLFVEQHKHYLDEIIEQISEFSKRVILADANLDKVLSAYNKHRDKPIREQAENIIHLFTLTNLGAPAAFKYFDTTIDRKRYTSTKEVLDATLIHQSITGLYETRIDLSQLGGDGGGSSGSSGSSGSSGGTAPLEEEYRLFLEAPIQNVTLLEQWKREIPKVWAEINPPGLASTQAPIHVQLLSTALPVRVRQYPITLEAKRSLRETIRKFRAAGILRPVHSPWNTPLLPVRKSGTSEYRMVQDLREVNKRVETIHPTVPNPYTLLSLLPPDRIWYSVLDLKDAFFCIPLAPESQLIFAFEWADAEEGESGQLTWTRLPQGFKNSPTLFDEALNRDLQGFRLDHPSVSLLQYVDDLLIAADTQAACLSATRDLLMTLAELGYRVSGKKAQLCQEEVTYLGFKIHKGSRSLSNSRTQAILQIPVPKTKRQVREFLGTIGYCRLWIPGFAELAQPLYAATRGGNDPLVWGEKEEEAFQSLKLALTQPPALALPSLDKPFQLFVEETSGAAKGVLTQALGPWKRPVAYLSKRLDPVAAGWPRCLRAIAAAALLTREASKLTFGQDIEITSSHNLESLLRSPPDKWLTNARITQYQVLLLDPPRVRFKQTAALNPATLLPETDDTLPIHHCLDTLDSLTSTRPDLTDQPLAQAEATLFTDGSSYIRDGKRYAGAAVVTLDSVIWAEPLPIGTSAQKAELIALTKALEWSKDKSVNIYTDSRYAFATLHVHGMIYRERGLLTAGGKAIKNAPEILALLTAVWLPKRVAVMHCKGHQKDDAPTSTGNRRADEVAREVAIRPLSTQATISAGKRTADGSEFEKRTADGSEFESPKKKAKVE

SEQ ID NO: 6316 - protein, 2099 aa, synthetic construct
MPAAKRVKLDGGDKKYSIGLDIGTNSVGWAVITDEYKVPSKKFKVLGNTDRHSIKKNLIGALLFDSGETAEATRLKRTARRRYTRRKNRICYLQEIFSNEMAKVDDSFFHRLEESFLVEEDKKHERHPIFGNIVDEVAYHEKYPTIYHLRKKLVDSTDKADLRLIYLALAHMIKFRGHFLIEGDLNPDNSDVDKLFIQLVQTYNQLFEENPINASGVDAKAILSARLSKSRRLENLIAQLPGEKKNGLFGNLIALSLGLTPNFKSNFDLAEDAKLQLSKDTYDDDLDNLLAQIGDQYADLFLAAKNLSDAILLSDILRVNTEITKAPLSASMIKRYDEHHQDLTLLKALVRQQLPEKYKEIFFDQSKNGYAGYIDGGASQEEFYKFIKPILEKMDGTEELLVKLNREDLLRKQRTFDNGSIPHQIHLGELHAILRRQEDFYPFLKDNREKIEKILTFRIPYYVGPLARGNSRFAWMTRKSEETITPWNFEEVVDKGASAQSFIERMTNFDKNLPNEKVLPKHSLLYEYFTVYNELTKVKYVTEGMRKPAFLSGEQKKAIVDLLFKTNRKVTVKQLKEDYFKKIECFDSVEISGVEDRFNASLGTYHDLLKIIKDKDFLDNEENEDILEDIVLTLTLFEDREMIEERLKTYAHLFDDKVMKQLKRRRYTGWGRLSRKLINGIRDKQSGKTILDFLKSDGFANRNFMQLIHDDSLTFKEDIQKAQVSGQGDSLHEHIANLAGSPAIKKGILQTVKVVDELVKVMGRHKPENIVIEMARENQTTQKGQKNSRERMKRIEEGIKELGSQILKEHPVENTQLQNEKLYLYYLQNGRDMYVDQELDINRLSDYDVDHIVPQSFLKDDSIDNKVLTRSDKARGKSDNVPSEEVVKKMKNYWRQLLNAKLITQRKFDNLTKAERGGLSELDKAGFIKRQLVETRQITKHVAQILDSRMNTKYDENDKLIREVKVITLKSKLVSDFRKDFQFYKVREINNYHHAHDAYLNAVVGTALIKKYPKLESEFVYGDYKVYDVRKMIAKSEQEIGKATAKYFFYSNIMNFFKTEITLANGEIRKRPLIETNGETGEIVWDKGRDFATVRKVLSMPQVNIVKKTEVQTGGFSKESILPKRNSDKLIARKKDWDPKKYGGFDSPTVAYSVLVVAKVEKGKSKKLKSVKELLGITIMERSSFEKNPIDFLEAKGYKEVKKDLIIKLPKYSLFELENGRKRMLASAGELQKGNELALPSKYVNFLYLASHYEKLKGSPEDNEQKQLFVEQHKHYLDEIIEQISEFSKRVILADANLDKVLSAYNKHRDKPIREQAENIIHLFTLTNLGAPAAFKYFDTTIDRKRYTSTKEVLDATLIHQSITGLYETRIDLSQLGGDGGGSSGSSGSSGSSGGTAPLEEEYRLFLEAPIQNVTLLEQWKREIPKVWAEINPPGLASTQAPIHVQLLSTALPVRVRQYPITLEAKRSLRETIRKFRAAGILRPVHSPWNTPLLPVRKSGTSEYRMVQDLREVNKRVETIHPTVPNPYTLLSLLPPDRIWYSVLDLKDAFFCIPLAPESQLIFAFEWADAEEGESGQLTWTRLPQGFKNSPTLFNEALNRDLQGFRLDHPSVSLLQYVDDLLIAADTQAACLSATRDLLMTLAELGYRVSGKKAQLCQEEVTYLGFKIHKGSRSLSNSRTQAILQIPVPKTKRQVREFLGTIGYCRLWIPGFAELAQPLYAATRPGNDPLVWGEKEEEAFQSLKLALTQPPALALPSLDKPFQLFVEETSGAAKGVLTQALGPWKRPVAYLSKRLDPVAAGWPRCLRAIAAAALLTREASKLTFGQDIEITSSHNLESLLRSPPDKWLTNARITQYQVLLLDPPRVRFKQTAALNPATLLPETDDTLPIHHCLDTLDSLTSTRPDLTDQPLAQAEATLFTDGSSYIRDGKRYAGAAVVTLDSVIWAEPLPIGTSAQKAELIALTKALEWSKDKSVNIYTDSRYAFATLHVHGMIYRERGWLTAGGKAIKNAPEILALLTAVWLPKRVAVMHCKGHQKDDAPTSTGNRRADEVAREVAIRPLSTQATISAGKRTADGSEFEKRTADGSEFESPKKKAKVE

SEQ ID NO: 6317 - protein, 2103 aa, synthetic construct
MPAAKRVKLDGGDKKYSIGLDIGTNSVGWAVITDEYKVPSKKFKVLGNTDRHSIKKNLIGALLFDSGETAEATRLKRTARRRYTRRKNRICYLQEIFSNEMAKVDDSFFHRLEESFLVEEDKKHERHPIFGNIVDEVAYHEKYPTIYHLRKKLVDSTDKADLRLIYLALAHMIKFRGHFLIEGDLNPDNSDVDKLFIQLVQTYNQLFEENPINASGVDAKAILSARLSKSRRLENLIAQLPGEKKNGLFGNLIALSLGLTPNFKSNFDLAEDAKLQLSKDTYDDDLDNLLAQIGDQYADLFLAAKNLSDAILLSDILRVNTEITKAPLSASMIKRYDEHHQDLTLLKALVRQQLPEKYKEIFFDQSKNGYAGYIDGGASQEEFYKFIKPILEKMDGTEELLVKLNREDLLRKQRTFDNGSIPHQIHLGELHAILRRQEDFYPFLKDNREKIEKILTFRIPYYVGPLARGNSRFAWMTRKSEETITPWNFEEVVDKGASAQSFIERMTNFDKNLPNEKVLPKHSLLYEYFTVYNELTKVKYVTEGMRKPAFLSGEQKKAIVDLLFKTNRKVTVKQLKEDYFKKIECFDSVEISGVEDRFNASLGTYHDLLKIIKDKDFLDNEENEDILEDIVLTLTLFEDREMIEERLKTYAHLFDDKVMKQLKRRRYTGWGRLSRKLINGIRDKQSGKTILDFLKSDGFANRNFMQLIHDDSLTFKEDIQKAQVSGQGDSLHEHIANLAGSPAIKKGILQTVKVVDELVKVMGRHKPENIVIEMARENQTTQKGQKNSRERMKRIEEGIKELGSQILKEHPVENTQLQNEKLYLYYLQNGRDMYVDQELDINRLSDYDVDHIVPQSFLKDDSIDNKVLTRSDKARGKSDNVPSEEVVKKMKNYWRQLLNAKLITQRKFDNLTKAERGGLSELDKAGFIKRQLVETRQITKHVAQILDSRMNTKYDENDKLIREVKVITLKSKLVSDFRKDFQFYKVREINNYHHAHDAYLNAVVGTALIKKYPKLESEFVYGDYKVYDVRKMIAKSEQEIGKATAKYFFYSNIMNFFKTEITLANGEIRKRPLIETNGETGEIVWDKGRDFATVRKVLSMPQVNIVKKTEVQTGGFSKESILPKRNSDKLIARKKDWDPKKYGGFDSPTVAYSVLVVAKVEKGKSKKLKSVKELLGITIMERSSFEKNPIDFLEAKGYKEVKKDLIIKLPKYSLFELENGRKRMLASAGELQKGNELALPSKYVNFLYLASHYEKLKGSPEDNEQKQLFVEQHKHYLDEIIEQISEFSKRVILADANLDKVLSAYNKHRDKPIREQAENIIHLFTLTNLGAPAAFKYFDTTIDRKRYTSTKEVLDATLIHQSITGLYETRIDLSQLGGDGGGSSGSSGSSGSSGGTVSLQDEHRLFDIPVTTSLPDVWLQDFPQAWAETGGLGRAKCQAPIIIDLKPTAVPVSIKQYPMSLEAHMGIRQHIIKFLELGVLRPCRSPWNTPLLPVKKPGTQDYRPVQDLREINKRTVDIHPTVPNPYNLLSTLKPDYSWYTVLDLKDAFFCLPLAPQSQELFAFEWKDPERGISGQLTWTRLPQGFKNSPTLFNEALHRDLTDFRTQHPEVTLLQYVDDLLLAAPTKKACTQGTRHLLQELGEKGYRASAKKAQICQTKVTYLGYILSEGKRWLTPGRIETVARIPPPRNPREVREFLGTAGFCRLWIPGFAELAAPLYALTKPSTPFTWQTEHQLAFEALKKALLSAPALGLPDTSKPFTLFLDERQGIAKGVLTQKLGPWKRPVAYLSKKLDPVAAGWPPCLRIMAATAMLVKDSAKLTLGQPLTVITPHTLEAIVRQPPDRWITNARLTHYQALLLDTDRVQFGPPVTLNPATLLPVPENQPSPHDCRQVLAETHGTREDLKDQELPDADHTWYTDGSSYLDSGTRRAGAAVVDGHNTIWAQSLPPGTSAQKAELIALTKALELSKGKKANIYTDSRYAFATAHTHGSIYERRGWLTSEGKEIKNKAEIIALLKALFLPQEVAIIHCPGHQKGQDPVAVGNRQADRVARQAAMAEVLTLATEPDNTSHITAGKRTADGSEFEKRTADGSEFESPKKKAKVE

SEQ ID NO: 6318 - protein, 2096 aa, synthetic construct
MPAAKRVKLDGGDKKYSIGLDIGTNSVGWAVITDEYKVPSKKFKVLGNTDRHSIKKNLIGALLFDSGETAEATRLKRTARRRYTRRKNRICYLQEIFSNEMAKVDDSFFHRLEESFLVEEDKKHERHPIFGNIVDEVAYHEKYPTIYHLRKKLVDSTDKADLRLIYLALAHMIKFRGHFLIEGDLNPDNSDVDKLFIQLVQTYNQLFEENPINASGVDAKAILSARLSKSRRLENLIAQLPGEKKNGLFGNLIALSLGLTPNFKSNFDLAEDAKLQLSKDTYDDDLDNLLAQIGDQYADLFLAAKNLSDAILLSDILRVNTEITKAPLSASMIKRYDEHHQDLTLLKALVRQQLPEKYKEIFFDQSKNGYAGYIDGGASQEEFYKFIKPILEKMDGTEELLVKLNREDLLRKQRTFDNGSIPHQIHLGELHAILRRQEDFYPFLKDNREKIEKILTFRIPYYVGPLARGNSRFAWMTRKSEETITPWNFEEVVDKGASAQSFIERMTNFDKNLPNEKVLPKHSLLYEYFTVYNELTKVKYVTEGMRKPAFLSGEQKKAIVDLLFKTNRKVTVKQLKEDYFKKIECFDSVEISGVEDRFNASLGTYHDLLKIIKDKDFLDNEENEDILEDIVLTLTLFEDREMIEERLKTYAHLFDDKVMKQLKRRRYTGWGRLSRKLINGIRDKQSGKTILDFLKSDGFANRNFMQLIHDDSLTFKEDIQKAQVSGQGDSLHEHIANLAGSPAIKKGILQTVKVVDELVKVMGRHKPENIVIEMARENQTTQKGQKNSRERMKRIEEGIKELGSQILKEHPVENTQLQNEKLYLYYLQNGRDMYVDQELDINRLSDYDVDHIVPQSFLKDDSIDNKVLTRSDKARGKSDNVPSEEVVKKMKNYWRQLLNAKLITQRKFDNLTKAERGGLSELDKAGFIKRQLVETRQITKHVAQILDSRMNTKYDENDKLIREVKVITLKSKLVSDFRKDFQFYKVREINNYHHAHDAYLNAVVGTALIKKYPKLESEFVYGDYKVYDVRKMIAKSEQEIGKATAKYFFYSNIMNFFKTEITLANGEIRKRPLIETNGETGEIVWDKGRDFATVRKVLSMPQVNIVKKTEVQTGGFSKESILPKRNSDKLIARKKDWDPKKYGGFDSPTVAYSVLVVAKVEKGKSKKLKSVKELLGITIMERSSFEKNPIDFLEAKGYKEVKKDLIIKLPKYSLFELENGRKRMLASAGELQKGNELALPSKYVNFLYLASHYEKLKGSPEDNEQKQLFVEQHKHYLDEIIEQISEFSKRVILADANLDKVLSAYNKHRDKPIREQAENIIHLFTLTNLGAPAAFKYFDTTIDRKRYTSTKEVLDATLIHQSITGLYETRIDLSQLGGDGGGSSGSSGSSGSSGGTLQLEEEYRLFEPESTQKQEMDIWLKNFPQAWAETGGMGTAHCQAPVLIQLKATATPISIRQYPMPHEAYQGIKPHIRRMLDQGILKPCQSPWNTPLLPVKKPGTEDYRPVQDLREVNKRVEDIHPTVPNPYNLLSTLPPSHPWYTVLDLKDAFFCLRLHSESQLLFAFEWRDPEIGLSGQLTWTRLPQGFKNSPTLFNEALHSDLADFRVRYPALVLLQYVDDLLLAAATRTECLEGTKALLETLGNKGYRASAKKAQICLQEVTYLGYSLKDGQRWLTKARKEAILSIPVPKNSRQVREFLGTAGYCRLWIPGFAELAAPLYPLTRPGTLFQWGTEQQLAFEDIKKALLSSPALGLPDITKPFELFIDENSGFAKGVLVQKLGPWKRPVAYLSKKLDTVASGWPPCLRMVAAIAILVKDAGKLTLGQPLTILTSHPVEALVRQPPNKWLSNARMTHYQAMLLDAERVHFGPTVSLNPATLLPLPSGGNHHDCLQILAETHGTRPDLTDQPLPDADLTWYTDGSSFIRNGEREAGAAVTTESEVIWAAPLPPGTSAQRAELIALTQALKMAEGKKLTVYTDSRYAFATTHVHGEIYRRRGWLTSEGKEIKNKNEILALLEALFLPKRLSIIHCPGHQKGDSPQAKGNRLADDTAKKAATETHSSLTVLPAGKRTADGSEFEKRTADGSEFESPKKKAKVE

SEQ ID NO: 6319 - protein, 2219 aa, synthetic construct
MPAAKRVKLDGGDKKYSIGLDIGTNSVGWAVITDEYKVPSKKFKVLGNTDRHSIKKNLIGALLFDSGETAEATRLKRTARRRYTRRKNRICYLQEIFSNEMAKVDDSFFHRLEESFLVEEDKKHERHPIFGNIVDEVAYHEKYPTIYHLRKKLVDSTDKADLRLIYLALAHMIKFRGHFLIEGDLNPDNSDVDKLFIQLVQTYNQLFEENPINASGVDAKAILSARLSKSRRLENLIAQLPGEKKNGLFGNLIALSLGLTPNFKSNFDLAEDAKLQLSKDTYDDDLDNLLAQIGDQYADLFLAAKNLSDAILLSDILRVNTEITKAPLSASMIKRYDEHHQDLTLLKALVRQQLPEKYKEIFFDQSKNGYAGYIDGGASQEEFYKFIKPILEKMDGTEELLVKLNREDLLRKQRTFDNGSIPHQIHLGELHAILRRQEDFYPFLKDNREKIEKILTFRIPYYVGPLARGNSRFAWMTRKSEETITPWNFEEVVDKGASAQSFIERMTNFDKNLPNEKVLPKHSLLYEYFTVYNELTKVKYVTEGMRKPAFLSGEQKKAIVDLLFKTNRKVTVKQLKEDYFKKIECFDSVEISGVEDRFNASLGTYHDLLKIIKDKDFLDNEENEDILEDIVLTLTLFEDREMIEERLKTYAHLFDDKVMKQLKRRRYTGWGRLSRKLINGIRDKQSGKTILDFLKSDGFANRNFMQLIHDDSLTFKEDIQKAQVSGQGDSLHEHIANLAGSPAIKKGILQTVKVVDELVKVMGRHKPENIVIEMARENQTTQKGQKNSRERMKRIEEGIKELGSQILKEHPVENTQLQNEKLYLYYLQNGRDMYVDQELDINRLSDYDVDHIVPQSFLKDDSIDNKVLTRSDKARGKSDNVPSEEVVKKMKNYWRQLLNAKLITQRKFDNLTKAERGGLSELDKAGFIKRQLVETRQITKHVAQILDSRMNTKYDENDKLIREVKVITLKSKLVSDFRKDFQFYKVREINNYHHAHDAYLNAVVGTALIKKYPKLESEFVYGDYKVYDVRKMIAKSEQEIGKATAKYFFYSNIMNFFKTEITLANGEIRKRPLIETNGETGEIVWDKGRDFATVRKVLSMPQVNIVKKTEVQTGGFSKESILPKRNSDKLIARKKDWDPKKYGGFDSPTVAYSVLVVAKVEKGKSKKLKSVKELLGITIMERSSFEKNPIDFLEAKGYKEVKKDLIIKLPKYSLFELENGRKRMLASAGELQKGNELALPSKYVNFLYLASHYEKLKGSPEDNEQKQLFVEQHKHYLDEIIEQISEFSKRVILADANLDKVLSAYNKHRDKPIREQAENIIHLFTLTNLGAPAAFKYFDTTIDRKRYTSTKEVLDATLIHQSITGLYETRIDLSQLGGDGGGSSGSSGSSGSSGGTLGDQGSRGSDPLPEPRVTLTVEGIPTEFLVNTGAEHSVLTKPMGKMGSKRTVVAGATGSKVYPWTTKRLLKIGQKQVTHSFLVIPECPAPLLGRDLLTKLKAQIQFSTEGPQVTWEDRPAMCLVLNLEEEYRLHEKPVPPSIDPSWLQLFPMVWAEKAGMGLANQVPPVVVELKSDASPVAVRQYPMSKEAREGIRPHIQRFLDLGILVPCQSPWNTPLLPVKKPGTNDYRPVQDLREVNKRVQDIHPTVPNPYNLLSSLPPSHTWYSVLDLKDAFFCLKLHPNSQPLFAFEWRDPEKGNTGQLTWTRLPQGFKNSPTLFDEALHRDLASFRALNPQVVMLQYVDDLLVAAPTYRDCKEGTRRLLQELSKLGYRVSAKKAQLCREEVTYLGYLLKGGKRWLTPARKATVMKIPTPTTPRQVREFLGTAGFCRLWIPGFASLAAPLYPLTREKVPFTWTEAHQEAFGRIKEALLSAPALALPDLTKPFALYVDEKEGVARGVLTQTLGPWRRPVAYLSKKLDPVASGWPTCLKAIAAVALLLKDADKLTLGQNVLVIAPHNLESIVRQPPDRWMTNARMTHYQSLLLNERVSFAPPAILNPATLLPVESDDTPIHICSEILAEETGTRPDLRDQPLPGVPAWYTDGSSFIMDGRRQAGAAIVDNKRTVWASNLPEGTSAQKAELIALTQALRLAEGKSINIYTDSRYAFATAHVHGAIYKQRGLLTSAGKDIKNKEEILALLEAIHLPKRVAIIHCPGHQRGTDPVATGNRKADEAAKQAAQSTRILTETTKNAGKRTADGSEFEKRTADGSEFESPKKKAKVE

SEQ ID NO: 6320 - protein, 2128 aa, synthetic construct
MPAAKRVKLDGGDKKYSIGLDIGTNSVGWAVITDEYKVPSKKFKVLGNTDRHSIKKNLIGALLFDSGETAEATRLKRTARRRYTRRKNRICYLQEIFSNEMAKVDDSFFHRLEESFLVEEDKKHERHPIFGNIVDEVAYHEKYPTIYHLRKKLVDSTDKADLRLIYLALAHMIKFRGHFLIEGDLNPDNSDVDKLFIQLVQTYNQLFEENPINASGVDAKAILSARLSKSRRLENLIAQLPGEKKNGLFGNLIALSLGLTPNFKSNFDLAEDAKLQLSKDTYDDDLDNLLAQIGDQYADLFLAAKNLSDAILLSDILRVNTEITKAPLSASMIKRYDEHHQDLTLLKALVRQQLPEKYKEIFFDQSKNGYAGYIDGGASQEEFYKFIKPILEKMDGTEELLVKLNREDLLRKQRTFDNGSIPHQIHLGELHAILRRQEDFYPFLKDNREKIEKILTFRIPYYVGPLARGNSRFAWMTRKSEETITPWNFEEVVDKGASAQSFIERMTNFDKNLPNEKVLPKHSLLYEYFTVYNELTKVKYVTEGMRKPAFLSGEQKKAIVDLLFKTNRKVTVKQLKEDYFKKIECFDSVEISGVEDRFNASLGTYHDLLKIIKDKDFLDNEENEDILEDIVLTLTLFEDREMIEERLKTYAHLFDDKVMKQLKRRRYTGWGRLSRKLINGIRDKQSGKTILDFLKSDGFANRNFMQLIHDDSLTFKEDIQKAQVSGQGDSLHEHIANLAGSPAIKKGILQTVKVVDELVKVMGRHKPENIVIEMARENQTTQKGQKNSRERMKRIEEGIKELGSQILKEHPVENTQLQNEKLYLYYLQNGRDMYVDQELDINRLSDYDVDHIVPQSFLKDDSIDNKVLTRSDKARGKSDNVPSEEVVKKMKNYWRQLLNAKLITQRKFDNLTKAERGGLSELDKAGFIKRQLVETRQITKHVAQILDSRMNTKYDENDKLIREVKVITLKSKLVSDFRKDFQFYKVREINNYHHAHDAYLNAVVGTALIKKYPKLESEFVYGDYKVYDVRKMIAKSEQEIGKATAKYFFYSNIMNFFKTEITLANGEIRKRPLIETNGETGEIVWDKGRDFATVRKVLSMPQVNIVKKTEVQTGGFSKESILPKRNSDKLIARKKDWDPKKYGGFDSPTVAYSVLVVAKVEKGKSKKLKSVKELLGITIMERSSFEKNPIDFLEAKGYKEVKKDLIIKLPKYSLFELENGRKRMLASAGELQKGNELALPSKYVNFLYLASHYEKLKGSPEDNEQKQLFVEQHKHYLDEIIEQISEFSKRVILADANLDKVLSAYNKHRDKPIREQAENIIHLFTLTNLGAPAAFKYFDTTIDRKRYTSTKEVLDATLIHQSITGLYETRIDLSQLGGDGGGSSGSSGSSGSSGGLLGRDLLTKLKAQIQFSTEGPQVTWEDRPAMCLVLNLEEEYRLHEKPVPPSIDPSWLQLFPMVWAEKAGMGLANQVPPVVVELKSDASPVAVRQYPMSKEAREGIRPHIQRFLDLGILVPCQSPWNTPLLPVKKPGTNDYRPVQDLREVNKRVQDIHPTVPNPYNLLSSLPPSHTWYSVLDLKDAFFCLKLHPNSQPLFAFEWRDPEKGNTGQLTWTRLPQGFKNSPTLFNEALHRDLASFRALNPQVVMLQYVDDLLVAAPTYRDCKEGTRRLLQELSKLGYRVSAKKAQLCREEVTYLGYLLKGGKRWLTPARKATVMKIPTPTTPRQVREFLGTAGFCRLWIPGFASLAAPLYPLTRPKVPFTWTEAHQEAFGRIKEALLSAPALALPDLTKPFALYVDEKEGVARGVLTQTLGPWRRPVAYLSKKLDPVASGWPTCLKAIAAVALLLKDADKLTLGQNVLVIAPHNLESIVRQPPDRWMTNARMTHYQSLLLNERVSFAPPAILNPATLLPVESDDTPIHICSEILAEETGTRPDLRDQPLPGVPAWYTDGSSFIMDGRRQAGAAIVDNKRTVWASNLPEGTSAQKAELIALTQALRLAEGKSINIYTDSRYAFATAHVHGAIYKQRGWLTSAGKDIKNKEEILALLEAIHLPKRVAIIHCPGHQRGTDPVATGNRKADEAAKQAAQSTRILTETTKNAGKRTADGSEFEKRTADGSEFESPKKKAKVE

SEQ ID NO: 6321 - protein, 2219 aa, synthetic construct
MPAAKRVKLDGGDKKYSIGLDIGTNSVGWAVITDEYKVPSKKFKVLGNTDRHSIKKNLIGALLFDSGETAEATRLKRTARRRYTRRKNRICYLQEIFSNEMAKVDDSFFHRLEESFLVEEDKKHERHPIFGNIVDEVAYHEKYPTIYHLRKKLVDSTDKADLRLIYLALAHMIKFRGHFLIEGDLNPDNSDVDKLFIQLVQTYNQLFEENPINASGVDAKAILSARLSKSRRLENLIAQLPGEKKNGLFGNLIALSLGLTPNFKSNFDLAEDAKLQLSKDTYDDDLDNLLAQIGDQYADLFLAAKNLSDAILLSDILRVNTEITKAPLSASMIKRYDEHHQDLTLLKALVRQQLPEKYKEIFFDQSKNGYAGYIDGGASQEEFYKFIKPILEKMDGTEELLVKLNREDLLRKQRTFDNGSIPHQIHLGELHAILRRQEDFYPFLKDNREKIEKILTFRIPYYVGPLARGNSRFAWMTRKSEETITPWNFEEVVDKGASAQSFIERMTNFDKNLPNEKVLPKHSLLYEYFTVYNELTKVKYVTEGMRKPAFLSGEQKKAIVDLLFKTNRKVTVKQLKEDYFKKIECFDSVEISGVEDRFNASLGTYHDLLKIIKDKDFLDNEENEDILEDIVLTLTLFEDREMIEERLKTYAHLFDDKVMKQLKRRRYTGWGRLSRKLINGIRDKQSGKTILDFLKSDGFANRNFMQLIHDDSLTFKEDIQKAQVSGQGDSLHEHIANLAGSPAIKKGILQTVKVVDELVKVMGRHKPENIVIEMARENQTTQKGQKNSRERMKRIEEGIKELGSQILKEHPVENTQLQNEKLYLYYLQNGRDMYVDQELDINRLSDYDVDHIVPQSFLKDDSIDNKVLTRSDKARGKSDNVPSEEVVKKMKNYWRQLLNAKLITQRKFDNLTKAERGGLSELDKAGFIKRQLVETRQITKHVAQILDSRMNTKYDENDKLIREVKVITLKSKLVSDFRKDFQFYKVREINNYHHAHDAYLNAVVGTALIKKYPKLESEFVYGDYKVYDVRKMIAKSEQEIGKATAKYFFYSNIMNFFKTEITLANGEIRKRPLIETNGETGEIVWDKGRDFATVRKVLSMPQVNIVKKTEVQTGGFSKESILPKRNSDKLIARKKDWDPKKYGGFDSPTVAYSVLVVAKVEKGKSKKLKSVKELLGITIMERSSFEKNPIDFLEAKGYKEVKKDLIIKLPKYSLFELENGRKRMLASAGELQKGNELALPSKYVNFLYLASHYEKLKGSPEDNEQKQLFVEQHKHYLDEIIEQISEFSKRVILADANLDKVLSAYNKHRDKPIREQAENIIHLFTLTNLGAPAAFKYFDTTIDRKRYTSTKEVLDATLIHQSITGLYETRIDLSQLGGDGGGSSGSSGSSGSSGGTLGDQGSRGSDPLPEPRVTLTVEGIPTEFLVNTGAEHSVLTKPMGKMGSKRTVVAGATGSKVYPWTTKRLLKIGQKQVTHSFLVIPECPAPLLGRDLLTKLKAQIQFSTEGPQVTWEDRPAMCLVLNLEEEYRLHEKPVPPSIDPSWLQLFPMVWAEKAGMGLANQVPPVVVELKSDASPVAVRQYPMSKEAREGIRPHIQRFLDLGILVPCQSPWNTPLLPVKKPGTNDYRPVQDLREVNKRVQDIHPTVPNPYNLLSSLPPSHTWYSVLDLKDAFFCLKLHPNSQPLFAFEWRDPEKGNTGQLTWTRLPQGFKNSPTLFNEALHRDLASFRALNPQVVMLQYVDDLLVAAPTYRDCKEGTRRLLQELSKLGYRVSAKKAQLCREEVTYLGYLLKGGKRWLTPARKATVMKIPTPTTPRQVREFLGKAGFCRLFIPGFASLAAPLYPLTRPKVPFTWTEAHQEAFGRIKEALLSAPALALPDLTKPFALYVDEKEGVARGVLTQTLGPWRRPVAYLSKKLDPVASGWPTCLKAIAAVALLLKDADKLTLGQNVLVIAPHNLESIVRQPPDRWMTNARMTHYQSLLLNERVSFAPPAILNPATLLPVESDDTPIHICSEILAEETGTRPDLRDQPLPGVPAWYTDGSSFIMDGRRQAGAAIVDNKRTVWASNLPEGTSAQKAELIALTQALRLAEGKSINIYTDSRYAFATAHVHGAIYKQRGWLTSAGKDIKNKEEILALLEAIHLPKRVAIIHCPGHQRGTDPVATGNRKADEAAKQAAQSTRILTETTKNAGKRTADGSEFEKRTADGSEFESPKKKAKVE

SEQ ID NO: 6322 - protein, 2097 aa, synthetic construct
MPAAKRVKLDGGDKKYSIGLDIGTNSVGWAVITDEYKVPSKKFKVLGNTDRHSIKKNLIGALLFDSGETAEATRLKRTARRRYTRRKNRICYLQEIFSNEMAKVDDSFFHRLEESFLVEEDKKHERHPIFGNIVDEVAYHEKYPTIYHLRKKLVDSTDKADLRLIYLALAHMIKFRGHFLIEGDLNPDNSDVDKLFIQLVQTYNQLFEENPINASGVDAKAILSARLSKSRRLENLIAQLPGEKKNGLFGNLIALSLGLTPNFKSNFDLAEDAKLQLSKDTYDDDLDNLLAQIGDQYADLFLAAKNLSDAILLSDILRVNTEITKAPLSASMIKRYDEHHQDLTLLKALVRQQLPEKYKEIFFDQSKNGYAGYIDGGASQEEFYKFIKPILEKMDGTEELLVKLNREDLLRKQRTFDNGSIPHQIHLGELHAILRRQEDFYPFLKDNREKIEKILTFRIPYYVGPLARGNSRFAWMTRKSEETITPWNFEEVVDKGASAQSFIERMTNFDKNLPNEKVLPKHSLLYEYFTVYNELTKVKYVTEGMRKPAFLSGEQKKAIVDLLFKTNRKVTVKQLKEDYFKKIECFDSVEISGVEDRFNASLGTYHDLLKIIKDKDFLDNEENEDILEDIVLTLTLFEDREMIEERLKTYAHLFDDKVMKQLKRRRYTGWGRLSRKLINGIRDKQSGKTILDFLKSDGFANRNFMQLIHDDSLTFKEDIQKAQVSGQGDSLHEHIANLAGSPAIKKGILQTVKVVDELVKVMGRHKPENIVIEMARENQTTQKGQKNSRERMKRIEEGIKELGSQILKEHPVENTQLQNEKLYLYYLQNGRDMYVDQELDINRLSDYDVDHIVPQSFLKDDSIDNKVLTRSDKARGKSDNVPSEEVVKKMKNYWRQLLNAKLITQRKFDNLTKAERGGLSELDKAGFIKRQLVETRQITKHVAQILDSRMNTKYDENDKLIREVKVITLKSKLVSDFRKDFQFYKVREINNYHHAHDAYLNAVVGTALIKKYPKLESEFVYGDYKVYDVRKMIAKSEQEIGKATAKYFFYSNIMNFFKTEITLANGEIRKRPLIETNGETGEIVWDKGRDFATVRKVLSMPQVNIVKKTEVQTGGFSKESILPKRNSDKLIARKKDWDPKKYGGFDSPTVAYSVLVVAKVEKGKSKKLKSVKELLGITIMERSSFEKNPIDFLEAKGYKEVKKDLIIKLPKYSLFELENGRKRMLASAGELQKGNELALPSKYVNFLYLASHYEKLKGSPEDNEQKQLFVEQHKHYLDEIIEQISEFSKRVILADANLDKVLSAYNKHRDKPIREQAENIIHLFTLTNLGAPAAFKYFDTTIDRKRYTSTKEVLDATLIHQSITGLYETRIDLSQLGGDGGGSSGSSGSSGSSGGLGIEDEYRLHETSTEPDVSLGSTWLSDFPQAWAETGGMGLAVRQAPLIIPLKATSTPVSIQQYPMSHEARLGIKPHIQRLLDQGILVPCQSPWNTPLLPVKKPGTNDYRPVQDLREVNKRVEDIHPTVPNPYNLLSGLPPSHQWYTVLDLKDAFFCLRLHPTSQPLFAFEWRDPGMGISGQLTWTRLPQGFKNSPTLFNEALHRDLADFRIQHPDLILLQYVDDILLAATSELDCQQGTRALLQTLGDLGYRASAKKAQICQKQVKYLGYLLREGQRWLTEARKETVMGQPVPKTPRQLREFLGKAGFCRLFIPGFAEMAAPLYPLTKPGTLFSWGPDQQKAYQEIKQALLTAPALGLPDLTKPFELFVDEKQGYAKGVLTQKLGPWRRPVAYLSKKLDPVAAGWPPCLRMVAAIAVLTKDAGKLTMGQPLVILAPHAVEALVKQPPDRWLSNARMTHYQAMLLDTDRVQFGPVVALNPATLLPLPEEGAPHDCLEILAETHGTRPDLTDQPIPDADHTWYTDGSSFLQEGQRKAGAAVTTETEVIWAGALPAGTSAQRAELIALTQALKMAEGKRLNVYTDSRYAFATAHIHGEIYRRRGWLTSEGREIKNKSEILALLKALFLPKRLSIIHCLGHQKGDSAEARGNRLADQAAREAAIKTPPDTSTLLIAGKRTADGSEFEKRTADGSEFESPKKKAKVE

SEQ ID NO: 6323 - protein, 2097 aa, synthetic construct
MPAAKRVKLDGGDKKYSIGLDIGTNSVGWAVITDEYKVPSKKFKVLGNTDRHSIKKNLIGALLFDSGETAEATRLKRTARRRYTRRKNRICYLQEIFSNEMAKVDDSFFHRLEESFLVEEDKKHERHPIFGNIVDEVAYHEKYPTIYHLRKKLVDSTDKADLRLIYLALAHMIKFRGHFLIEGDLNPDNSDVDKLFIQLVQTYNQLFEENPINASGVDAKAILSARLSKSRRLENLIAQLPGEKKNGLFGNLIALSLGLTPNFKSNFDLAEDAKLQLSKDTYDDDLDNLLAQIGDQYADLFLAAKNLSDAILLSDILRVNTEITKAPLSASMIKRYDEHHQDLTLLKALVRQQLPEKYKEIFFDQSKNGYAGYIDGGASQEEFYKFIKPILEKMDGTEELLVKLNREDLLRKQRTFDNGSIPHQIHLGELHAILRRQEDFYPFLKDNREKIEKILTFRIPYYVGPLARGNSRFAWMTRKSEETITPWNFEEVVDKGASAQSFIERMTNFDKNLPNEKVLPKHSLLYEYFTVYNELTKVKYVTEGMRKPAFLSGEQKKAIVDLLFKTNRKVTVKQLKEDYFKKIECFDSVEISGVEDRFNASLGTYHDLLKIIKDKDFLDNEENEDILEDIVLTLTLFEDREMIEERLKTYAHLFDDKVMKQLKRRRYTGWGRLSRKLINGIRDKQSGKTILDFLKSDGFANRNFMQLIHDDSLTFKEDIQKAQVSGQGDSLHEHIANLAGSPAIKKGILQTVKVVDELVKVMGRHKPENIVIEMARENQTTQKGQKNSRERMKRIEEGIKELGSQILKEHPVENTQLQNEKLYLYYLQNGRDMYVDQELDINRLSDYDVDHIVPQSFLKDDSIDNKVLTRSDKARGKSDNVPSEEVVKKMKNYWRQLLNAKLITQRKFDNLTKAERGGLSELDKAGFIKRQLVETRQITKHVAQILDSRMNTKYDENDKLIREVKVITLKSKLVSDFRKDFQFYKVREINNYHHAHDAYLNAVVGTALIKKYPKLESEFVYGDYKVYDVRKMIAKSEQEIGKATAKYFFYSNIMNFFKTEITLANGEIRKRPLIETNGETGEIVWDKGRDFATVRKVLSMPQVNIVKKTEVQTGGFSKESILPKRNSDKLIARKKDWDPKKYGGFDSPTVAYSVLVVAKVEKGKSKKLKSVKELLGITIMERSSFEKNPIDFLEAKGYKEVKKDLIIKLPKYSLFELENGRKRMLASAGELQKGNELALPSKYVNFLYLASHYEKLKGSPEDNEQKQLFVEQHKHYLDEIIEQISEFSKRVILADANLDKVLSAYNKHRDKPIREQAENIIHLFTLTNLGAPAAFKYFDTTIDRKRYTSTKEVLDATLIHQSITGLYETRIDLSQLGGDGGGSSGSSGSSGSSGGTLGIEDEYRLHETSTEPDVSLGSTWLSDFPQAWAETGGMGLAVRQAPLIIPLKATSTPVSIQQYPMSHEARLGIKPHIQRLLDQGILVPCQSPWNTPLLPVKKPGTNDYRPVQDLREVNKRVEDIHPTVPNPYNLLSGLPPSHQWYTVLDLKDAFFCLRLHPTSQPLFAFEWRDPGMGISGQLTWTRLPQGFKNSPTLFNEALHRDLADFRIQHPDLILLQYVDDILLAATSELDCQQGTRALLQTLGDLGYRASAKKAQICQKQVKYLGYLLREGQRWLTEARKETVMGQPVPKTPRQLREFLGTAGFCRLWIPGFAEMAAPLYPLTKPGTLFSWGPDQQKAYQEIKQALLTAPALGLPDLTKPFELFVDEKQGYAKGVLTQKLGPWRRPVAYLSKKLDPVAAGWPPCLRMVAAIAVLTKDAGKLTMGQPLVILAPHAVEALVKQPPDRWLSNARMTHYQAMLLDTDRVQFGPVVALNPATLLPLPEEGAPHDCLEILAETHGTRPDLTDQPIPDADHTWYTDGSSFLQEGQRKAGAAVTTETEVIWAGALPAGTSAQRAELIALTQALKMAEGKRLNVYTDSRYAFATAHIHGEIYRRRGWLTSEGREIKNKSEILALLKALFLPKRLSIIHCLGHQKGDSAEARGNRLADQAAREAAIKTPPDTSTLLAGKRTADGSEFEKRTADGSEFESPKKKAKVE

SEQ ID NO: 6324 - protein, 2097 aa, synthetic construct
MPAAKRVKLDGGDKKYSIGLDIGTNSVGWAVITDEYKVPSKKFKVLGNTDRHSIKKNLIGALLFDSGETAEATRLKRTARRRYTRRKNRICYLQEIFSNEMAKVDDSFFHRLEESFLVEEDKKHERHPIFGNIVDEVAYHEKYPTIYHLRKKLVDSTDKADLRLIYLALAHMIKFRGHFLIEGDLNPDNSDVDKLFIQLVQTYNQLFEENPINASGVDAKAILSARLSKSRRLENLIAQLPGEKKNGLFGNLIALSLGLTPNFKSNFDLAEDAKLQLSKDTYDDDLDNLLAQIGDQYADLFLAAKNLSDAILLSDILRVNTEITKAPLSASMIKRYDEHHQDLTLLKALVRQQLPEKYKEIFFDQSKNGYAGYIDGGASQEEFYKFIKPILEKMDGTEELLVKLNREDLLRKQRTFDNGSIPHQIHLGELHAILRRQEDFYPFLKDNREKIEKILTFRIPYYVGPLARGNSRFAWMTRKSEETITPWNFEEVVDKGASAQSFIERMTNFDKNLPNEKVLPKHSLLYEYFTVYNELTKVKYVTEGMRKPAFLSGEQKKAIVDLLFKTNRKVTVKQLKEDYFKKIECFDSVEISGVEDRFNASLGTYHDLLKIIKDKDFLDNEENEDILEDIVLTLTLFEDREMIEERLKTYAHLFDDKVMKQLKRRRYTGWGRLSRKLINGIRDKQSGKTILDFLKSDGFANRNFMQLIHDDSLTFKEDIQKAQVSGQGDSLHEHIANLAGSPAIKKGILQTVKVVDELVKVMGRHKPENIVIEMARENQTTQKGQKNSRERMKRIEEGIKELGSQILKEHPVENTQLQNEKLYLYYLQNGRDMYVDQELDINRLSDYDVDHIVPQSFLKDDSIDNKVLTRSDKARGKSDNVPSEEVVKKMKNYWRQLLNAKLITQRKFDNLTKAERGGLSELDKAGFIKRQLVETRQITKHVAQILDSRMNTKYDENDKLIREVKVITLKSKLVSDFRKDFQFYKVREINNYHHAHDAYLNAVVGTALIKKYPKLESEFVYGDYKVYDVRKMIAKSEQEIGKATAKYFFYSNIMNFFKTEITLANGEIRKRPLIETNGETGEIVWDKGRDFATVRKVLSMPQVNIVKKTEVQTGGFSKESILPKRNSDKLIARKKDWDPKKYGGFDSPTVAYSVLVVAKVEKGKSKKLKSVKELLGITIMERSSFEKNPIDFLEAKGYKEVKKDLIIKLPKYSLFELENGRKRMLASAGELQKGNELALPSKYVNFLYLASHYEKLKGSPEDNEQKQLFVEQHKHYLDEIIEQISEFSKRVILADANLDKVLSAYNKHRDKPIREQAENIIHLFTLTNLGAPAAFKYFDTTIDRKRYTSTKEVLDATLIHQSITGLYETRIDLSQLGGDGGGSSGSSGSSGSSGGTLNIEDEYRLHETSKGPDVPLGSTWLSDFPQAWAETGGMGLAVRQAPLIIPLKATSTPVSIKQYPMSQEARLGIKPHIQRLLDQGILVPCQSPWNTPLLPVKKPGTNDYRPVQDLREVNKRVEDIHPTVPNPYNLLSGLPPSHQWYTVLDLKDAFFCLRLHPTSQSLFAFEWRDPEMGISGQLTWTRLPQGFKNSPTLFNEALHRDLADFRIQHPDLILLQYVDDLLLAATSELDCQQGTRALLQTLGDLGYRASAKKAQICQKQVKYLGYLLKEGQRWLTEARKETVMGQPTPKTPRQLREFLGTAGFCRLWIPGFAEMAAPLYPLTKPGTLFEWGPDQQKAYQEIKQALLTAPALGLPDLTKPFELFVDEKQGYAKGVLTQKLGPWRRPVAYLSKKLDPVAAGWPPCLRMVAAIAVLTKDAGKLTMGQPLVILAPHAVEALVKQPPDRWLSNARMTHYQALLLDTDRVQFGPIVALNPATLLPLPEEGLQHDCLDILAEAHGTRPDLTDQPLPDADHTWYTDGSSFLQEGQRKAGAAVTTETEVVWAKALPAGTSAQRAELIALTQALKMAEGKKLNVYTDSRYAFATAHIHGEIYRRRGWLTSEGKEIKNKDEILALLKALFLPKRLSIIHCPGHQKGNRAEARGNRMADQAAREVATRETPETSTLLAGKRTADGSEFEKRTADGSEFESPKKKAKVE

SEQ ID NO: 6325 - protein, 2088 aa, synthetic construct
MPAAKRVKLDGGDKKYSIGLDIGTNSVGWAVITDEYKVPSKKFKVLGNTDRHSIKKNLIGALLFDSGETAEATRLKRTARRRYTRRKNRICYLQEIFSNEMAKVDDSFFHRLEESFLVEEDKKHERHPIFGNIVDEVAYHEKYPTIYHLRKKLVDSTDKADLRLIYLALAHMIKFRGHFLIEGDLNPDNSDVDKLFIQLVQTYNQLFEENPINASGVDAKAILSARLSKSRRLENLIAQLPGEKKNGLFGNLIALSLGLTPNFKSNFDLAEDAKLQLSKDTYDDDLDNLLAQIGDQYADLFLAAKNLSDAILLSDILRVNTEITKAPLSASMIKRYDEHHQDLTLLKALVRQQLPEKYKEIFFDQSKNGYAGYIDGGASQEEFYKFIKPILEKMDGTEELLVKLNREDLLRKQRTFDNGSIPHQIHLGELHAILRRQEDFYPFLKDNREKIEKILTFRIPYYVGPLARGNSRFAWMTRKSEETITPWNFEEVVDKGASAQSFIERMTNFDKNLPNEKVLPKHSLLYEYFTVYNELTKVKYVTEGMRKPAFLSGEQKKAIVDLLFKTNRKVTVKQLKEDYFKKIECFDSVEISGVEDRFNASLGTYHDLLKIIKDKDFLDNEENEDILEDIVLTLTLFEDREMIEERLKTYAHLFDDKVMKQLKRRRYTGWGRLSRKLINGIRDKQSGKTILDFLKSDGFANRNFMQLIHDDSLTFKEDIQKAQVSGQGDSLHEHIANLAGSPAIKKGILQTVKVVDELVKVMGRHKPENIVIEMARENQTTQKGQKNSRERMKRIEEGIKELGSQILKEHPVENTQLQNEKLYLYYLQNGRDMYVDQELDINRLSDYDVDHIVPQSFLKDDSIDNKVLTRSDKARGKSDNVPSEEVVKKMKNYWRQLLNAKLITQRKFDNLTKAERGGLSELDKAGFIKRQLVETRQITKHVAQILDSRMNTKYDENDKLIREVKVITLKSKLVSDFRKDFQFYKVREINNYHHAHDAYLNAVVGTALIKKYPKLESEFVYGDYKVYDVRKMIAKSEQEIGKATAKYFFYSNIMNFFKTEITLANGEIRKRPLIETNGETGEIVWDKGRDFATVRKVLSMPQVNIVKKTEVQTGGFSKESILPKRNSDKLIARKKDWDPKKYGGFDSPTVAYSVLVVAKVEKGKSKKLKSVKELLGITIMERSSFEKNPIDFLEAKGYKEVKKDLIIKLPKYSLFELENGRKRMLASAGELQKGNELALPSKYVNFLYLASHYEKLKGSPEDNEQKQLFVEQHKHYLDEIIEQISEFSKRVILADANLDKVLSAYNKHRDKPIREQAENIIHLFTLTNLGAPAAFKYFDTTIDRKRYTSTKEVLDATLIHQSITGLYETRIDLSQLGGDGGGSSGSSGSSGSSGGIPWLMKKPLQLTTLVPLQEYEERLLKQTMLTGSYKEKLQSLFLKYDALWQHWENQVGHRRIKPHHIATGTVNPRPQKQYPINPKAKASIQTVINDLLKQGVLIQQNSIMNTPVYPVPKPDGKWRMVLDYREVNKTIPLIAAQNQHSAGILSSIFRGKYKTTLDLSNGFWAHSITPESYWLTAFTWLGQQYCWTRLPQGFLNSPALFNADVVDLLKEVPNVQVYVDDIYISHDDPREHLEQLEKVFSLLLNAGYVVSLKKSEIAQHEVEFLGFNITKEGRGLTETFKQKLLNITPPRDLKQLQSILGLLNFARNFIPNFSELVKPLYNIIATAPGKYITWTTDNSQQLQNIISMLNSAENLEERNPEVRLIMKVNTSPSAGYIRFYNEFAKRPIMYLNYVYTKAEVKFTNTEKLLTTIHKGLIKALDLGMGQEILVYSPIVSMTKIQKTPLPERKALPIRWITWMSYLEDPRIQFHYDKTLPELQQVPTVTDDIIAKIKHPSEFSMVFYTDGSAIKHPNVNKSHNAGMGIAQVQFKPEFTVINTWSIPLGDHTAQLAEVAAVEFACKKALKIDGPVLIVTDSFYVAESVNKELPYWQSNGFFNNKKKPLKHVSKWKSIADCIQLKPDIIIIHEKGHQPTASTFHTEGNNLADKLATQGSYVVNAGKRTADGSEFEKRTADGSEFESPKKKAKVE

SEQ ID NO: 6326 - protein, 2177 aa, synthetic construct
MPAAKRVKLDGGDKKYSIGLDIGTNSVGWAVITDEYKVPSKKFKVLGNTDRHSIKKNLIGALLFDSGETAEATRLKRTARRRYTRRKNRICYLQEIFSNEMAKVDDSFFHRLEESFLVEEDKKHERHPIFGNIVDEVAYHEKYPTIYHLRKKLVDSTDKADLRLIYLALAHMIKFRGHFLIEGDLNPDNSDVDKLFIQLVQTYNQLFEENPINASGVDAKAILSARLSKSRRLENLIAQLPGEKKNGLFGNLIALSLGLTPNFKSNFDLAEDAKLQLSKDTYDDDLDNLLAQIGDQYADLFLAAKNLSDAILLSDILRVNTEITKAPLSASMIKRYDEHHQDLTLLKALVRQQLPEKYKEIFFDQSKNGYAGYIDGGASQEEFYKFIKPILEKMDGTEELLVKLNREDLLRKQRTFDNGSIPHQIHLGELHAILRRQEDFYPFLKDNREKIEKILTFRIPYYVGPLARGNSRFAWMTRKSEETITPWNFEEVVDKGASAQSFIERMTNFDKNLPNEKVLPKHSLLYEYFTVYNELTKVKYVTEGMRKPAFLSGEQKKAIVDLLFKTNRKVTVKQLKEDYFKKIECFDSVEISGVEDRFNASLGTYHDLLKIIKDKDFLDNEENEDILEDIVLTLTLFEDREMIEERLKTYAHLFDDKVMKQLKRRRYTGWGRLSRKLINGIRDKQSGKTILDFLKSDGFANRNFMQLIHDDSLTFKEDIQKAQVSGQGDSLHEHIANLAGSPAIKKGILQTVKVVDELVKVMGRHKPENIVIEMARENQTTQKGQKNSRERMKRIEEGIKELGSQILKEHPVENTQLQNEKLYLYYLQNGRDMYVDQELDINRLSDYDVDHIVPQSFLKDDSIDNKVLTRSDKARGKSDNVPSEEVVKKMKNYWRQLLNAKLITQRKFDNLTKAERGGLSELDKAGFIKRQLVETRQITKHVAQILDSRMNTKYDENDKLIREVKVITLKSKLVSDFRKDFQFYKVREINNYHHAHDAYLNAVVGTALIKKYPKLESEFVYGDYKVYDVRKMIAKSEQEIGKATAKYFFYSNIMNFFKTEITLANGEIRKRPLIETNGETGEIVWDKGRDFATVRKVLSMPQVNIVKKTEVQTGGFSKESILPKRNSDKLIARKKDWDPKKYGGFDSPTVAYSVLVVAKVEKGKSKKLKSVKELLGITIMERSSFEKNPIDFLEAKGYKEVKKDLIIKLPKYSLFELENGRKRMLASAGELQKGNELALPSKYVNFLYLASHYEKLKGSPEDNEQKQLFVEQHKHYLDEIIEQISEFSKRVILADANLDKVLSAYNKHRDKPIREQAENIIHLFTLTNLGAPAAFKYFDTTIDRKRYTSTKEVLDATLIHQSITGLYETRIDLSQLGGDGGGSSGSSGSSGSSGGMDPLQLLQPLEAEIKGTKLKAHWNSGATITCVPQAFLEEEVPIKNIWIKTIHGEKEQPVYYLTFKIQGRKVEAEVISSPYDYILVSPSDIPWLMKKPLQLTTLVPLQEYEERLLKQTMLTGSYKEKLQSLFLKYDALWQHWENQVGHRRIKPHHIATGTVNPRPQKQYPINPKAKASIQTVINDLLKQGVLIQQNSIMNTPVYPVPKPDGKWRMVLDYREVNKTIPLIAAQNQHSAGILSSIFRGKYKTTLDLSNGFWAHSITPESYWLTAFTWLGQQYCWTRLPQGFLNSPALFNADVVDLLKEVPNVQVYVDDIYISHDDPREHLEQLEKVFSLLLNAGYVVSLKKSEIAQHEVEFLGFNITKEGRGLTETFKQKLLNITPPRDLKQLQSILGKLNFARNFIPNFSELVKPLYNIIATAPGKYITWTTDNSQQLQNIISMLNSAENLEERNPEVRLIMKVNTSPSAGYIRFYNEFAKRPIMYLNYVYTKAEVKFTNTEKLLTTIHKGLIKALDLGMGQEILVYSPIVSMTKIQKTPLPERKALPIRWITWMSYLEDPRIQFHYDKTLPELQQVPTVTDDIIAKIKHPSEFSMVFYTDGSAIKHPNVNKSHNAGMGIAQVQFKPEFTVINTWSIPLGDHTAQLAEVAAVEFACKKALKIDGPVLIVTDSFYVAESVNKELPYWQSNGFFNNKKKPLKHVSKWKSIADCIQLKPDIIIIHEKGHQPTASTFHTEGNNLADKLATQGSYVVNAGKRTADGSEFEKRTADGSEFESPKKKAKVE

SEQ ID NO: 6327 - protein, 2097 aa, synthetic construct
MPAAKRVKLDGGDKKYSIGLDIGTNSVGWAVITDEYKVPSKKFKVLGNTDRHSIKKNLIGALLFDSGETAEATRLKRTARRRYTRRKNRICYLQEIFSNEMAKVDDSFFHRLEESFLVEEDKKHERHPIFGNIVDEVAYHEKYPTIYHLRKKLVDSTDKADLRLIYLALAHMIKFRGHFLIEGDLNPDNSDVDKLFIQLVQTYNQLFEENPINASGVDAKAILSARLSKSRRLENLIAQLPGEKKNGLFGNLIALSLGLTPNFKSNFDLAEDAKLQLSKDTYDDDLDNLLAQIGDQYADLFLAAKNLSDAILLSDILRVNTEITKAPLSASMIKRYDEHHQDLTLLKALVRQQLPEKYKEIFFDQSKNGYAGYIDGGASQEEFYKFIKPILEKMDGTEELLVKLNREDLLRKQRTFDNGSIPHQIHLGELHAILRRQEDFYPFLKDNREKIEKILTFRIPYYVGPLARGNSRFAWMTRKSEETITPWNFEEVVDKGASAQSFIERMTNFDKNLPNEKVLPKHSLLYEYFTVYNELTKVKYVTEGMRKPAFLSGEQKKAIVDLLFKTNRKVTVKQLKEDYFKKIECFDSVEISGVEDRFNASLGTYHDLLKIIKDKDFLDNEENEDILEDIVLTLTLFEDREMIEERLKTYAHLFDDKVMKQLKRRRYTGWGRLSRKLINGIRDKQSGKTILDFLKSDGFANRNFMQLIHDDSLTFKEDIQKAQVSGQGDSLHEHIANLAGSPAIKKGILQTVKVVDELVKVMGRHKPENIVIEMARENQTTQKGQKNSRERMKRIEEGIKELGSQILKEHPVENTQLQNEKLYLYYLQNGRDMYVDQELDINRLSDYDVDHIVPQSFLKDDSIDNKVLTRSDKARGKSDNVPSEEVVKKMKNYWRQLLNAKLITQRKFDNLTKAERGGLSELDKAGFIKRQLVETRQITKHVAQILDSRMNTKYDENDKLIREVKVITLKSKLVSDFRKDFQFYKVREINNYHHAHDAYLNAVVGTALIKKYPKLESEFVYGDYKVYDVRKMIAKSEQEIGKATAKYFFYSNIMNFFKTEITLANGEIRKRPLIETNGETGEIVWDKGRDFATVRKVLSMPQVNIVKKTEVQTGGFSKESILPKRNSDKLIARKKDWDPKKYGGFDSPTVAYSVLVVAKVEKGKSKKLKSVKELLGITIMERSSFEKNPIDFLEAKGYKEVKKDLIIKLPKYSLFELENGRKRMLASAGELQKGNELALPSKYVNFLYLASHYEKLKGSPEDNEQKQLFVEQHKHYLDEIIEQISEFSKRVILADANLDKVLSAYNKHRDKPIREQAENIIHLFTLTNLGAPAAFKYFDTTIDRKRYTSTKEVLDATLIHQSITGLYETRIDLSQLGGDGGGSSGSSGSSGSSGGTLNIEDEYRLHETSKEPDVPLGSTWLSDFPQAWAETGGMGLAVRQAPLIIPLKATSTPVSIKQYPMSQEARLGIKPHIQRLLDQGILVPCQSPWNTPLLPVKKPGTNDYRPVQDLREVNKRVEDIHPTVPNPYNLLSGLPPSHQWYTVLDLKDAFFCLRLHPTSQPLFAFEWRDPEMGISGQLTWTRLPQGFKNSPTLFNEALHRDLADFRIQHPDLILLQYVDDLLLAATSEQDCQRGTRALLQTLGNLGYRASAKKAQICQKQVKYLGYLLKEGQRWLTEARKETVMGQPTPKTPRQLREFLGTAGFCRLWIPGFAEMAAPLYPLTKPGTLFNWGPDQQKAYQEIKQALLTAPALGLPDLTKPFELFVDEKQGYAKGVLTQKLGPWRRPVAYLSKKLDPVAAGWPPCLRMVAAIAVLTKDAGKLTMGQPLVILAPHAVEALVKQPPDRWLSNARMTHYQAMLLDTDRVQFGPVVALNPATLLPLPEKEAPHDCLEILAETHGTRPDLTDQPIPDADYTWYTDGSSFLQEGQRRAGAAVTTETEVIWARALPAGTSAQRAELIALTQALKMAEGKKLNVYTDSRYAFATAHVHGEIYRRRGWLTSEGREIKNKNEILALLKALFLPKRLSIIHCPGHQKGNSAEARGNRMADQAAREAAMKAVLETSTLLAGKRTADGSEFEKRTADGSEFESPKKKAKVE

SEQ ID NO: 6328 - protein, 2102 aa, synthetic construct
MPAAKRVKLDGGDKKYSIGLDIGTNSVGWAVITDEYKVPSKKFKVLGNTDRHSIKKNLIGALLFDSGETAEATRLKRTARRRYTRRKNRICYLQEIFSNEMAKVDDSFFHRLEESFLVEEDKKHERHPIFGNIVDEVAYHEKYPTIYHLRKKLVDSTDKADLRLIYLALAHMIKFRGHFLIEGDLNPDNSDVDKLFIQLVQTYNQLFEENPINASGVDAKAILSARLSKSRRLENLIAQLPGEKKNGLFGNLIALSLGLTPNFKSNFDLAEDAKLQLSKDTYDDDLDNLLAQIGDQYADLFLAAKNLSDAILLSDILRVNTEITKAPLSASMIKRYDEHHQDLTLLKALVRQQLPEKYKEIFFDQSKNGYAGYIDGGASQEEFYKFIKPILEKMDGTEELLVKLNREDLLRKQRTFDNGSIPHQIHLGELHAILRRQEDFYPFLKDNREKIEKILTFRIPYYVGPLARGNSRFAWMTRKSEETITPWNFEEVVDKGASAQSFIERMTNFDKNLPNEKVLPKHSLLYEYFTVYNELTKVKYVTEGMRKPAFLSGEQKKAIVDLLFKTNRKVTVKQLKEDYFKKIECFDSVEISGVEDRFNASLGTYHDLLKIIKDKDFLDNEENEDILEDIVLTLTLFEDREMIEERLKTYAHLFDDKVMKQLKRRRYTGWGRLSRKLINGIRDKQSGKTILDFLKSDGFANRNFMQLIHDDSLTFKEDIQKAQVSGQGDSLHEHIANLAGSPAIKKGILQTVKVVDELVKVMGRHKPENIVIEMARENQTTQKGQKNSRERMKRIEEGIKELGSQILKEHPVENTQLQNEKLYLYYLQNGRDMYVDQELDINRLSDYDVDHIVPQSFLKDDSIDNKVLTRSDKARGKSDNVPSEEVVKKMKNYWRQLLNAKLITQRKFDNLTKAERGGLSELDKAGFIKRQLVETRQITKHVAQILDSRMNTKYDENDKLIREVKVITLKSKLVSDFRKDFQFYKVREINNYHHAHDAYLNAVVGTALIKKYPKLESEFVYGDYKVYDVRKMIAKSEQEIGKATAKYFFYSNIMNFFKTEITLANGEIRKRPLIETNGETGEIVWDKGRDFATVRKVLSMPQVNIVKKTEVQTGGFSKESILPKRNSDKLIARKKDWDPKKYGGFDSPTVAYSVLVVAKVEKGKSKKLKSVKELLGITIMERSSFEKNPIDFLEAKGYKEVKKDLIIKLPKYSLFELENGRKRMLASAGELQKGNELALPSKYVNFLYLASHYEKLKGSPEDNEQKQLFVEQHKHYLDEIIEQISEFSKRVILADANLDKVLSAYNKHRDKPIREQAENIIHLFTLTNLGAPAAFKYFDTTIDRKRYTSTKEVLDATLIHQSITGLYETRIDLSQLGGDGGGSSGSSGSSGSSGSSGGTAPLEEEYRLFLEAPIQNVTLLEQWKREIPKVWAEINPPGLASTQAPIHVQLLSTALPVRVRQYPITLEAKRSLRETIRKFRAAGILRPVHSPWNTPLLPVRKSGTSEYRMVQDLREVNKRVETIHPTVPNPYTLLSLLPPDRIWYSVLDLKDAFFCIPLAPESQLIFAFEWADAEEGESGQLTWTRLPQGFKNSPTLFDEALNRDLQGFRLDHPSVSLLQYVDDLLIAADTQAACLSATRDLLMTLAELGYRVSGKKAQLCQEEVTYLGFKIHKGSRSLSNSRTQAILQIPVPKTKRQVREFLGTIGYCRLWIPGFAELAQPLYAATRGGNDPLVWGEKEEEAFQSLKLALTQPPALALPSLDKPFQLFVEETSGAAKGVLTQALGPWKRPVAYLSKRLDPVAAGWPRCLRAIAAAALLTREASKLTFGQDIEITSSHNLESLLRSPPDKWLTNARITQYQVLLLDPPRVRFKQTAALNPATLLPETDDTLPIHHCLDTLDSLTSTRPDLTDQPLAQAEATLFTDGSSYIRDGKRYAGAAVVTLDSVIWAEPLPIGTSAQKAELIALTKALEWSKDKSVNIYTDSRYAFATLHVHGMIYRERGLLTAGGKAIKNAPEILALLTAVWLPKRVAVMHCKGHQKDDAPTSTGNRRADEVAREVAIRPLSTQATISAGKRTADGSEFEKRTADGSEFESPKKKAKVE

SEQ ID NO: 6329 - protein, 2102 aa, synthetic construct
MPAAKRVKLDGGDKKYSIGLDIGTNSVGWAVITDEYKVPSKKFKVLGNTDRHSIKKNLIGALLFDSGETAEATRLKRTARRRYTRRKNRICYLQEIFSNEMAKVDDSFFHRLEESFLVEEDKKHERHPIFGNIVDEVAYHEKYPTIYHLRKKLVDSTDKADLRLIYLALAHMIKFRGHFLIEGDLNPDNSDVDKLFIQLVQTYNQLFEENPINASGVDAKAILSARLSKSRRLENLIAQLPGEKKNGLFGNLIALSLGLTPNFKSNFDLAEDAKLQLSKDTYDDDLDNLLAQIGDQYADLFLAAKNLSDAILLSDILRVNTEITKAPLSASMIKRYDEHHQDLTLLKALVRQQLPEKYKEIFFDQSKNGYAGYIDGGASQEEFYKFIKPILEKMDGTEELLVKLNREDLLRKQRTFDNGSIPHQIHLGELHAILRRQEDFYPFLKDNREKIEKILTFRIPYYVGPLARGNSRFAWMTRKSEETITPWNFEEVVDKGASAQSFIERMTNFDKNLPNEKVLPKHSLLYEYFTVYNELTKVKYVTEGMRKPAFLSGEQKKAIVDLLFKTNRKVTVKQLKEDYFKKIECFDSVEISGVEDRFNASLGTYHDLLKIIKDKDFLDNEENEDILEDIVLTLTLFEDREMIEERLKTYAHLFDDKVMKQLKRRRYTGWGRLSRKLINGIRDKQSGKTILDFLKSDGFANRNFMQLIHDDSLTFKEDIQKAQVSGQGDSLHEHIANLAGSPAIKKGILQTVKVVDELVKVMGRHKPENIVIEMARENQTTQKGQKNSRERMKRIEEGIKELGSQILKEHPVENTQLQNEKLYLYYLQNGRDMYVDQELDINRLSDYDVDHIVPQSFLKDDSIDNKVLTRSDKARGKSDNVPSEEVVKKMKNYWRQLLNAKLITQRKFDNLTKAERGGLSELDKAGFIKRQLVETRQITKHVAQILDSRMNTKYDENDKLIREVKVITLKSKLVSDFRKDFQFYKVREINNYHHAHDAYLNAVVGTALIKKYPKLESEFVYGDYKVYDVRKMIAKSEQEIGKATAKYFFYSNIMNFFKTEITLANGEIRKRPLIETNGETGEIVWDKGRDFATVRKVLSMPQVNIVKKTEVQTGGFSKESILPKRNSDKLIARKKDWDPKKYGGFDSPTVAYSVLVVAKVEKGKSKKLKSVKELLGITIMERSSFEKNPIDFLEAKGYKEVKKDLIIKLPKYSLFELENGRKRMLASAGELQKGNELALPSKYVNFLYLASHYEKLKGSPEDNEQKQLFVEQHKHYLDEIIEQISEFSKRVILADANLDKVLSAYNKHRDKPIREQAENIIHLFTLTNLGAPAAFKYFDTTIDRKRYTSTKEVLDATLIHQSITGLYETRIDLSQLGGDGGGSSGSSGSSGSSGSSGGTAPLEEEYRLFLEAPIQNVTLLEQWKREIPKVWAEINPPGLASTQAPIHVQLLSTALPVRVRQYPITLEAKRSLRETIRKFRAAGILRPVHSPWNTPLLPVRKSGTSEYRMVQDLREVNKRVETIHPTVPNPYTLLSLLPPDRIWYSVLDLKDAFFCIPLAPESQLIFAFEWADAEEGESGQLTWTRLPQGFKNSPTLFNEALNRDLQGFRLDHPSVSLLQYVDDLLIAADTQAACLSATRDLLMTLAELGYRVSGKKAQLCQEEVTYLGFKIHKGSRSLSNSRTQAILQIPVPKTKRQVREFLGKIGYCRLFIPGFAELAQPLYAATRPGNDPLVWGEKEEEAFQSLKLALTQPPALALPSLDKPFQLFVEETSGAAKGVLTQALGPWKRPVAYLSKRLDPVAAGWPRCLRAIAAAALLTREASKLTFGQDIEITSSHNLESLLRSPPDKWLTNARITQYQVLLLDPPRVRFKQTAALNPATLLPETDDTLPIHHCLDTLDSLTSTRPDLTDQPLAQAEATLFTDGSSYIRDGKRYAGAAVVTLDSVIWAEPLPIGTSAQKAELIALTKALEWSKDKSVNIYTDSRYAFATLHVHGMIYRERGWLTAGGKAIKNAPEILALLTAVWLPKRVAVMHCKGHQKDDAPTSTGNRRADEVAREVAIRPLSTQATISAGKRTADGSEFEKRTADGSEFESPKKKAKVE

SEQ ID NO: 6330 - protein, 2131 aa, synthetic construct
MPAAKRVKLDGGDKKYSIGLDIGTNSVGWAVITDEYKVPSKKFKVLGNTDRHSIKKNLIGALLFDSGETAEATRLKRTARRRYTRRKNRICYLQEIFSNEMAKVDDSFFHRLEESFLVEEDKKHERHPIFGNIVDEVAYHEKYPTIYHLRKKLVDSTDKADLRLIYLALAHMIKFRGHFLIEGDLNPDNSDVDKLFIQLVQTYNQLFEENPINASGVDAKAILSARLSKSRRLENLIAQLPGEKKNGLFGNLIALSLGLTPNFKSNFDLAEDAKLQLSKDTYDDDLDNLLAQIGDQYADLFLAAKNLSDAILLSDILRVNTEITKAPLSASMIKRYDEHHQDLTLLKALVRQQLPEKYKEIFFDQSKNGYAGYIDGGASQEEFYKFIKPILEKMDGTEELLVKLNREDLLRKQRTFDNGSIPHQIHLGELHAILRRQEDFYPFLKDNREKIEKILTFRIPYYVGPLARGNSRFAWMTRKSEETITPWNFEEVVDKGASAQSFIERMTNFDKNLPNEKVLPKHSLLYEYFTVYNELTKVKYVTEGMRKPAFLSGEQKKAIVDLLFKTNRKVTVKQLKEDYFKKIECFDSVEISGVEDRFNASLGTYHDLLKIIKDKDFLDNEENEDILEDIVLTLTLFEDREMIEERLKTYAHLFDDKVMKQLKRRRYTGWGRLSRKLINGIRDKQSGKTILDFLKSDGFANRNFMQLIHDDSLTFKEDIQKAQVSGQGDSLHEHIANLAGSPAIKKGILQTVKVVDELVKVMGRHKPENIVIEMARENQTTQKGQKNSRERMKRIEEGIKELGSQILKEHPVENTQLQNEKLYLYYLQNGRDMYVDQELDINRLSDYDVDHIVPQSFLKDDSIDNKVLTRSDKARGKSDNVPSEEVVKKMKNYWRQLLNAKLITQRKFDNLTKAERGGLSELDKAGFIKRQLVETRQITKHVAQILDSRMNTKYDENDKLIREVKVITLKSKLVSDFRKDFQFYKVREINNYHHAHDAYLNAVVGTALIKKYPKLESEFVYGDYKVYDVRKMIAKSEQEIGKATAKYFFYSNIMNFFKTEITLANGEIRKRPLIETNGETGEIVWDKGRDFATVRKVLSMPQVNIVKKTEVQTGGFSKESILPKRNSDKLIARKKDWDPKKYGGFDSPTVAYSVLVVAKVEKGKSKKLKSVKELLGITIMERSSFEKNPIDFLEAKGYKEVKKDLIIKLPKYSLFELENGRKRMLASAGELQKGNELALPSKYVNFLYLASHYEKLKGSPEDNEQKQLFVEQHKHYLDEIIEQISEFSKRVILADANLDKVLSAYNKHRDKPIREQAENIIHLFTLTNLGAPAAFKYFDTTIDRKRYTSTKEVLDATLIHQSITGLYETRIDLSQLGGDGGGSSGSSGSSGSSGSSGGLLGRDLLTKLKAQIQFSTEGPQVTWEDRPAMCLVLNLEEEYRLHEKPVPPSIDPSWLQLFPMVWAEKAGMGLANQVPPVVVELKSDASPVAVRQYPMSKEAREGIRPHIQRFLDLGILVPCQSPWNTPLLPVKKPGTNDYRPVQDLREVNKRVQDIHPTVPNPYNLLSSLPPSHTWYSVLDLKDAFFCLKLHPNSQPLFAFEWRDPEKGNTGQLTWTRLPQGFKNSPTLFDEALHRDLASFRALNPQVVMLQYVDDLLVAAPTYRDCKEGTRRLLQELSKLGYRVSAKKAQLCREEVTYLGYLLKGGKRWLTPARKATVMKIPTPTTPRQVREFLGTAGFCRLWIPGFASLAAPLYPLTREKVPFTWTEAHQEAFGRIKEALLSAPALALPDLTKPFALYVDEKEGVARGVLTQTLGPWRRPVAYLSKKLDPVASGWPTCLKAIAAVALLLKDADKLTLGQNVLVIAPHNLESIVRQPPDRWMTNARMTHYQSLLLNERVSFAPPAILNPATLLPVESDDTPIHICSEILAEETGTRPDLRDQPLPGVPAWYTDGSSFIMDGRRQAGAAIVDNKRTVWASNLPEGTSAQKAELIALTQALRLAEGKSINIYTDSRYAFATAHVHGAIYKQRGLLTSAGKDIKNKEEILALLEAIHLPKRVAIIHCPGHQRGTDPVATGNRKADEAAKQAAQSTRILTETTKNAGKRTADGSEFEKRTADGSEFESPKKKAKVE

SEQ ID NO: 6331 - protein, 2222 aa, synthetic construct
MPAAKRVKLDGGDKKYSIGLDIGTNSVGWAVITDEYKVPSKKFKVLGNTDRHSIKKNLIGALLFDSGETAEATRLKRTARRRYTRRKNRICYLQEIFSNEMAKVDDSFFHRLEESFLVEEDKKHERHPIFGNIVDEVAYHEKYPTIYHLRKKLVDSTDKADLRLIYLALAHMIKFRGHFLIEGDLNPDNSDVDKLFIQLVQTYNQLFEENPINASGVDAKAILSARLSKSRRLENLIAQLPGEKKNGLFGNLIALSLGLTPNFKSNFDLAEDAKLQLSKDTYDDDLDNLLAQIGDQYADLFLAAKNLSDAILLSDILRVNTEITKAPLSASMIKRYDEHHQDLTLLKALVRQQLPEKYKEIFFDQSKNGYAGYIDGGASQEEFYKFIKPILEKMDGTEELLVKLNREDLLRKQRTFDNGSIPHQIHLGELHAILRRQEDFYPFLKDNREKIEKILTFRIPYYVGPLARGNSRFAWMTRKSEETITPWNFEEVVDKGASAQSFIERMTNFDKNLPNEKVLPKHSLLYEYFTVYNELTKVKYVTEGMRKPAFLSGEQKKAIVDLLFKTNRKVTVKQLKEDYFKKIECFDSVEISGVEDRFNASLGTYHDLLKIIKDKDFLDNEENEDILEDIVLTLTLFEDREMIEERLKTYAHLFDDKVMKQLKRRRYTGWGRLSRKLINGIRDKQSGKTILDFLKSDGFANRNFMQLIHDDSLTFKEDIQKAQVSGQGDSLHEHIANLAGSPAIKKGILQTVKVVDELVKVMGRHKPENIVIEMARENQTTQKGQKNSRERMKRIEEGIKELGSQILKEHPVENTQLQNEKLYLYYLQNGRDMYVDQELDINRLSDYDVDHIVPQSFLKDDSIDNKVLTRSDKARGKSDNVPSEEVVKKMKNYWRQLLNAKLITQRKFDNLTKAERGGLSELDKAGFIKRQLVETRQITKHVAQILDSRMNTKYDENDKLIREVKVITLKSKLVSDFRKDFQFYKVREINNYHHAHDAYLNAVVGTALIKKYPKLESEFVYGDYKVYDVRKMIAKSEQEIGKATAKYFFYSNIMNFFKTEITLANGEIRKRPLIETNGETGEIVWDKGRDFATVRKVLSMPQVNIVKKTEVQTGGFSKESILPKRNSDKLIARKKDWDPKKYGGFDSPTVAYSVLVVAKVEKGKSKKLKSVKELLGITIMERSSFEKNPIDFLEAKGYKEVKKDLIIKLPKYSLFELENGRKRMLASAGELQKGNELALPSKYVNFLYLASHYEKLKGSPEDNEQKQLFVEQHKHYLDEIIEQISEFSKRVILADANLDKVLSAYNKHRDKPIREQAENIIHLFTLTNLGAPAAFKYFDTTIDRKRYTSTKEVLDATLIHQSITGLYETRIDLSQLGGDGGGSSGSSGSSGSSGSSGGTLGDQGSRGSDPLPEPRVTLTVEGIPTEFLVNTGAEHSVLTKPMGKMGSKRTVVAGATGSKVYPWTTKRLLKIGQKQVTHSFLVIPECPAPLLGRDLLTKLKAQIQFSTEGPQVTWEDRPAMCLVLNLEEEYRLHEKPVPPSIDPSWLQLFPMVWAEKAGMGLANQVPPVVVELKSDASPVAVRQYPMSKEAREGIRPHIQRFLDLGILVPCQSPWNTPLLPVKKPGTNDYRPVQDLREVNKRVQDIHPTVPNPYNLLSSLPPSHTWYSVLDLKDAFFCLKLHPNSQPLFAFEWRDPEKGNTGQLTWTRLPQGFKNSPTLFNEALHRDLASFRALNPQVVMLQYVDDLLVAAPTYRDCKEGTRRLLQELSKLGYRVSAKKAQLCREEVTYLGYLLKGGKRWLTPARKATVMKIPTPTTPRQVREFLGTAGFCRLWIPGFASLAAPLYPLTRPKVPFTWTEAHQEAFGRIKEALLSAPALALPDLTKPFALYVDEKEGVARGVLTQTLGPWRRPVAYLSKKLDPVASGWPTCLKAIAAVALLLKDADKLTLGQNVLVIAPHNLESIVRQPPDRWMTNARMTHYQSLLLNERVSFAPPAILNPATLLPVESDDTPIHICSEILAEETGTRPDLRDQPLPGVPAWYTDGSSFIMDGRRQAGAAIVDNKRTVWASNLPEGTSAQKAELIALTQALRLAEGKSINIYTDSRYAFATAHVHGAIYKQRGWLTSAGKDIKNKEEILALLEAIHLPKRVAIIHCPGHQRGTDPVATGNRKADEAAKQAAQSTRILTETTKNAGKRTADGSEFEKRTADGSEFESPKKKAKVE

SEQ ID NO: 6332 - protein, 2100 aa, synthetic construct
MPAAKRVKLDGGDKKYSIGLDIGTNSVGWAVITDEYKVPSKKFKVLGNTDRHSIKKNLIGALLFDSGETAEATRLKRTARRRYTRRKNRICYLQEIFSNEMAKVDDSFFHRLEESFLVEEDKKHERHPIFGNIVDEVAYHEKYPTIYHLRKKLVDSTDKADLRLIYLALAHMIKFRGHFLIEGDLNPDNSDVDKLFIQLVQTYNQLFEENPINASGVDAKAILSARLSKSRRLENLIAQLPGEKKNGLFGNLIALSLGLTPNFKSNFDLAEDAKLQLSKDTYDDDLDNLLAQIGDQYADLFLAAKNLSDAILLSDILRVNTEITKAPLSASMIKRYDEHHQDLTLLKALVRQQLPEKYKEIFFDQSKNGYAGYIDGGASQEEFYKFIKPILEKMDGTEELLVKLNREDLLRKQRTFDNGSIPHQIHLGELHAILRRQEDFYPFLKDNREKIEKILTFRIPYYVGPLARGNSRFAWMTRKSEETITPWNFEEVVDKGASAQSFIERMTNFDKNLPNEKVLPKHSLLYEYFTVYNELTKVKYVTEGMRKPAFLSGEQKKAIVDLLFKTNRKVTVKQLKEDYFKKIECFDSVEISGVEDRFNASLGTYHDLLKIIKDKDFLDNEENEDILEDIVLTLTLFEDREMIEERLKTYAHLFDDKVMKQLKRRRYTGWGRLSRKLINGIRDKQSGKTILDFLKSDGFANRNFMQLIHDDSLTFKEDIQKAQVSGQGDSLHEHIANLAGSPAIKKGILQTVKVVDELVKVMGRHKPENIVIEMARENQTTQKGQKNSRERMKRIEEGIKELGSQILKEHPVENTQLQNEKLYLYYLQNGRDMYVDQELDINRLSDYDVDHIVPQSFLKDDSIDNKVLTRSDKARGKSDNVPSEEVVKKMKNYWRQLLNAKLITQRKFDNLTKAERGGLSELDKAGFIKRQLVETRQITKHVAQILDSRMNTKYDENDKLIREVKVITLKSKLVSDFRKDFQFYKVREINNYHHAHDAYLNAVVGTALIKKYPKLESEFVYGDYKVYDVRKMIAKSEQEIGKATAKYFFYSNIMNFFKTEITLANGEIRKRPLIETNGETGEIVWDKGRDFATVRKVLSMPQVNIVKKTEVQTGGFSKESILPKRNSDKLIARKKDWDPKKYGGFDSPTVAYSVLVVAKVEKGKSKKLKSVKELLGITIMERSSFEKNPIDFLEAKGYKEVKKDLIIKLPKYSLFELENGRKRMLASAGELQKGNELALPSKYVNFLYLASHYEKLKGSPEDNEQKQLFVEQHKHYLDEIIEQISEFSKRVILADANLDKVLSAYNKHRDKPIREQAENIIHLFTLTNLGAPAAFKYFDTTIDRKRYTSTKEVLDATLIHQSITGLYETRIDLSQLGGDGGGSSGSSGSSGSSGSSGGTLNLEDEYRLYETSAEPEVSPGSTWLSDFPQAWAETGGMGLAVRQAPLIIPLKATSTPVSIKQYPMSQEAKLGIKPHIQRLLDQGILVPCQSPWNTPLLPVKKPGTNDYRPVQDLREVNKRVEDIHPTVPNPYNLLSGLPPSHRWYTVLDLKDAFFCLRLHPTSQPLFAFEWRDPGMGISGQLTWTRLPQGFKNSPTLFNEALHRDLADFRIQHPDLILLQYVDDILLAATSELDCQQGTRALLLTLGNLGYRASAKKAQLCQKQVKYLGYLLKEGQRWLTEARKETVMGQPTPKTPRQLREFLGTAGFCRLWIPGFAEMAAPLYPLTKPGTLFNWGPDQQKAYQEIKQALLTAPALGLPDLTKPFELFVDEKQGYAKGVLTQKLGPWRRPVAYLSKKLDPVAAGWPPCLRMVAAIAVLRKDAGKLTMGQPLVILAPHAVEALVKQPPDRWLSNARMTHYQAMLLDTDRVQFGPVVALNPATLLPLPEEGAPHDCLEILAETHGTRPDLTDQPIPDADHTWYTDGSSFLQEGQRKAGAAVTTETEVIWARALPAGTSAQRAELIALTQALKMAEGKRLNVYTDSRYAFATAHIHGEIYRRRGWLTSEGREIKNKSEILALLKALFLPKRLSIIHCLGHQKGDSAEARGNRLADQAAREAAIKTPPDTSTLLAGKRTADGSEFEKRTADGSEFESPKKKAKVE

SEQ ID NO: 6333 - protein, 2100 aa, synthetic construct
MPAAKRVKLDGGDKKYSIGLDIGTNSVGWAVITDEYKVPSKKFKVLGNTDRHSIKKNLIGALLFDSGETAEATRLKRTARRRYTRRKNRICYLQEIFSNEMAKVDDSFFHRLEESFLVEEDKKHERHPIFGNIVDEVAYHEKYPTIYHLRKKLVDSTDKADLRLIYLALAHMIKFRGHFLIEGDLNPDNSDVDKLFIQLVQTYNQLFEENPINASGVDAKAILSARLSKSRRLENLIAQLPGEKKNGLFGNLIALSLGLTPNFKSNFDLAEDAKLQLSKDTYDDDLDNLLAQIGDQYADLFLAAKNLSDAILLSDILRVNTEITKAPLSASMIKRYDEHHQDLTLLKALVRQQLPEKYKEIFFDQSKNGYAGYIDGGASQEEFYKFIKPILEKMDGTEELLVKLNREDLLRKQRTFDNGSIPHQIHLGELHAILRRQEDFYPFLKDNREKIEKILTFRIPYYVGPLARGNSRFAWMTRKSEETITPWNFEEVVDKGASAQSFIERMTNFDKNLPNEKVLPKHSLLYEYFTVYNELTKVKYVTEGMRKPAFLSGEQKKAIVDLLFKTNRKVTVKQLKEDYFKKIECFDSVEISGVEDRFNASLGTYHDLLKIIKDKDFLDNEENEDILEDIVLTLTLFEDREMIEERLKTYAHLFDDKVMKQLKRRRYTGWGRLSRKLINGIRDKQSGKTILDFLKSDGFANRNFMQLIHDDSLTFKEDIQKAQVSGQGDSLHEHIANLAGSPAIKKGILQTVKVVDELVKVMGRHKPENIVIEMARENQTTQKGQKNSRERMKRIEEGIKELGSQILKEHPVENTQLQNEKLYLYYLQNGRDMYVDQELDINRLSDYDVDHIVPQSFLKDDSIDNKVLTRSDKARGKSDNVPSEEVVKKMKNYWRQLLNAKLITQRKFDNLTKAERGGLSELDKAGFIKRQLVETRQITKHVAQILDSRMNTKYDENDKLIREVKVITLKSKLVSDFRKDFQFYKVREINNYHHAHDAYLNAVVGTALIKKYPKLESEFVYGDYKVYDVRKMIAKSEQEIGKATAKYFFYSNIMNFFKTEITLANGEIRKRPLIETNGETGEIVWDKGRDFATVRKVLSMPQVNIVKKTEVQTGGFSKESILPKRNSDKLIARKKDWDPKKYGGFDSPTVAYSVLVVAKVEKGKSKKLKSVKELLGITIMERSSFEKNPIDFLEAKGYKEVKKDLIIKLPKYSLFELENGRKRMLASAGELQKGNELALPSKYVNFLYLASHYEKLKGSPEDNEQKQLFVEQHKHYLDEIIEQISEFSKRVILADANLDKVLSAYNKHRDKPIREQAENIIHLFTLTNLGAPAAFKYFDTTIDRKRYTSTKEVLDATLIHQSITGLYETRIDLSQLGGDGGGSSGSSGSSGSSGSSGGTLGIEDEYRLHETSTEPDVSLGSTWLSDFPQAWAETGGMGLAVRQAPLIIPLKATSTPVSIQQYPMSHEARLGIKPHIQRLLDQGILVPCQSPWNTPLLPVKKPGTNDYRPVQDLREVNKRVEDIHPTVPNPYNLLSGLPPSHQWYTVLDLKDAFFCLRLHPTSQPLFAFEWRDPGMGISGQLTWTRLPQGFKNSPTLFNEALHRDLADFRIQHPDLILLQYVDDILLAATSELDCQQGTRALLQTLGDLGYRASAKKAQICQKQVKYLGYLLREGQRWLTEARKETVMGQPVPKTPRQLREFLGTAGFCRLWIPGFAEMAAPLYPLTKPGTLFSWGPDQQKAYQEIKQALLTAPALGLPDLTKPFELFVDEKQGYAKGVLTQKLGPWRRPVAYLSKKLDPVAAGWPPCLRMVAAIAVLTKDAGKLTMGQPLVILAPHAVEALVKQPPDRWLSNARMTHYQAMLLDTDRVQFGPVVALNPATLLPLPEEGAPHDCLEILAETHGTRPDLTDQPIPDADHTWYTDGSSFLQEGQRKAGAAVTTETEVIWAGALPAGTSAQRAELIALTQALKMAEGKRLNVYTDSRYAFATAHIHGEIYRRRGWLTSEGREIKNKSEILALLKALFLPKRLSIIHCLGHQKGDSAEARGNRLADQAAREAAIKTPPDTSTLLAGKRTADGSEFEKRTADGSEFESPKKKAKVE

SEQ ID NO: 6334 - protein, 2100 aa, synthetic construct
MPAAKRVKLDGGDKKYSIGLDIGTNSVGWAVITDEYKVPSKKFKVLGNTDRHSIKKNLIGALLFDSGETAEATRLKRTARRRYTRRKNRICYLQEIFSNEMAKVDDSFFHRLEESFLVEEDKKHERHPIFGNIVDEVAYHEKYPTIYHLRKKLVDSTDKADLRLIYLALAHMIKFRGHFLIEGDLNPDNSDVDKLFIQLVQTYNQLFEENPINASGVDAKAILSARLSKSRRLENLIAQLPGEKKNGLFGNLIALSLGLTPNFKSNFDLAEDAKLQLSKDTYDDDLDNLLAQIGDQYADLFLAAKNLSDAILLSDILRVNTEITKAPLSASMIKRYDEHHQDLTLLKALVRQQLPEKYKEIFFDQSKNGYAGYIDGGASQEEFYKFIKPILEKMDGTEELLVKLNREDLLRKQRTFDNGSIPHQIHLGELHAILRRQEDFYPFLKDNREKIEKILTFRIPYYVGPLARGNSRFAWMTRKSEETITPWNFEEVVDKGASAQSFIERMTNFDKNLPNEKVLPKHSLLYEYFTVYNELTKVKYVTEGMRKPAFLSGEQKKAIVDLLFKTNRKVTVKQLKEDYFKKIECFDSVEISGVEDRFNASLGTYHDLLKIIKDKDFLDNEENEDILEDIVLTLTLFEDREMIEERLKTYAHLFDDKVMKQLKRRRYTGWGRLSRKLINGIRDKQSGKTILDFLKSDGFANRNFMQLIHDDSLTFKEDIQKAQVSGQGDSLHEHIANLAGSPAIKKGILQTVKVVDELVKVMGRHKPENIVIEMARENQTTQKGQKNSRERMKRIEEGIKELGSQILKEHPVENTQLQNEKLYLYYLQNGRDMYVDQELDINRLSDYDVDHIVPQSFLKDDSIDNKVLTRSDKARGKSDNVPSEEVVKKMKNYWRQLLNAKLITQRKFDNLTKAERGGLSELDKAGFIKRQLVETRQITKHVAQILDSRMNTKYDENDKLIREVKVITLKSKLVSDFRKDFQFYKVREINNYHHAHDAYLNAVVGTALIKKYPKLESEFVYGDYKVYDVRKMIAKSEQEIGKATAKYFFYSNIMNFFKTEITLANGEIRKRPLIETNGETGEIVWDKGRDFATVRKVLSMPQVNIVKKTEVQTGGFSKESILPKRNSDKLIARKKDWDPKKYGGFDSPTVAYSVLVVAKVEKGKSKKLKSVKELLGITIMERSSFEKNPIDFLEAKGYKEVKKDLIIKLPKYSLFELENGRKRMLASAGELQKGNELALPSKYVNFLYLASHYEKLKGSPEDNEQKQLFVEQHKHYLDEIIEQISEFSKRVILADANLDKVLSAYNKHRDKPIREQAENIIHLFTLTNLGAPAAFKYFDTTIDRKRYTSTKEVLDATLIHQSITGLYETRIDLSQLGGDGGGSSGSSGSSGSSGSSGGTLNIEDEYRLHEISTEPDVSPGSTWLSDFPQAWAETGGMGLAVRQAPLIIPLKATSTPVSIKQYPMSQEAKLGIKPHIQRLLDQGILVPCQSPWNTPLLPVKKPGTNDYRPVQGLREVNKRVEDIHPTVPNPYNLLSGLPTSHRWYTVLDLKDAFFCLRLHPTSQPLFASEWRDPGMGISGQLTWTRLPQGFKNSPTLFDEALHRGLADFRIQHPDLILLQYVDDLLLAATSELDCQQGTRALLKTLGNLGYRASAKKAQICQKQVKYLGYLLREGQRWLTEARKETVMGQPTPKTPRQLREFLGTAGFCRLWIPRFAEMAAPLYPLTKTGTLFNWGPDQQKAYHEIKQALLTAPALGLPDLTKPFELFVDEKQGYAKGVLTQKLGPWRRPVAYLSKKLDPVAAGWPPCLRMVAAIAVLTKDAGKLTMGQPLVILAPHAVEALVKQPPDRWLSNARMTHYQAMLLDTDRVQFGPVVALNPATLLPLPEEGAPHDCLEILAETHGTEPDLTDQPIPDADHTWYTDGSSFLQEGQRKAGAAVTTETEVIWARALPAGTSAQRAELIALTQALKMAEGKRLNVYTDSRYAFATAHIHGEIYKRRGLLTSEGREIKNKSEILALLKALFLPKRLSIIHCLGHQKGDSAEARGNRLADQAAREAAIKTPPDTSTLLAGKRTADGSEFEKRTADGSEFESPKKKAKVE

SEQ ID NO: 6335 - protein, 2100 aa, synthetic construct
MPAAKRVKLDGGDKKYSIGLDIGTNSVGWAVITDEYKVPSKKFKVLGNTDRHSIKKNLIGALLFDSGETAEATRLKRTARRRYTRRKNRICYLQEIFSNEMAKVDDSFFHRLEESFLVEEDKKHERHPIFGNIVDEVAYHEKYPTIYHLRKKLVDSTDKADLRLIYLALAHMIKFRGHFLIEGDLNPDNSDVDKLFIQLVQTYNQLFEENPINASGVDAKAILSARLSKSRRLENLIAQLPGEKKNGLFGNLIALSLGLTPNFKSNFDLAEDAKLQLSKDTYDDDLDNLLAQIGDQYADLFLAAKNLSDAILLSDILRVNTEITKAPLSASMIKRYDEHHQDLTLLKALVRQQLPEKYKEIFFDQSKNGYAGYIDGGASQEEFYKFIKPILEKMDGTEELLVKLNREDLLRKQRTFDNGSIPHQIHLGELHAILRRQEDFYPFLKDNREKIEKILTFRIPYYVGPLARGNSRFAWMTRKSEETITPWNFEEVVDKGASAQSFIERMTNFDKNLPNEKVLPKHSLLYEYFTVYNELTKVKYVTEGMRKPAFLSGEQKKAIVDLLFKTNRKVTVKQLKEDYFKKIECFDSVEISGVEDRFNASLGTYHDLLKIIKDKDFLDNEENEDILEDIVLTLTLFEDREMIEERLKTYAHLFDDKVMKQLKRRRYTGWGRLSRKLINGIRDKQSGKTILDFLKSDGFANRNFMQLIHDDSLTFKEDIQKAQVSGQGDSLHEHIANLAGSPAIKKGILQTVKVVDELVKVMGRHKPENIVIEMARENQTTQKGQKNSRERMKRIEEGIKELGSQILKEHPVENTQLQNEKLYLYYLQNGRDMYVDQELDINRLSDYDVDHIVPQSFLKDDSIDNKVLTRSDKARGKSDNVPSEEVVKKMKNYWRQLLNAKLITQRKFDNLTKAERGGLSELDKAGFIKRQLVETRQITKHVAQILDSRMNTKYDENDKLIREVKVITLKSKLVSDFRKDFQFYKVREINNYHHAHDAYLNAVVGTALIKKYPKLESEFVYGDYKVYDVRKMIAKSEQEIGKATAKYFFYSNIMNFFKTEITLANGEIRKRPLIETNGETGEIVWDKGRDFATVRKVLSMPQVNIVKKTEVQTGGFSKESILPKRNSDKLIARKKDWDPKKYGGFDSPTVAYSVLVVAKVEKGKSKKLKSVKELLGITIMERSSFEKNPIDFLEAKGYKEVKKDLIIKLPKYSLFELENGRKRMLASAGELQKGNELALPSKYVNFLYLASHYEKLKGSPEDNEQKQLFVEQHKHYLDEIIEQISEFSKRVILADANLDKVLSAYNKHRDKPIREQAENIIHLFTLTNLGAPAAFKYFDTTIDRKRYTSTKEVLDATLIHQSITGLYETRIDLSQLGGDGGGSSGSSGSSGSSGSSGGTLNIEDEYRLHEISTEPDVSPGSTWLSDFPQAWAETGGMGLAVRQAPLIIPLKATSTPVSIKQYPMSQEAKLGIKPHIQRLLDQGILVPCQSPWNTPLLPVKKPGTNDYRPVQGLREVNKRVEDIHPTVPNPYNLLSGLPTSHRWYTVLDLKDAFFCLRLHPTSQPLFASEWRDPGMGISGQLTWTRLPQGFKNSPTLFNEALHRGLADFRIQHPDLILLQYVDDLLLAATSELDCQQGTRALLKTLGNLGYRASAKKAQICQKQVKYLGYLLREGQRWLTEARKETVMGQPTPKTPRQLREFLGTAGFCRLWIPRFAEMAAPLYPLTKPGTLFNWGPDQQKAYHEIKQALLTAPALGLPDLTKPFELFVDEKQGYAKGVLTQKLGPWRRPVAYLSKKLDPVAAGWPPCLRMVAAIAVLTKDAGKLTMGQPLVILAPHAVEALVKQPPDRWLSNARMTHYQAMLLDTDRVQFGPVVALNPATLLPLPEEGAPHDCLEILAETHGTEPDLTDQPIPDADHTWYTDGSSFLQEGQRKAGAAVTTETEVIWARALPAGTSAQRAELIALTQALKMAEGKRLNVYTDSRYAFATAHIHGEIYKRRGWLTSEGREIKNKSEILALLKALFLPKRLSIIHCLGHQKGDSAEARGNRLADQAAREAAIKTPPDTSTLLAGKRTADGSEFEKRTADGSEFESPKKKAKVE

SEQ ID NO: 6336 - protein, 2091 aa, synthetic construct
MPAAKRVKLDGGDKKYSIGLDIGTNSVGWAVITDEYKVPSKKFKVLGNTDRHSIKKNLIGALLFDSGETAEATRLKRTARRRYTRRKNRICYLQEIFSNEMAKVDDSFFHRLEESFLVEEDKKHERHPIFGNIVDEVAYHEKYPTIYHLRKKLVDSTDKADLRLIYLALAHMIKFRGHFLIEGDLNPDNSDVDKLFIQLVQTYNQLFEENPINASGVDAKAILSARLSKSRRLENLIAQLPGEKKNGLFGNLIALSLGLTPNFKSNFDLAEDAKLQLSKDTYDDDLDNLLAQIGDQYADLFLAAKNLSDAILLSDILRVNTEITKAPLSASMIKRYDEHHQDLTLLKALVRQQLPEKYKEIFFDQSKNGYAGYIDGGASQEEFYKFIKPILEKMDGTEELLVKLNREDLLRKQRTFDNGSIPHQIHLGELHAILRRQEDFYPFLKDNREKIEKILTFRIPYYVGPLARGNSRFAWMTRKSEETITPWNFEEVVDKGASAQSFIERMTNFDKNLPNEKVLPKHSLLYEYFTVYNELTKVKYVTEGMRKPAFLSGEQKKAIVDLLFKTNRKVTVKQLKEDYFKKIECFDSVEISGVEDRFNASLGTYHDLLKIIKDKDFLDNEENEDILEDIVLTLTLFEDREMIEERLKTYAHLFDDKVMKQLKRRRYTGWGRLSRKLINGIRDKQSGKTILDFLKSDGFANRNFMQLIHDDSLTFKEDIQKAQVSGQGDSLHEHIANLAGSPAIKKGILQTVKVVDELVKVMGRHKPENIVIEMARENQTTQKGQKNSRERMKRIEEGIKELGSQILKEHPVENTQLQNEKLYLYYLQNGRDMYVDQELDINRLSDYDVDHIVPQSFLKDDSIDNKVLTRSDKARGKSDNVPSEEVVKKMKNYWRQLLNAKLITQRKFDNLTKAERGGLSELDKAGFIKRQLVETRQITKHVAQILDSRMNTKYDENDKLIREVKVITLKSKLVSDFRKDFQFYKVREINNYHHAHDAYLNAVVGTALIKKYPKLESEFVYGDYKVYDVRKMIAKSEQEIGKATAKYFFYSNIMNFFKTEITLANGEIRKRPLIETNGETGEIVWDKGRDFATVRKVLSMPQVNIVKKTEVQTGGFSKESILPKRNSDKLIARKKDWDPKKYGGFDSPTVAYSVLVVAKVEKGKSKKLKSVKELLGITIMERSSFEKNPIDFLEAKGYKEVKKDLIIKLPKYSLFELENGRKRMLASAGELQKGNELALPSKYVNFLYLASHYEKLKGSPEDNEQKQLFVEQHKHYLDEIIEQISEFSKRVILADANLDKVLSAYNKHRDKPIREQAENIIHLFTLTNLGAPAAFKYFDTTIDRKRYTSTKEVLDATLIHQSITGLYETRIDLSQLGGDGGGSSGSSGSSGSSGSSGGIPWLMKKPLQLTTLVPLQEYEERLLKQTMLTGSYKEKLQSLFLKYDALWQHWENQVGHRRIKPHHIATGTVNPRPQKQYPINPKAKASIQTVINDLLKQGVLIQQNSIMNTPVYPVPKPDGKWRMVLDYREVNKTIPLIAAQNQHSAGILSSIFRGKYKTTLDLSNGFWAHSITPESYWLTAFTWLGQQYCWTRLPQGFLNSPALFNADVVDLLKEVPNVQVYVDDIYISHDDPREHLEQLEKVFSLLLNAGYVVSLKKSEIAQHEVEFLGFNITKEGRGLTETFKQKLLNITPPRDLKQLQSILGKLNFARNFIPNFSELVKPLYNIIATAPGKYITWTTDNSQQLQNIISMLNSAENLEERNPEVRLIMKVNTSPSAGYIRFYNEFAKRPIMYLNYVYTKAEVKFTNTEKLLTTIHKGLIKALDLGMGQEILVYSPIVSMTKIQKTPLPERKALPIRWITWMSYLEDPRIQFHYDKTLPELQQVPTVTDDIIAKIKHPSEFSMVFYTDGSAIKHPNVNKSHNAGMGIAQVQFKPEFTVINTWSIPLGDHTAQLAEVAAVEFACKKALKIDGPVLIVTDSFYVAESVNKELPYWQSNGFFNNKKKPLKHVSKWKSIADCIQLKPDIIIIHEKGHQPTASTFHTEGNNLADKLATQGSYVVNAGKRTADGSEFEKRTADGSEFESPKKKAKVE

SEQ ID NO: 6337 - protein, 2105 aa, synthetic construct
MPAAKRVKLDGGDKKYSIGLDIGTNSVGWAVITDEYKVPSKKFKVLGNTDRHSIKKNLIGALLFDSGETAEATRLKRTARRRYTRRKNRICYLQEIFSNEMAKVDDSFFHRLEESFLVEEDKKHERHPIFGNIVDEVAYHEKYPTIYHLRKKLVDSTDKADLRLIYLALAHMIKFRGHFLIEGDLNPDNSDVDKLFIQLVQTYNQLFEENPINASGVDAKAILSARLSKSRRLENLIAQLPGEKKNGLFGNLIALSLGLTPNFKSNFDLAEDAKLQLSKDTYDDDLDNLLAQIGDQYADLFLAAKNLSDAILLSDILRVNTEITKAPLSASMIKRYDEHHQDLTLLKALVRQQLPEKYKEIFFDQSKNGYAGYIDGGASQEEFYKFIKPILEKMDGTEELLVKLNREDLLRKQRTFDNGSIPHQIHLGELHAILRRQEDFYPFLKDNREKIEKILTFRIPYYVGPLARGNSRFAWMTRKSEETITPWNFEEVVDKGASAQSFIERMTNFDKNLPNEKVLPKHSLLYEYFTVYNELTKVKYVTEGMRKPAFLSGEQKKAIVDLLFKTNRKVTVKQLKEDYFKKIECFDSVEISGVEDRFNASLGTYHDLLKIIKDKDFLDNEENEDILEDIVLTLTLFEDREMIEERLKTYAHLFDDKVMKQLKRRRYTGWGRLSRKLINGIRDKQSGKTILDFLKSDGFANRNFMQLIHDDSLTFKEDIQKAQVSGQGDSLHEHIANLAGSPAIKKGILQTVKVVDELVKVMGRHKPENIVIEMARENQTTQKGQKNSRERMKRIEEGIKELGSQILKEHPVENTQLQNEKLYLYYLQNGRDMYVDQELDINRLSDYDVDHIVPQSFLKDDSIDNKVLTRSDKARGKSDNVPSEEVVKKMKNYWRQLLNAKLITQRKFDNLTKAERGGLSELDKAGFIKRQLVETRQITKHVAQILDSRMNTKYDENDKLIREVKVITLKSKLVSDFRKDFQFYKVREINNYHHAHDAYLNAVVGTALIKKYPKLESEFVYGDYKVYDVRKMIAKSEQEIGKATAKYFFYSNIMNFFKTEITLANGEIRKRPLIETNGETGEIVWDKGRDFATVRKVLSMPQVNIVKKTEVQTGGFSKESILPKRNSDKLIARKKDWDPKKYGGFDSPTVAYSVLVVAKVEKGKSKKLKSVKELLGITIMERSSFEKNPIDFLEAKGYKEVKKDLIIKLPKYSLFELENGRKRMLASAGELQKGNELALPSKYVNFLYLASHYEKLKGSPEDNEQKQLFVEQHKHYLDEIIEQISEFSKRVILADANLDKVLSAYNKHRDKPIREQAENIIHLFTLTNLGAPAAFKYFDTTIDRKRYTSTKEVLDATLIHQSITGLYETRIDLSQLGGDGGGSSGSSGSSGSSGSSGSSGGTAPLEEEYRLFLEAPIQNVTLLEQWKREIPKVWAEINPPGLASTQAPIHVQLLSTALPVRVRQYPITLEAKRSLRETIRKFRAAGILRPVHSPWNTPLLPVRKSGTSEYRMVQDLREVNKRVETIHPTVPNPYTLLSLLPPDRIWYSVLDLKDAFFCIPLAPESQLIFAFEWADAEEGESGQLTWTRLPQGFKNSPTLFDEALNRDLQGFRLDHPSVSLLQYVDDLLIAADTQAACLSATRDLLMTLAELGYRVSGKKAQLCQEEVTYLGFKIHKGSRSLSNSRTQAILQIPVPKTKRQVREFLGTIGYCRLWIPGFAELAQPLYAATRGGNDPLVWGEKEEEAFQSLKLALTQPPALALPSLDKPFQLFVEETSGAAKGVLTQALGPWKRPVAYLSKRLDPVAAGWPRCLRAIAAAALLTREASKLTFGQDIEITSSHNLESLLRSPPDKWLTNARITQYQVLLLDPPRVRFKQTAALNPATLLPETDDTLPIHHCLDTLDSLTSTRPDLTDQPLAQAEATLFTDGSSYIRDGKRYAGAAVVTLDSVIWAEPLPIGTSAQKAELIALTKALEWSKDKSVNIYTDSRYAFATLHVHGMIYRERGLLTAGGKAIKNAPEILALLTAVWLPKRVAVMHCKGHQKDDAPTSTGNRRADEVAREVAIRPLSTQATISAGKRTADGSEFEKRTADGSEFESPKKKAKVE

SEQ ID NO: 6338 - protein, 2180 aa, synthetic construct
MPAAKRVKLDGGDKKYSIGLDIGTNSVGWAVITDEYKVPSKKFKVLGNTDRHSIKKNLIGALLFDSGETAEATRLKRTARRRYTRRKNRICYLQEIFSNEMAKVDDSFFHRLEESFLVEEDKKHERHPIFGNIVDEVAYHEKYPTIYHLRKKLVDSTDKADLRLIYLALAHMIKFRGHFLIEGDLNPDNSDVDKLFIQLVQTYNQLFEENPINASGVDAKAILSARLSKSRRLENLIAQLPGEKKNGLFGNLIALSLGLTPNFKSNFDLAEDAKLQLSKDTYDDDLDNLLAQIGDQYADLFLAAKNLSDAILLSDILRVNTEITKAPLSASMIKRYDEHHQDLTLLKALVRQQLPEKYKEIFFDQSKNGYAGYIDGGASQEEFYKFIKPILEKMDGTEELLVKLNREDLLRKQRTFDNGSIPHQIHLGELHAILRRQEDFYPFLKDNREKIEKILTFRIPYYVGPLARGNSRFAWMTRKSEETITPWNFEEVVDKGASAQSFIERMTNFDKNLPNEKVLPKHSLLYEYFTVYNELTKVKYVTEGMRKPAFLSGEQKKAIVDLLFKTNRKVTVKQLKEDYFKKIECFDSVEISGVEDRFNASLGTYHDLLKIIKDKDFLDNEENEDILEDIVLTLTLFEDREMIEERLKTYAHLFDDKVMKQLKRRRYTGWGRLSRKLINGIRDKQSGKTILDFLKSDGFANRNFMQLIHDDSLTFKEDIQKAQVSGQGDSLHEHIANLAGSPAIKKGILQTVKVVDELVKVMGRHKPENIVIEMARENQTTQKGQKNSRERMKRIEEGIKELGSQILKEHPVENTQLQNEKLYLYYLQNGRDMYVDQELDINRLSDYDVDHIVPQSFLKDDSIDNKVLTRSDKARGKSDNVPSEEVVKKMKNYWRQLLNAKLITQRKFDNLTKAERGGLSELDKAGFIKRQLVETRQITKHVAQILDSRMNTKYDENDKLIREVKVITLKSKLVSDFRKDFQFYKVREINNYHHAHDAYLNAVVGTALIKKYPKLESEFVYGDYKVYDVRKMIAKSEQEIGKATAKYFFYSNIMNFFKTEITLANGEIRKRPLIETNGETGEIVWDKGRDFATVRKVLSMPQVNIVKKTEVQTGGFSKESILPKRNSDKLIARKKDWDPKKYGGFDSPTVAYSVLVVAKVEKGKSKKLKSVKELLGITIMERSSFEKNPIDFLEAKGYKEVKKDLIIKLPKYSLFELENGRKRMLASAGELQKGNELALPSKYVNFLYLASHYEKLKGSPEDNEQKQLFVEQHKHYLDEIIEQISEFSKRVILADANLDKVLSAYNKHRDKPIREQAENIIHLFTLTNLGAPAAFKYFDTTIDRKRYTSTKEVLDATLIHQSITGLYETRIDLSQLGGDGGGSSGSSGSSGSSGSSGSSGGMDLLKPLTVERKGVKIKGYWNSQADITCVPKDLLQGEEPVRQQNVTTIHGTQEGDVYYVNLKIDGRRINTEVIGTTLDYAIITPGDVPWILKKPLELTIKLDLEEQQGTLLNNSILSKKGKEELKQLFEKYSALWQSWENQVGHRRIRPHKIATGTVKPTPQKQYHINPKAKPDIQIVINDLLKQGVLIQKESTMNTPVYPVPKPNGRWRMVLDYRAVNKVTPLIAVQNQHSYGILGSLFKGRYKTTIDLSNGFWAHPIVPEDYWITAFTWQGKQYCWTVLPQGFLNSPGLFNGDVVDLLQGIPNVEVYVDDVYISHDSEKEHLEYLDILFNRLKEAGYIISLKKSNIANSIVDFLGFQITNEGRGLTDTFKEKLENITAPTTLKQLQSILGLLNFARNFIPDFTELIAPLYALIPKSPKNYVPWQIEHSTTLETLITKLNGAEYLQGRKGDKTLIMKVNASYTTGYIRYYNEGEKKPISYVSIVFSKTELKFTELEKLLTTVHKGLLKALDLSMGQNIHVYSPIVSMQNIQKTPQTAKKALASRWLSWLSYLEDPRIRFFYDPQMPALKDLPAVDTGKDNKKHPSNFQHIFYTDGSAITSPTKEGHLNAGMGIVYFINKDGNLQKQQEWSISLGNHTAQFAEIAAFEFALKKCLPLGGNILVVTDSNYVAKAYNEELDVWASNGFVNNRKKPLKHISKWKSVADLKRLRPDVVVTHEPGHQKLDSSPHAYGNNLADQLATQASFKVHAGKRTADGSEFEKRTADGSEFESPKKKAKVE

SEQ ID NO: 6339 - protein, 2102 aa, synthetic construct
MPAAKRVKLDGGDKKYSIGLDIGTNSVGWAVITDEYKVPSKKFKVLGNTDRHSIKKNLIGALLFDSGETAEATRLKRTARRRYTRRKNRICYLQEIFSNEMAKVDDSFFHRLEESFLVEEDKKHERHPIFGNIVDEVAYHEKYPTIYHLRKKLVDSTDKADLRLIYLALAHMIKFRGHFLIEGDLNPDNSDVDKLFIQLVQTYNQLFEENPINASGVDAKAILSARLSKSRRLENLIAQLPGEKKNGLFGNLIALSLGLTPNFKSNFDLAEDAKLQLSKDTYDDDLDNLLAQIGDQYADLFLAAKNLSDAILLSDILRVNTEITKAPLSASMIKRYDEHHQDLTLLKALVRQQLPEKYKEIFFDQSKNGYAGYIDGGASQEEFYKFIKPILEKMDGTEELLVKLNREDLLRKQRTFDNGSIPHQIHLGELHAILRRQEDFYPFLKDNREKIEKILTFRIPYYVGPLARGNSRFAWMTRKSEETITPWNFEEVVDKGASAQSFIERMTNFDKNLPNEKVLPKHSLLYEYFTVYNELTKVKYVTEGMRKPAFLSGEQKKAIVDLLFKTNRKVTVKQLKEDYFKKIECFDSVEISGVEDRFNASLGTYHDLLKIIKDKDFLDNEENEDILEDIVLTLTLFEDREMIEERLKTYAHLFDDKVMKQLKRRRYTGWGRLSRKLINGIRDKQSGKTILDFLKSDGFANRNFMQLIHDDSLTFKEDIQKAQVSGQGDSLHEHIANLAGSPAIKKGILQTVKVVDELVKVMGRHKPENIVIEMARENQTTQKGQKNSRERMKRIEEGIKELGSQILKEHPVENTQLQNEKLYLYYLQNGRDMYVDQELDINRLSDYDVDHIVPQSFLKDDSIDNKVLTRSDKARGKSDNVPSEEVVKKMKNYWRQLLNAKLITQRKFDNLTKAERGGLSELDKAGFIKRQLVETRQITKHVAQILDSRMNTKYDENDKLIREVKVITLKSKLVSDFRKDFQFYKVREINNYHHAHDAYLNAVVGTALIKKYPKLESEFVYGDYKVYDVRKMIAKSEQEIGKATAKYFFYSNIMNFFKTEITLANGEIRKRPLIETNGETGEIVWDKGRDFATVRKVLSMPQVNIVKKTEVQTGGFSKESILPKRNSDKLIARKKDWDPKKYGGFDSPTVAYSVLVVAKVEKGKSKKLKSVKELLGITIMERSSFEKNPIDFLEAKGYKEVKKDLIIKLPKYSLFELENGRKRMLASAGELQKGNELALPSKYVNFLYLASHYEKLKGSPEDNEQKQLFVEQHKHYLDEIIEQISEFSKRVILADANLDKVLSAYNKHRDKPIREQAENIIHLFTLTNLGAPAAFKYFDTTIDRKRYTSTKEVLDATLIHQSITGLYETRIDLSQLGGDGGGSSGSSGSSGSSGSSGSSGGTLQLEEEYRLFEPESTQKQEMDIWLKNFPQAWAETGGMGTAHCQAPVLIQLKATATPISIRQYPMPHEAYQGIKPHIRRMLDQGILKPCQSPWNTPLLPVKKPGTEDYRPVQDLREVNKRVEDIHPTVPNPYNLLSTLPPSHPWYTVLDLKDAFFCLRLHSESQLLFAFEWRDPEIGLSGQLTWTRLPQGFKNSPTLFNEALHSDLADFRVRYPALVLLQYVDDLLLAAATRTECLEGTKALLETLGNKGYRASAKKAQICLQEVTYLGYSLKDGQRWLTKARKEAILSIPVPKNSRQVREFLGTAGYCRLWIPGFAELAAPLYPLTRPGTLFQWGTEQQLAFEDIKKALLSSPALGLPDITKPFELFIDENSGFAKGVLVQKLGPWKRPVAYLSKKLDTVASGWPPCLRMVAAIAILVKDAGKLTLGQPLTILTSHPVEALVRQPPNKWLSNARMTHYQAMLLDAERVHFGPTVSLNPATLLPLPSGGNHHDCLQILAETHGTRPDLTDQPLPDADLTWYTDGSSFIRNGEREAGAAVTTESEVIWAAPLPPGTSAQRAELIALTQALKMAEGKKLTVYTDSRYAFATTHVHGEIYRRRGWLTSEGKEIKNKNEILALLEALFLPKRLSIIHCPGHQKGDSPQAKGNRLADDTAKKAATETHSSLTVLPAGKRTADGSEFEKRTADGSEFESPKKKAKVE

SEQ ID NO: 6340 - protein, 2094 aa, synthetic construct
MPAAKRVKLDGGDKKYSIGLDIGTNSVGWAVITDEYKVPSKKFKVLGNTDRHSIKKNLIGALLFDSGETAEATRLKRTARRRYTRRKNRICYLQEIFSNEMAKVDDSFFHRLEESFLVEEDKKHERHPIFGNIVDEVAYHEKYPTIYHLRKKLVDSTDKADLRLIYLALAHMIKFRGHFLIEGDLNPDNSDVDKLFIQLVQTYNQLFEENPINASGVDAKAILSARLSKSRRLENLIAQLPGEKKNGLFGNLIALSLGLTPNFKSNFDLAEDAKLQLSKDTYDDDLDNLLAQIGDQYADLFLAAKNLSDAILLSDILRVNTEITKAPLSASMIKRYDEHHQDLTLLKALVRQQLPEKYKEIFFDQSKNGYAGYIDGGASQEEFYKFIKPILEKMDGTEELLVKLNREDLLRKQRTFDNGSIPHQIHLGELHAILRRQEDFYPFLKDNREKIEKILTFRIPYYVGPLARGNSRFAWMTRKSEETITPWNFEEVVDKGASAQSFIERMTNFDKNLPNEKVLPKHSLLYEYFTVYNELTKVKYVTEGMRKPAFLSGEQKKAIVDLLFKTNRKVTVKQLKEDYFKKIECFDSVEISGVEDRFNASLGTYHDLLKIIKDKDFLDNEENEDILEDIVLTLTLFEDREMIEERLKTYAHLFDDKVMKQLKRRRYTGWGRLSRKLINGIRDKQSGKTILDFLKSDGFANRNFMQLIHDDSLTFKEDIQKAQVSGQGDSLHEHIANLAGSPAIKKGILQTVKVVDELVKVMGRHKPENIVIEMARENQTTQKGQKNSRERMKRIEEGIKELGSQILKEHPVENTQLQNEKLYLYYLQNGRDMYVDQELDINRLSDYDVDHIVPQSFLKDDSIDNKVLTRSDKARGKSDNVPSEEVVKKMKNYWRQLLNAKLITQRKFDNLTKAERGGLSELDKAGFIKRQLVETRQITKHVAQILDSRMNTKYDENDKLIREVKVITLKSKLVSDFRKDFQFYKVREINNYHHAHDAYLNAVVGTALIKKYPKLESEFVYGDYKVYDVRKMIAKSEQEIGKATAKYFFYSNIMNFFKTEITLANGEIRKRPLIETNGETGEIVWDKGRDFATVRKVLSMPQVNIVKKTEVQTGGFSKESILPKRNSDKLIARKKDWDPKKYGGFDSPTVAYSVLVVAKVEKGKSKKLKSVKELLGITIMERSSFEKNPIDFLEAKGYKEVKKDLIIKLPKYSLFELENGRKRMLASAGELQKGNELALPSKYVNFLYLASHYEKLKGSPEDNEQKQLFVEQHKHYLDEIIEQISEFSKRVILADANLDKVLSAYNKHRDKPIREQAENIIHLFTLTNLGAPAAFKYFDTTIDRKRYTSTKEVLDATLIHQSITGLYETRIDLSQLGGDGGGSSGSSGSSGSSGSSGSSGGVPWLTQQPLQLTILVPLQEYQEKILSKTALPEDQKQQLKTLFVKYDNLWQHWENQVGHRKIRPHNIATGDYPPRPQKQYPINPKAKPSIQIVIDDLLKQGVLTPQNSTMNTPVYPVPKPDGRWRMVLDYREVNKTIPLTAAQNQHSAGILATIVRQKYKTTLDLANGFWAHPITPESYWLTAFTWQGKQYCWTRLPQGFLNSPALFNADVVDLLKEIPNVQVYVDDIYLSHDDPKEHVQQLEKVFQILLQAGYVVSLKKSEIGQKTVEFLGFNITKEGRGLTDTFKTKLLNITPPKDLKQLQSILGLLNFARNFIPNFAELVQPLYNLIAPAKGKYIEWSEENTKQLNMVIEALNTASNLEERLPEQRLVIKVNTSPSAGYVRYYNETGKKPIMYLNYVFSKAELKFSMLEKLLTTMHKALIKAMDLAMGQEILVYSPIVSMTKIQKTPLPERKALPIRWITWMTYLEDPRIQFHYDKTLPELKHIPDVYTSSQSPVKHPSQYEGVFYTDGSAIKSPDPTKSNNAGMGIVHATYKPEYQVLNQWSIPLGNHTAQMAEIAAVEFACKKALKIPGPVLVITDSFYVAESANKELPYWKSNGFVNNKKKPLKHISKWKSIAECLSMKPDITIQHEKGISLQIPVFILKGNALADKLATQGSYVVNAGKRTADGSEFEKRTADGSEFESPKKKAKVE

SEQ ID NO: 6341 - protein, 2094 aa, synthetic construct
MPAAKRVKLDGGDKKYSIGLDIGTNSVGWAVITDEYKVPSKKFKVLGNTDRHSIKKNLIGALLFDSGETAEATRLKRTARRRYTRRKNRICYLQEIFSNEMAKVDDSFFHRLEESFLVEEDKKHERHPIFGNIVDEVAYHEKYPTIYHLRKKLVDSTDKADLRLIYLALAHMIKFRGHFLIEGDLNPDNSDVDKLFIQLVQTYNQLFEENPINASGVDAKAILSARLSKSRRLENLIAQLPGEKKNGLFGNLIALSLGLTPNFKSNFDLAEDAKLQLSKDTYDDDLDNLLAQIGDQYADLFLAAKNLSDAILLSDILRVNTEITKAPLSASMIKRYDEHHQDLTLLKALVRQQLPEKYKEIFFDQSKNGYAGYIDGGASQEEFYKFIKPILEKMDGTEELLVKLNREDLLRKQRTFDNGSIPHQIHLGELHAILRRQEDFYPFLKDNREKIEKILTFRIPYYVGPLARGNSRFAWMTRKSEETITPWNFEEVVDKGASAQSFIERMTNFDKNLPNEKVLPKHSLLYEYFTVYNELTKVKYVTEGMRKPAFLSGEQKKAIVDLLFKTNRKVTVKQLKEDYFKKIECFDSVEISGVEDRFNASLGTYHDLLKIIKDKDFLDNEENEDILEDIVLTLTLFEDREMIEERLKTYAHLFDDKVMKQLKRRRYTGWGRLSRKLINGIRDKQSGKTILDFLKSDGFANRNFMQLIHDDSLTFKEDIQKAQVSGQGDSLHEHIANLAGSPAIKKGILQTVKVVDELVKVMGRHKPENIVIEMARENQTTQKGQKNSRERMKRIEEGIKELGSQILKEHPVENTQLQNEKLYLYYLQNGRDMYVDQELDINRLSDYDVDHIVPQSFLKDDSIDNKVLTRSDKARGKSDNVPSEEVVKKMKNYWRQLLNAKLITQRKFDNLTKAERGGLSELDKAGFIKRQLVETRQITKHVAQILDSRMNTKYDENDKLIREVKVITLKSKLVSDFRKDFQFYKVREINNYHHAHDAYLNAVVGTALIKKYPKLESEFVYGDYKVYDVRKMIAKSEQEIGKATAKYFFYSNIMNFFKTEITLANGEIRKRPLIETNGETGEIVWDKGRDFATVRKVLSMPQVNIVKKTEVQTGGFSKESILPKRNSDKLIARKKDWDPKKYGGFDSPTVAYSVLVVAKVEKGKSKKLKSVKELLGITIMERSSFEKNPIDFLEAKGYKEVKKDLIIKLPKYSLFELENGRKRMLASAGELQKGNELALPSKYVNFLYLASHYEKLKGSPEDNEQKQLFVEQHKHYLDEIIEQISEFSKRVILADANLDKVLSAYNKHRDKPIREQAENIIHLFTLTNLGAPAAFKYFDTTIDRKRYTSTKEVLDATLIHQSITGLYETRIDLSQLGGDGGGSSGSSGSSGSSGSSGSSGGVPWLTQQPLQLTILVPLQEYQEKILSKTALPEDQKQQLKTLFVKYDNLWQHWENQVGHRKIRPHNIATGDYPPRPQKQYPINPKAKPSIQIVIDDLLKQGVLTPQNSTMNTPVYPVPKPDGRWRMVLDYREVNKTIPLTAAQNQHSAGILATIVRQKYKTTLDLANGFWAHPITPESYWLTAFTWQGKQYCWTRLPQGFLNSPALFNADVVDLLKEIPNVQVYVDDIYLSHDDPKEHVQQLEKVFQILLQAGYVVSLKKSEIGQKTVEFLGFNITKEGRGLTDTFKTKLLNITPPKDLKQLQSILGKLNFARNFIPNFAELVQPLYNLIAPAKGKYIEWSEENTKQLNMVIEALNTASNLEERLPEQRLVIKVNTSPSAGYVRYYNETGKKPIMYLNYVFSKAELKFSMLEKLLTTMHKALIKAMDLAMGQEILVYSPIVSMTKIQKTPLPERKALPIRWITWMTYLEDPRIQFHYDKTLPELKHIPDVYTSSQSPVKHPSQYEGVFYTDGSAIKSPDPTKSNNAGMGIVHATYKPEYQVLNQWSIPLGNHTAQMAEIAAVEFACKKALKIPGPVLVITDSFYVAESANKELPYWKSNGFVNNKKKPLKHISKWKSIAECLSMKPDITIQHEKGISLQIPVFILKGNALADKLATQGSYVVNAGKRTADGSEFEKRTADGSEFESPKKKAKVE

SEQ ID NO: 6342 - protein, 2183 aa, synthetic construct
MPAAKRVKLDGGDKKYSIGLDIGTNSVGWAVITDEYKVPSKKFKVLGNTDRHSIKKNLIGALLFDSGETAEATRLKRTARRRYTRRKNRICYLQEIFSNEMAKVDDSFFHRLEESFLVEEDKKHERHPIFGNIVDEVAYHEKYPTIYHLRKKLVDSTDKADLRLIYLALAHMIKFRGHFLIEGDLNPDNSDVDKLFIQLVQTYNQLFEENPINASGVDAKAILSARLSKSRRLENLIAQLPGEKKNGLFGNLIALSLGLTPNFKSNFDLAEDAKLQLSKDTYDDDLDNLLAQIGDQYADLFLAAKNLSDAILLSDILRVNTEITKAPLSASMIKRYDEHHQDLTLLKALVRQQLPEKYKEIFFDQSKNGYAGYIDGGASQEEFYKFIKPILEKMDGTEELLVKLNREDLLRKQRTFDNGSIPHQIHLGELHAILRRQEDFYPFLKDNREKIEKILTFRIPYYVGPLARGNSRFAWMTRKSEETITPWNFEEVVDKGASAQSFIERMTNFDKNLPNEKVLPKHSLLYEYFTVYNELTKVKYVTEGMRKPAFLSGEQKKAIVDLLFKTNRKVTVKQLKEDYFKKIECFDSVEISGVEDRFNASLGTYHDLLKIIKDKDFLDNEENEDILEDIVLTLTLFEDREMIEERLKTYAHLFDDKVMKQLKRRRYTGWGRLSRKLINGIRDKQSGKTILDFLKSDGFANRNFMQLIHDDSLTFKEDIQKAQVSGQGDSLHEHIANLAGSPAIKKGILQTVKVVDELVKVMGRHKPENIVIEMARENQTTQKGQKNSRERMKRIEEGIKELGSQILKEHPVENTQLQNEKLYLYYLQNGRDMYVDQELDINRLSDYDVDHIVPQSFLKDDSIDNKVLTRSDKARGKSDNVPSEEVVKKMKNYWRQLLNAKLITQRKFDNLTKAERGGLSELDKAGFIKRQLVETRQITKHVAQILDSRMNTKYDENDKLIREVKVITLKSKLVSDFRKDFQFYKVREINNYHHAHDAYLNAVVGTALIKKYPKLESEFVYGDYKVYDVRKMIAKSEQEIGKATAKYFFYSNIMNFFKTEITLANGEIRKRPLIETNGETGEIVWDKGRDFATVRKVLSMPQVNIVKKTEVQTGGFSKESILPKRNSDKLIARKKDWDPKKYGGFDSPTVAYSVLVVAKVEKGKSKKLKSVKELLGITIMERSSFEKNPIDFLEAKGYKEVKKDLIIKLPKYSLFELENGRKRMLASAGELQKGNELALPSKYVNFLYLASHYEKLKGSPEDNEQKQLFVEQHKHYLDEIIEQISEFSKRVILADANLDKVLSAYNKHRDKPIREQAENIIHLFTLTNLGAPAAFKYFDTTIDRKRYTSTKEVLDATLIHQSITGLYETRIDLSQLGGDGGGSSGSSGSSGSSGSSGSSGGMNPLQLLQPLPAEIKGTKLLAHWNSGATITCIPESFLEDEQPIKKTLIKTIHGEKQQNVYYVTFKVKGRKVEAEVIASPYEYILLSPTDVPWLTQQPLQLTILVPLQEYQEKILSKTALPEDQKQQLKTLFVKYDNLWQHWENQVGHRKIRPHNIATGDYPPRPQKQYPINPKAKPSIQIVIDDLLKQGVLTPQNSTMNTPVYPVPKPDGRWRMVLDYREVNKTIPLTAAQNQHSAGILATIVRQKYKTTLDLANGFWAHPITPESYWLTAFTWQGKQYCWTRLPQGFLNSPALFNADVVDLLKEIPNVQVYVDDIYLSHDDPKEHVQQLEKVFQILLQAGYVVSLKKSEIGQKTVEFLGFNITKEGRGLTDTFKTKLLNITPPKDLKQLQSILGLLNFARNFIPNFAELVQPLYNLIAPAKGKYIEWSEENTKQLNMVIEALNTASNLEERLPEQRLVIKVNTSPSAGYVRYYNETGKKPIMYLNYVFSKAELKFSMLEKLLTTMHKALIKAMDLAMGQEILVYSPIVSMTKIQKTPLPERKALPIRWITWMTYLEDPRIQFHYDKTLPELKHIPDVYTSSQSPVKHPSQYEGVFYTDGSAIKSPDPTKSNNAGMGIVHATYKPEYQVLNQWSIPLGNHTAQMAEIAAVEFACKKALKIPGPVLVITDSFYVAESANKELPYWKSNGFVNNKKKPLKHISKWKSIAECLSMKPDITIQHEKGISLQIPVFILKGNALADKLATQGSYVVNAGKRTADGSEFEKRTADGSEFESPKKKAKVE

SEQ ID NO: 6343 - protein, 2101 aa, synthetic construct
MPAAKRVKLDGGDKKYSIGLDIGTNSVGWAVITDEYKVPSKKFKVLGNTDRHSIKKNLIGALLFDSGETAEATRLKRTARRRYTRRKNRICYLQEIFSNEMAKVDDSFFHRLEESFLVEEDKKHERHPIFGNIVDEVAYHEKYPTIYHLRKKLVDSTDKADLRLIYLALAHMIKFRGHFLIEGDLNPDNSDVDKLFIQLVQTYNQLFEENPINASGVDAKAILSARLSKSRRLENLIAQLPGEKKNGLFGNLIALSLGLTPNFKSNFDLAEDAKLQLSKDTYDDDLDNLLAQIGDQYADLFLAAKNLSDAILLSDILRVNTEITKAPLSASMIKRYDEHHQDLTLLKALVRQQLPEKYKEIFFDQSKNGYAGYIDGGASQEEFYKFIKPILEKMDGTEELLVKLNREDLLRKQRTFDNGSIPHQIHLGELHAILRRQEDFYPFLKDNREKIEKILTFRIPYYVGPLARGNSRFAWMTRKSEETITPWNFEEVVDKGASAQSFIERMTNFDKNLPNEKVLPKHSLLYEYFTVYNELTKVKYVTEGMRKPAFLSGEQKKAIVDLLFKTNRKVTVKQLKEDYFKKIECFDSVEISGVEDRFNASLGTYHDLLKIIKDKDFLDNEENEDILEDIVLTLTLFEDREMIEERLKTYAHLFDDKVMKQLKRRRYTGWGRLSRKLINGIRDKQSGKTILDFLKSDGFANRNFMQLIHDDSLTFKEDIQKAQVSGQGDSLHEHIANLAGSPAIKKGILQTVKVVDELVKVMGRHKPENIVIEMARENQTTQKGQKNSRERMKRIEEGIKELGSQILKEHPVENTQLQNEKLYLYYLQNGRDMYVDQELDINRLSDYDVDHIVPQSFLKDDSIDNKVLTRSDKARGKSDNVPSEEVVKKMKNYWRQLLNAKLITQRKFDNLTKAERGGLSELDKAGFIKRQLVETRQITKHVAQILDSRMNTKYDENDKLIREVKVITLKSKLVSDFRKDFQFYKVREINNYHHAHDAYLNAVVGTALIKKYPKLESEFVYGDYKVYDVRKMIAKSEQEIGKATAKYFFYSNIMNFFKTEITLANGEIRKRPLIETNGETGEIVWDKGRDFATVRKVLSMPQVNIVKKTEVQTGGFSKESILPKRNSDKLIARKKDWDPKKYGGFDSPTVAYSVLVVAKVEKGKSKKLKSVKELLGITIMERSSFEKNPIDFLEAKGYKEVKKDLIIKLPKYSLFELENGRKRMLASAGELQKGNELALPSKYVNFLYLASHYEKLKGSPEDNEQKQLFVEQHKHYLDEIIEQISEFSKRVILADANLDKVLSAYNKHRDKPIREQAENIIHLFTLTNLGAPAAFKYFDTTIDRKRYTSTKEVLDATLIHQSITGLYETRIDLSQLGGDGGGSSGSSGSSGSSGSSGSSGGVLNLEEEYRLHEKPVPSSIDPSWLQLFPTVWAERAGMGLANQVPPVVVELRSGASPVAVRQYPMSKEAREGIRPHIQKFLDLGVLVPCRSPWNTPLLPVKKPGTNDYRPVQDLREINKRVQDIHPTVPNPYNLLSSLPPSYTWYSVLDLKDAFFCLRLHPNSQPLFAFEWKDPEKGNTGQLTWTRLPQGFKNSPTLFNEALHRDLAPFRALNPQVVLLQYVDDLLVAAPTYEDCKKGTQKLLQELSKLGYRVSAKKAQLCQREVTYLGYLLKEGKRWLTPARKATVMKIPVPTTPRQVREFLGKAGFCRLFIPGFASLAAPLYPLTKPSIPFIWTEEHQQAFDHIKKALLSAPALALPDLTKPFTLYIDERAGVARGVLTQTLGPWRRPVAYLSKKLDPVASGWPTCLKAVAAVALLLKDADKLTLGQNVTVIASHSLESIVRQPPDRWMTNARMTHYQSLLLNERVSFAPPAVLNPATLLPVESEATPVHRCSEILAEETGTRRDLEDQPLPGVPTWYTDGSSFITEGKRRAGAPIVDGKRTVWASSLPEGTSAQKAELVALTQALRLAEGKNINIYTDSRYAFATAHIHGAIYKQRGWLTSAGKDIKNKEEILALLEAIHLPRRVAIIHCPGHQRGSNPVATGNRRADEAAKQAALSTRVLAGTTKPAGKRTADGSEFEKRTADGSEFESPKKKAKVE

SEQ ID NO: 6344 - protein, 2134 aa, synthetic construct
MPAAKRVKLDGGDKKYSIGLDIGTNSVGWAVITDEYKVPSKKFKVLGNTDRHSIKKNLIGALLFDSGETAEATRLKRTARRRYTRRKNRICYLQEIFSNEMAKVDDSFFHRLEESFLVEEDKKHERHPIFGNIVDEVAYHEKYPTIYHLRKKLVDSTDKADLRLIYLALAHMIKFRGHFLIEGDLNPDNSDVDKLFIQLVQTYNQLFEENPINASGVDAKAILSARLSKSRRLENLIAQLPGEKKNGLFGNLIALSLGLTPNFKSNFDLAEDAKLQLSKDTYDDDLDNLLAQIGDQYADLFLAAKNLSDAILLSDILRVNTEITKAPLSASMIKRYDEHHQDLTLLKALVRQQLPEKYKEIFFDQSKNGYAGYIDGGASQEEFYKFIKPILEKMDGTEELLVKLNREDLLRKQRTFDNGSIPHQIHLGELHAILRRQEDFYPFLKDNREKIEKILTFRIPYYVGPLARGNSRFAWMTRKSEETITPWNFEEVVDKGASAQSFIERMTNFDKNLPNEKVLPKHSLLYEYFTVYNELTKVKYVTEGMRKPAFLSGEQKKAIVDLLFKTNRKVTVKQLKEDYFKKIECFDSVEISGVEDRFNASLGTYHDLLKIIKDKDFLDNEENEDILEDIVLTLTLFEDREMIEERLKTYAHLFDDKVMKQLKRRRYTGWGRLSRKLINGIRDKQSGKTILDFLKSDGFANRNFMQLIHDDSLTFKEDIQKAQVSGQGDSLHEHIANLAGSPAIKKGILQTVKVVDELVKVMGRHKPENIVIEMARENQTTQKGQKNSRERMKRIEEGIKELGSQILKEHPVENTQLQNEKLYLYYLQNGRDMYVDQELDINRLSDYDVDHIVPQSFLKDDSIDNKVLTRSDKARGKSDNVPSEEVVKKMKNYWRQLLNAKLITQRKFDNLTKAERGGLSELDKAGFIKRQLVETRQITKHVAQILDSRMNTKYDENDKLIREVKVITLKSKLVSDFRKDFQFYKVREINNYHHAHDAYLNAVVGTALIKKYPKLESEFVYGDYKVYDVRKMIAKSEQEIGKATAKYFFYSNIMNFFKTEITLANGEIRKRPLIETNGETGEIVWDKGRDFATVRKVLSMPQVNIVKKTEVQTGGFSKESILPKRNSDKLIARKKDWDPKKYGGFDSPTVAYSVLVVAKVEKGKSKKLKSVKELLGITIMERSSFEKNPIDFLEAKGYKEVKKDLIIKLPKYSLFELENGRKRMLASAGELQKGNELALPSKYVNFLYLASHYEKLKGSPEDNEQKQLFVEQHKHYLDEIIEQISEFSKRVILADANLDKVLSAYNKHRDKPIREQAENIIHLFTLTNLGAPAAFKYFDTTIDRKRYTSTKEVLDATLIHQSITGLYETRIDLSQLGGDGGGSSGSSGSSGSSGSSGSSGGLLGRDLLTKLKAQIQFSTEGPQVTWEDRPAMCLVLNLEEEYRLHEKPVPPSIDPSWLQLFPMVWAEKAGMGLANQVPPVVVELKSDASPVAVRQYPMSKEAREGIRPHIQRFLDLGILVPCQSPWNTPLLPVKKPGTNDYRPVQDLREVNKRVQDIHPTVPNPYNLLSSLPPSHTWYSVLDLKDAFFCLKLHPNSQPLFAFEWRDPEKGNTGQLTWTRLPQGFKNSPTLFNEALHRDLASFRALNPQVVMLQYVDDLLVAAPTYRDCKEGTRRLLQELSKLGYRVSAKKAQLCREEVTYLGYLLKGGKRWLTPARKATVMKIPTPTTPRQVREFLGTAGFCRLWIPGFASLAAPLYPLTRPKVPFTWTEAHQEAFGRIKEALLSAPALALPDLTKPFALYVDEKEGVARGVLTQTLGPWRRPVAYLSKKLDPVASGWPTCLKAIAAVALLLKDADKLTLGQNVLVIAPHNLESIVRQPPDRWMTNARMTHYQSLLLNERVSFAPPAILNPATLLPVESDDTPIHICSEILAEETGTRPDLRDQPLPGVPAWYTDGSSFIMDGRRQAGAAIVDNKRTVWASNLPEGTSAQKAELIALTQALRLAEGKSINIYTDSRYAFATAHVHGAIYKQRGWLTSAGKDIKNKEEILALLEAIHLPKRVAIIHCPGHQRGTDPVATGNRKADEAAKQAAQSTRILTETTKNAGKRTADGSEFEKRTADGSEFESPKKKAKVE

SEQ ID NO: 6345 - protein, 2225 aa, synthetic construct
MPAAKRVKLDGGDKKYSIGLDIGTNSVGWAVITDEYKVPSKKFKVLGNTDRHSIKKNLIGALLFDSGETAEATRLKRTARRRYTRRKNRICYLQEIFSNEMAKVDDSFFHRLEESFLVEEDKKHERHPIFGNIVDEVAYHEKYPTIYHLRKKLVDSTDKADLRLIYLALAHMIKFRGHFLIEGDLNPDNSDVDKLFIQLVQTYNQLFEENPINASGVDAKAILSARLSKSRRLENLIAQLPGEKKNGLFGNLIALSLGLTPNFKSNFDLAEDAKLQLSKDTYDDDLDNLLAQIGDQYADLFLAAKNLSDAILLSDILRVNTEITKAPLSASMIKRYDEHHQDLTLLKALVRQQLPEKYKEIFFDQSKNGYAGYIDGGASQEEFYKFIKPILEKMDGTEELLVKLNREDLLRKQRTFDNGSIPHQIHLGELHAILRRQEDFYPFLKDNREKIEKILTFRIPYYVGPLARGNSRFAWMTRKSEETITPWNFEEVVDKGASAQSFIERMTNFDKNLPNEKVLPKHSLLYEYFTVYNELTKVKYVTEGMRKPAFLSGEQKKAIVDLLFKTNRKVTVKQLKEDYFKKIECFDSVEISGVEDRFNASLGTYHDLLKIIKDKDFLDNEENEDILEDIVLTLTLFEDREMIEERLKTYAHLFDDKVMKQLKRRRYTGWGRLSRKLINGIRDKQSGKTILDFLKSDGFANRNFMQLIHDDSLTFKEDIQKAQVSGQGDSLHEHIANLAGSPAIKKGILQTVKVVDELVKVMGRHKPENIVIEMARENQTTQKGQKNSRERMKRIEEGIKELGSQILKEHPVENTQLQNEKLYLYYLQNGRDMYVDQELDINRLSDYDVDHIVPQSFLKDDSIDNKVLTRSDKARGKSDNVPSEEVVKKMKNYWRQLLNAKLITQRKFDNLTKAERGGLSELDKAGFIKRQLVETRQITKHVAQILDSRMNTKYDENDKLIREVKVITLKSKLVSDFRKDFQFYKVREINNYHHAHDAYLNAVVGTALIKKYPKLESEFVYGDYKVYDVRKMIAKSEQEIGKATAKYFFYSNIMNFFKTEITLANGEIRKRPLIETNGETGEIVWDKGRDFATVRKVLSMPQVNIVKKTEVQTGGFSKESILPKRNSDKLIARKKDWDPKKYGGFDSPTVAYSVLVVAKVEKGKSKKLKSVKELLGITIMERSSFEKNPIDFLEAKGYKEVKKDLIIKLPKYSLFELENGRKRMLASAGELQKGNELALPSKYVNFLYLASHYEKLKGSPEDNEQKQLFVEQHKHYLDEIIEQISEFSKRVILADANLDKVLSAYNKHRDKPIREQAENIIHLFTLTNLGAPAAFKYFDTTIDRKRYTSTKEVLDATLIHQSITGLYETRIDLSQLGGDGGGSSGSSGSSGSSGSSGSSGGTLGDQGSRGSDPLPEPRVTLTVEGIPTEFLVNTGAEHSVLTKPMGKMGSKRTVVAGATGSKVYPWTTKRLLKIGQKQVTHSFLVIPECPAPLLGRDLLTKLKAQIQFSTEGPQVTWEDRPAMCLVLNLEEEYRLHEKPVPPSIDPSWLQLFPMVWAEKAGMGLANQVPPVVVELKSDASPVAVRQYPMSKEAREGIRPHIQRFLDLGILVPCQSPWNTPLLPVKKPGTNDYRPVQDLREVNKRVQDIHPTVPNPYNLLSSLPPSHTWYSVLDLKDAFFCLKLHPNSQPLFAFEWRDPEKGNTGQLTWTRLPQGFKNSPTLFNEALHRDLASFRALNPQVVMLQYVDDLLVAAPTYRDCKEGTRRLLQELSKLGYRVSAKKAQLCREEVTYLGYLLKGGKRWLTPARKATVMKIPTPTTPRQVREFLGTAGFCRLWIPGFASLAAPLYPLTRPKVPFTWTEAHQEAFGRIKEALLSAPALALPDLTKPFALYVDEKEGVARGVLTQTLGPWRRPVAYLSKKLDPVASGWPTCLKAIAAVALLLKDADKLTLGQNVLVIAPHNLESIVRQPPDRWMTNARMTHYQSLLLNERVSFAPPAILNPATLLPVESDDTPIHICSEILAEETGTRPDLRDQPLPGVPAWYTDGSSFIMDGRRQAGAAIVDNKRTVWASNLPEGTSAQKAELIALTQALRLAEGKSINIYTDSRYAFATAHVHGAIYKQRGWLTSAGKDIKNKEEILALLEAIHLPKRVAIIHCPGHQRGTDPVATGNRKADEAAKQAAQSTRILTETTKNAGKRTADGSEFEKRTADGSEFESPKKKAKVE

SEQ ID NO: 6346 - protein, 2225 aa, synthetic construct
MPAAKRVKLDGGDKKYSIGLDIGTNSVGWAVITDEYKVPSKKFKVLGNTDRHSIKKNLIGALLFDSGETAEATRLKRTARRRYTRRKNRICYLQEIFSNEMAKVDDSFFHRLEESFLVEEDKKHERHPIFGNIVDEVAYHEKYPTIYHLRKKLVDSTDKADLRLIYLALAHMIKFRGHFLIEGDLNPDNSDVDKLFIQLVQTYNQLFEENPINASGVDAKAILSARLSKSRRLENLIAQLPGEKKNGLFGNLIALSLGLTPNFKSNFDLAEDAKLQLSKDTYDDDLDNLLAQIGDQYADLFLAAKNLSDAILLSDILRVNTEITKAPLSASMIKRYDEHHQDLTLLKALVRQQLPEKYKEIFFDQSKNGYAGYIDGGASQEEFYKFIKPILEKMDGTEELLVKLNREDLLRKQRTFDNGSIPHQIHLGELHAILRRQEDFYPFLKDNREKIEKILTFRIPYYVGPLARGNSRFAWMTRKSEETITPWNFEEVVDKGASAQSFIERMTNFDKNLPNEKVLPKHSLLYEYFTVYNELTKVKYVTEGMRKPAFLSGEQKKAIVDLLFKTNRKVTVKQLKEDYFKKIECFDSVEISGVEDRFNASLGTYHDLLKIIKDKDFLDNEENEDILEDIVLTLTLFEDREMIEERLKTYAHLFDDKVMKQLKRRRYTGWGRLSRKLINGIRDKQSGKTILDFLKSDGFANRNFMQLIHDDSLTFKEDIQKAQVSGQGDSLHEHIANLAGSPAIKKGILQTVKVVDELVKVMGRHKPENIVIEMARENQTTQKGQKNSRERMKRIEEGIKELGSQILKEHPVENTQLQNEKLYLYYLQNGRDMYVDQELDINRLSDYDVDHIVPQSFLKDDSIDNKVLTRSDKARGKSDNVPSEEVVKKMKNYWRQLLNAKLITQRKFDNLTKAERGGLSELDKAGFIKRQLVETRQITKHVAQILDSRMNTKYDENDKLIREVKVITLKSKLVSDFRKDFQFYKVREINNYHHAHDAYLNAVVGTALIKKYPKLESEFVYGDYKVYDVRKMIAKSEQEIGKATAKYFFYSNIMNFFKTEITLANGEIRKRPLIETNGETGEIVWDKGRDFATVRKVLSMPQVNIVKKTEVQTGGFSKESILPKRNSDKLIARKKDWDPKKYGGFDSPTVAYSVLVVAKVEKGKSKKLKSVKELLGITIMERSSFEKNPIDFLEAKGYKEVKKDLIIKLPKYSLFELENGRKRMLASAGELQKGNELALPSKYVNFLYLASHYEKLKGSPEDNEQKQLFVEQHKHYLDEIIEQISEFSKRVILADANLDKVLSAYNKHRDKPIREQAENIIHLFTLTNLGAPAAFKYFDTTIDRKRYTSTKEVLDATLIHQSITGLYETRIDLSQLGGDGGGSSGSSGSSGSSGSSGSSGGTLGDQGSRGSDPLPEPRVTLTVEGIPTEFLVNTGAEHSVLTKPMGKMGSKRTVVAGATGSKVYPWTTKRLLKIGQKQVTHSFLVIPECPAPLLGRDLLTKLKAQIQFSTEGPQVTWEDRPAMCLVLNLEEEYRLHEKPVPPSIDPSWLQLFPMVWAEKAGMGLANQVPPVVVELKSDASPVAVRQYPMSKEAREGIRPHIQRFLDLGILVPCQSPWNTPLLPVKKPGTNDYRPVQDLREVNKRVQDIHPTVPNPYNLLSSLPPSHTWYSVLDLKDAFFCLKLHPNSQPLFAFEWRDPEKGNTGQLTWTRLPQGFKNSPTLFNEALHRDLASFRALNPQVVMLQYVDDLLVAAPTYRDCKEGTRRLLQELSKLGYRVSAKKAQLCREEVTYLGYLLKGGKRWLTPARKATVMKIPTPTTPRQVREFLGKAGFCRLFIPGFASLAAPLYPLTRPKVPFTWTEAHQEAFGRIKEALLSAPALALPDLTKPFALYVDEKEGVARGVLTQTLGPWRRPVAYLSKKLDPVASGWPTCLKAIAAVALLLKDADKLTLGQNVLVIAPHNLESIVRQPPDRWMTNARMTHYQSLLLNERVSFAPPAILNPATLLPVESDDTPIHICSEILAEETGTRPDLRDQPLPGVPAWYTDGSSFIMDGRRQAGAAIVDNKRTVWASNLPEGTSAQKAELIALTQALRLAEGKSINIYTDSRYAFATAHVHGAIYKQRGWLTSAGKDIKNKEEILALLEAIHLPKRVAIIHCPGHQRGTDPVATGNRKADEAAKQAAQSTRILTETTKNAGKRTADGSEFEKRTADGSEFESPKKKAKVE

SEQ ID NO: 6347 - protein, 2103 aa, synthetic construct
MPAAKRVKLDGGDKKYSIGLDIGTNSVGWAVITDEYKVPSKKFKVLGNTDRHSIKKNLIGALLFDSGETAEATRLKRTARRRYTRRKNRICYLQEIFSNEMAKVDDSFFHRLEESFLVEEDKKHERHPIFGNIVDEVAYHEKYPTIYHLRKKLVDSTDKADLRLIYLALAHMIKFRGHFLIEGDLNPDNSDVDKLFIQLVQTYNQLFEENPINASGVDAKAILSARLSKSRRLENLIAQLPGEKKNGLFGNLIALSLGLTPNFKSNFDLAEDAKLQLSKDTYDDDLDNLLAQIGDQYADLFLAAKNLSDAILLSDILRVNTEITKAPLSASMIKRYDEHHQDLTLLKALVRQQLPEKYKEIFFDQSKNGYAGYIDGGASQEEFYKFIKPILEKMDGTEELLVKLNREDLLRKQRTFDNGSIPHQIHLGELHAILRRQEDFYPFLKDNREKIEKILTFRIPYYVGPLARGNSRFAWMTRKSEETITPWNFEEVVDKGASAQSFIERMTNFDKNLPNEKVLPKHSLLYEYFTVYNELTKVKYVTEGMRKPAFLSGEQKKAIVDLLFKTNRKVTVKQLKEDYFKKIECFDSVEISGVEDRFNASLGTYHDLLKIIKDKDFLDNEENEDILEDIVLTLTLFEDREMIEERLKTYAHLFDDKVMKQLKRRRYTGWGRLSRKLINGIRDKQSGKTILDFLKSDGFANRNFMQLIHDDSLTFKEDIQKAQVSGQGDSLHEHIANLAGSPAIKKGILQTVKVVDELVKVMGRHKPENIVIEMARENQTTQKGQKNSRERMKRIEEGIKELGSQILKEHPVENTQLQNEKLYLYYLQNGRDMYVDQELDINRLSDYDVDHIVPQSFLKDDSIDNKVLTRSDKARGKSDNVPSEEVVKKMKNYWRQLLNAKLITQRKFDNLTKAERGGLSELDKAGFIKRQLVETRQITKHVAQILDSRMNTKYDENDKLIREVKVITLKSKLVSDFRKDFQFYKVREINNYHHAHDAYLNAVVGTALIKKYPKLESEFVYGDYKVYDVRKMIAKSEQEIGKATAKYFFYSNIMNFFKTEITLANGEIRKRPLIETNGETGEIVWDKGRDFATVRKVLSMPQVNIVKKTEVQTGGFSKESILPKRNSDKLIARKKDWDPKKYGGFDSPTVAYSVLVVAKVEKGKSKKLKSVKELLGITIMERSSFEKNPIDFLEAKGYKEVKKDLIIKLPKYSLFELENGRKRMLASAGELQKGNELALPSKYVNFLYLASHYEKLKGSPEDNEQKQLFVEQHKHYLDEIIEQISEFSKRVILADANLDKVLSAYNKHRDKPIREQAENIIHLFTLTNLGAPAAFKYFDTTIDRKRYTSTKEVLDATLIHQSITGLYETRIDLSQLGGDGGGSSGSSGSSGSSGSSGSSGGTLNLEDEYRLYETSAEPEVSPGSTWLSDFPQAWAETGGMGLAVRQAPLIIPLKATSTPVSIKQYPMSQEAKLGIKPHIQRLLDQGILVPCQSPWNTPLLPVKKPGTNDYRPVQDLREVNKRVEDIHPTVPNPYNLLSGLPPSHRWYTVLDLKDAFFCLRLHPTSQPLFAFEWRDPGMGISGQLTWTRLPQGFKNSPTLFNEALHRDLADFRIQHPDLILLQYVDDILLAATSELDCQQGTRALLLTLGNLGYRASAKKAQLCQKQVKYLGYLLKEGQRWLTEARKETVMGQPTPKTPRQLREFLGTAGFCRLWIPGFAEMAAPLYPLTKPGTLFNWGPDQQKAYQEIKQALLTAPALGLPDLTKPFELFVDEKQGYAKGVLTQKLGPWRRPVAYLSKKLDPVAAGWPPCLRMVAAIAVLRKDAGKLTMGQPLVILAPHAVEALVKQPPDRWLSNARMTHYQAMLLDTDRVQFGPVVALNPATLLPLPEEGAPHDCLEILAETHGTRPDLTDQPIPDADHTWYTDGSSFLQEGQRKAGAAVTTETEVIWARALPAGTSAQRAELIALTQALKMAEGKRLNVYTDSRYAFATAHIHGEIYRRRGWLTSEGREIKNKSEILALLKALFLPKRLSIIHCLGHQKGDSAEARGNRLADQAAREAAIKTPPDTSTLLAGKRTADGSEFEKRTADGSEFESPKKKAKVE

SEQ ID NO: 6348 - protein, 2103 aa, synthetic construct
MPAAKRVKLDGGDKKYSIGLDIGTNSVGWAVITDEYKVPSKKFKVLGNTDRHSIKKNLIGALLFDSGETAEATRLKRTARRRYTRRKNRICYLQEIFSNEMAKVDDSFFHRLEESFLVEEDKKHERHPIFGNIVDEVAYHEKYPTIYHLRKKLVDSTDKADLRLIYLALAHMIKFRGHFLIEGDLNPDNSDVDKLFIQLVQTYNQLFEENPINASGVDAKAILSARLSKSRRLENLIAQLPGEKKNGLFGNLIALSLGLTPNFKSNFDLAEDAKLQLSKDTYDDDLDNLLAQIGDQYADLFLAAKNLSDAILLSDILRVNTEITKAPLSASMIKRYDEHHQDLTLLKALVRQQLPEKYKEIFFDQSKNGYAGYIDGGASQEEFYKFIKPILEKMDGTEELLVKLNREDLLRKQRTFDNGSIPHQIHLGELHAILRRQEDFYPFLKDNREKIEKILTFRIPYYVGPLARGNSRFAWMTRKSEETITPWNFEEVVDKGASAQSFIERMTNFDKNLPNEKVLPKHSLLYEYFTVYNELTKVKYVTEGMRKPAFLSGEQKKAIVDLLFKTNRKVTVKQLKEDYFKKIECFDSVEISGVEDRFNASLGTYHDLLKIIKDKDFLDNEENEDILEDIVLTLTLFEDREMIEERLKTYAHLFDDKVMKQLKRRRYTGWGRLSRKLINGIRDKQSGKTILDFLKSDGFANRNFMQLIHDDSLTFKEDIQKAQVSGQGDSLHEHIANLAGSPAIKKGILQTVKVVDELVKVMGRHKPENIVIEMARENQTTQKGQKNSRERMKRIEEGIKELGSQILKEHPVENTQLQNEKLYLYYLQNGRDMYVDQELDINRLSDYDVDHIVPQSFLKDDSIDNKVLTRSDKARGKSDNVPSEEVVKKMKNYWRQLLNAKLITQRKFDNLTKAERGGLSELDKAGFIKRQLVETRQITKHVAQILDSRMNTKYDENDKLIREVKVITLKSKLVSDFRKDFQFYKVREINNYHHAHDAYLNAVVGTALIKKYPKLESEFVYGDYKVYDVRKMIAKSEQEIGKATAKYFFYSNIMNFFKTEITLANGEIRKRPLIETNGETGEIVWDKGRDFATVRKVLSMPQVNIVKKTEVQTGGFSKESILPKRNSDKLIARKKDWDPKKYGGFDSPTVAYSVLVVAKVEKGKSKKLKSVKELLGITIMERSSFEKNPIDFLEAKGYKEVKKDLIIKLPKYSLFELENGRKRMLASAGELQKGNELALPSKYVNFLYLASHYEKLKGSPEDNEQKQLFVEQHKHYLDEIIEQISEFSKRVILADANLDKVLSAYNKHRDKPIREQAENIIHLFTLTNLGAPAAFKYFDTTIDRKRYTSTKEVLDATLIHQSITGLYETRIDLSQLGGDGGGSSGSSGSSGSSGSSGSSGGTLNLEDEYRLYETSAEPEVSPGSTWLSDFPQAWAETGGMGLAVRQAPLIIPLKATSTPVSIKQYPMSQEAKLGIKPHIQRLLDQGILVPCQSPWNTPLLPVKKPGTNDYRPVQDLREVNKRVEDIHPTVPNPYNLLSGLPPSHRWYTVLDLKDAFFCLRLHPTSQPLFAFEWRDPGMGISGQLTWTRLPQGFKNSPTLFNEALHRDLADFRIQHPDLILLQYVDDILLAATSELDCQQGTRALLLTLGNLGYRASAKKAQLCQKQVKYLGYLLKEGQRWLTEARKETVMGQPTPKTPRQLREFLGKAGFCRLFIPGFAEMAAPLYPLTKPGTLFNWGPDQQKAYQEIKQALLTAPALGLPDLTKPFELFVDEKQGYAKGVLTQKLGPWRRPVAYLSKKLDPVAAGWPPCLRMVAAIAVLRKDAGKLTMGQPLVILAPHAVEALVKQPPDRWLSNARMTHYQAMLLDTDRVQFGPVVALNPATLLPLPEEGAPHDCLEILAETHGTRPDLTDQPIPDADHTWYTDGSSFLQEGQRKAGAAVTTETEVIWARALPAGTSAQRAELIALTQALKMAEGKRLNVYTDSRYAFATAHIHGEIYRRRGWLTSEGREIKNKSEILALLKALFLPKRLSIIHCLGHQKGDSAEARGNRLADQAAREAAIKTPPDTSTLLAGKRTADGSEFEKRTADGSEFESPKKKAKVE

SEQ ID NO: 6349 - protein, 2103 aa, synthetic construct
MPAAKRVKLDGGDKKYSIGLDIGTNSVGWAVITDEYKVPSKKFKVLGNTDRHSIKKNLIGALLFDSGETAEATRLKRTARRRYTRRKNRICYLQEIFSNEMAKVDDSFFHRLEESFLVEEDKKHERHPIFGNIVDEVAYHEKYPTIYHLRKKLVDSTDKADLRLIYLALAHMIKFRGHFLIEGDLNPDNSDVDKLFIQLVQTYNQLFEENPINASGVDAKAILSARLSKSRRLENLIAQLPGEKKNGLFGNLIALSLGLTPNFKSNFDLAEDAKLQLSKDTYDDDLDNLLAQIGDQYADLFLAAKNLSDAILLSDILRVNTEITKAPLSASMIKRYDEHHQDLTLLKALVRQQLPEKYKEIFFDQSKNGYAGYIDGGASQEEFYKFIKPILEKMDGTEELLVKLNREDLLRKQRTFDNGSIPHQIHLGELHAILRRQEDFYPFLKDNREKIEKILTFRIPYYVGPLARGNSRFAWMTRKSEETITPWNFEEVVDKGASAQSFIERMTNFDKNLPNEKVLPKHSLLYEYFTVYNELTKVKYVTEGMRKPAFLSGEQKKAIVDLLFKTNRKVTVKQLKEDYFKKIECFDSVEISGVEDRFNASLGTYHDLLKIIKDKDFLDNEENEDILEDIVLTLTLFEDREMIEERLKTYAHLFDDKVMKQLKRRRYTGWGRLSRKLINGIRDKQSGKTILDFLKSDGFANRNFMQLIHDDSLTFKEDIQKAQVSGQGDSLHEHIANLAGSPAIKKGILQTVKVVDELVKVMGRHKPENIVIEMARENQTTQKGQKNSRERMKRIEEGIKELGSQILKEHPVENTQLQNEKLYLYYLQNGRDMYVDQELDINRLSDYDVDHIVPQSFLKDDSIDNKVLTRSDKARGKSDNVPSEEVVKKMKNYWRQLLNAKLITQRKFDNLTKAERGGLSELDKAGFIKRQLVETRQITKHVAQILDSRMNTKYDENDKLIREVKVITLKSKLVSDFRKDFQFYKVREINNYHHAHDAYLNAVVGTALIKKYPKLESEFVYGDYKVYDVRKMIAKSEQEIGKATAKYFFYSNIMNFFKTEITLANGEIRKRPLIETNGETGEIVWDKGRDFATVRKVLSMPQVNIVKKTEVQTGGFSKESILPKRNSDKLIARKKDWDPKKYGGFDSPTVAYSVLVVAKVEKGKSKKLKSVKELLGITIMERSSFEKNPIDFLEAKGYKEVKKDLIIKLPKYSLFELENGRKRMLASAGELQKGNELALPSKYVNFLYLASHYEKLKGSPEDNEQKQLFVEQHKHYLDEIIEQISEFSKRVILADANLDKVLSAYNKHRDKPIREQAENIIHLFTLTNLGAPAAFKYFDTTIDRKRYTSTKEVLDATLIHQSITGLYETRIDLSQLGGDGGGSSGSSGSSGSSGSSGSSGGTLNIEDEYRLHETSKEPDVSLGSTWLSDFPQAWAETGGMGLAVRQAPLIIPLKATSTPVSIKQYPMSQEARLGIKPHIQRLLDQGILVPCQSPWNTPLLPVKKPGTNDYRPVQDLREVNKRVEDIHPTVPNPYNLLSGLPPSHQWYTVLDLKDAFFCLRLHPTSQPLFAFEWRDPEMGISGQLTWTRLPQGFKNSPTLFNEALHRDLAGFRIQHPDLILLQYVDDLLLAATSELDCQQGTRALLQTLGDLGYRASAKKAQICQKQVKYLGYLLKEGQRWLTEARKETVMGQPIPKTPRQLREFLGTAGFCRLWIPGFAEMAAPLYPLTKPGTLFNWGPDQQKAFQEIKQALLTAPALGLPDLTKPFELFVDEKQGYAKGVLTQKLGPWRRPVAYLSKKLDPVAAGWPPCLRMVAAIAVLTKDAGKLTMGQPLVILAPHAVEALVKQPPDRWLSNARMTHYQALLLDTDRVQFGPVVALNPATLLPLPEEGLQHDCLDILAEAHGTRSDLMDQPLPDADHTWYTDGSSFLQEGQRKAGAAVTTETEVIWARALPAGTSAQRAELIALTQALKMAEGKKLNVYTDSRYAFATAHIHGEIYRRRGWLTSEGKEIKNKDEILALLKALFLPKRLSIIHCPGHQKGNSAEARGNRMADQAAREVATRETPETSTLLAGKRTADGSEFEKRTADGSEFESPKKKAKVE

SEQ ID NO: 6350 - protein, 2103 aa, synthetic construct
MPAAKRVKLDGGDKKYSIGLDIGTNSVGWAVITDEYKVPSKKFKVLGNTDRHSIKKNLIGALLFDSGETAEATRLKRTARRRYTRRKNRICYLQEIFSNEMAKVDDSFFHRLEESFLVEEDKKHERHPIFGNIVDEVAYHEKYPTIYHLRKKLVDSTDKADLRLIYLALAHMIKFRGHFLIEGDLNPDNSDVDKLFIQLVQTYNQLFEENPINASGVDAKAILSARLSKSRRLENLIAQLPGEKKNGLFGNLIALSLGLTPNFKSNFDLAEDAKLQLSKDTYDDDLDNLLAQIGDQYADLFLAAKNLSDAILLSDILRVNTEITKAPLSASMIKRYDEHHQDLTLLKALVRQQLPEKYKEIFFDQSKNGYAGYIDGGASQEEFYKFIKPILEKMDGTEELLVKLNREDLLRKQRTFDNGSIPHQIHLGELHAILRRQEDFYPFLKDNREKIEKILTFRIPYYVGPLARGNSRFAWMTRKSEETITPWNFEEVVDKGASAQSFIERMTNFDKNLPNEKVLPKHSLLYEYFTVYNELTKVKYVTEGMRKPAFLSGEQKKAIVDLLFKTNRKVTVKQLKEDYFKKIECFDSVEISGVEDRFNASLGTYHDLLKIIKDKDFLDNEENEDILEDIVLTLTLFEDREMIEERLKTYAHLFDDKVMKQLKRRRYTGWGRLSRKLINGIRDKQSGKTILDFLKSDGFANRNFMQLIHDDSLTFKEDIQKAQVSGQGDSLHEHIANLAGSPAIKKGILQTVKVVDELVKVMGRHKPENIVIEMARENQTTQKGQKNSRERMKRIEEGIKELGSQILKEHPVENTQLQNEKLYLYYLQNGRDMYVDQELDINRLSDYDVDHIVPQSFLKDDSIDNKVLTRSDKARGKSDNVPSEEVVKKMKNYWRQLLNAKLITQRKFDNLTKAERGGLSELDKAGFIKRQLVETRQITKHVAQILDSRMNTKYDENDKLIREVKVITLKSKLVSDFRKDFQFYKVREINNYHHAHDAYLNAVVGTALIKKYPKLESEFVYGDYKVYDVRKMIAKSEQEIGKATAKYFFYSNIMNFFKTEITLANGEIRKRPLIETNGETGEIVWDKGRDFATVRKVLSMPQVNIVKKTEVQTGGFSKESILPKRNSDKLIARKKDWDPKKYGGFDSPTVAYSVLVVAKVEKGKSKKLKSVKELLGITIMERSSFEKNPIDFLEAKGYKEVKKDLIIKLPKYSLFELENGRKRMLASAGELQKGNELALPSKYVNFLYLASHYEKLKGSPEDNEQKQLFVEQHKHYLDEIIEQISEFSKRVILADANLDKVLSAYNKHRDKPIREQAENIIHLFTLTNLGAPAAFKYFDTTIDRKRYTSTKEVLDATLIHQSITGLYETRIDLSQLGGDGGGSSGSSGSSGSSGSSGSSGGTLNIEDEYRLHETSKGPDVPLGSTWLSDFPQAWAETGGMGLAFRQAPLIISLKATSTPVSIKQYPMSQEARLGIKPHIQRLLDQGILVPCQSPWNTPLLPVKKPGTNDYRPVQDLREVNKRVEDIHPTVPNPYNLLSGLPPSHQWYTVLDLKDAFFCLRLHPTSQSLFAFEWKDPEMGISGQLTWTRLPQGFKNSPTLFDEALHRDLADFRIQHPDLILLQYVDDLLLAATSELDCQQGTRALLQTLGDLGYRASAKKAQICQKQVKYLGYLLKEGQRWLTEARKETVMGQPTPKTPRQLREFLGTAGLCRLWIPGFAEMAAPLYPLTKTGTLFKWGPDQQKAYQEIKQALLTAPALGLPDLTKPFELFVDEKQGYAKGVLTQKLGPWRRPVAYLSKKLDPVAAGWPPCLRMVAAIAVLTKDVGKLTMGQPLVILAPHAVEALVKQPPDRWLSNARMTHYQALLLDTDRVQFGPIVALNPATLLPLPEEGLQHDCLDILAEAHGTRPDLTDQPLPDADHTWYTDGSSFLQEGQRRAGAAVTTETEVIWAKALPAGTSAQRAELIALTQALKMAAGKKLNVYTDSRYAFATAHIHGEIYRRRGLLTSEGKEIKNKDEILALLKALFLPKRLSIIHCPGHQKGNHAEARGNRMADQAAREVATRETPETSTLLAGKRTADGSEFEKRTADGSEFESPKKKAKVE

SEQ ID NO: 6351 - protein, 2103 aa, synthetic construct
MPAAKRVKLDGGDKKYSIGLDIGTNSVGWAVITDEYKVPSKKFKVLGNTDRHSIKKNLIGALLFDSGETAEATRLKRTARRRYTRRKNRICYLQEIFSNEMAKVDDSFFHRLEESFLVEEDKKHERHPIFGNIVDEVAYHEKYPTIYHLRKKLVDSTDKADLRLIYLALAHMIKFRGHFLIEGDLNPDNSDVDKLFIQLVQTYNQLFEENPINASGVDAKAILSARLSKSRRLENLIAQLPGEKKNGLFGNLIALSLGLTPNFKSNFDLAEDAKLQLSKDTYDDDLDNLLAQIGDQYADLFLAAKNLSDAILLSDILRVNTEITKAPLSASMIKRYDEHHQDLTLLKALVRQQLPEKYKEIFFDQSKNGYAGYIDGGASQEEFYKFIKPILEKMDGTEELLVKLNREDLLRKQRTFDNGSIPHQIHLGELHAILRRQEDFYPFLKDNREKIEKILTFRIPYYVGPLARGNSRFAWMTRKSEETITPWNFEEVVDKGASAQSFIERMTNFDKNLPNEKVLPKHSLLYEYFTVYNELTKVKYVTEGMRKPAFLSGEQKKAIVDLLFKTNRKVTVKQLKEDYFKKIECFDSVEISGVEDRFNASLGTYHDLLKIIKDKDFLDNEENEDILEDIVLTLTLFEDREMIEERLKTYAHLFDDKVMKQLKRRRYTGWGRLSRKLINGIRDKQSGKTILDFLKSDGFANRNFMQLIHDDSLTFKEDIQKAQVSGQGDSLHEHIANLAGSPAIKKGILQTVKVVDELVKVMGRHKPENIVIEMARENQTTQKGQKNSRERMKRIEEGIKELGSQILKEHPVENTQLQNEKLYLYYLQNGRDMYVDQELDINRLSDYDVDHIVPQSFLKDDSIDNKVLTRSDKARGKSDNVPSEEVVKKMKNYWRQLLNAKLITQRKFDNLTKAERGGLSELDKAGFIKRQLVETRQITKHVAQILDSRMNTKYDENDKLIREVKVITLKSKLVSDFRKDFQFYKVREINNYHHAHDAYLNAVVGTALIKKYPKLESEFVYGDYKVYDVRKMIAKSEQEIGKATAKYFFYSNIMNFFKTEITLANGEIRKRPLIETNGETGEIVWDKGRDFATVRKVLSMPQVNIVKKTEVQTGGFSKESILPKRNSDKLIARKKDWDPKKYGGFDSPTVAYSVLVVAKVEKGKSKKLKSVKELLGITIMERSSFEKNPIDFLEAKGYKEVKKDLIIKLPKYSLFELENGRKRMLASAGELQKGNELALPSKYVNFLYLASHYEKLKGSPEDNEQKQLFVEQHKHYLDEIIEQISEFSKRVILADANLDKVLSAYNKHRDKPIREQAENIIHLFTLTNLGAPAAFKYFDTTIDRKRYTSTKEVLDATLIHQSITGLYETRIDLSQLGGDGGGSSGSSGSSGSSGSSGSSGGTLNIEDEYRLHETSKGPDVPLGSTWLSDFPQAWAETGGMGLAVRQAPLIIPLKATSTPVSIKQYPMSQEARLGIKPHIQRLLDQGILVPCQSPWNTPLLPVKKPGTNDYRPVQDLREVNKRVEDIHPTVPNPYNLLSGLPPSHQWYTVLDLKDAFFCLRLHPTSQSLFAFEWRDPEMGISGQLTWTRLPQGFKNSPTLFNEALHRDLADFRIQHPDLILLQYVDDLLLAATSELDCQQGTRALLQTLGDLGYRASAKKAQICQKQVKYLGYLLKEGQRWLTEARKETVMGQPTPKTPRQLREFLGTAGFCRLWIPGFAEMAAPLYPLTKPGTLFEWGPDQQKAYQEIKQALLTAPALGLPDLTKPFELFVDEKQGYAKGVLTQKLGPWRRPVAYLSKKLDPVAAGWPPCLRMVAAIAVLTKDAGKLTMGQPLVILAPHAVEALVKQPPDRWLSNARMTHYQALLLDTDRVQFGPIVALNPATLLPLPEEGLQHDCLDILAEAHGTRPDLTDQPLPDADHTWYTDGSSFLQEGQRKAGAAVTTETEVVWAKALPAGTSAQRAELIALTQALKMAEGKKLNVYTDSRYAFATAHIHGEIYRRRGWLTSEGKEIKNKDEILALLKALFLPKRLSIIHCPGHQKGNRAEARGNRMADQAAREVATRETPETSTLLAGKRTADGSEFEKRTADGSEFESPKKKAKVE

SEQ ID NO: 6352 - protein, 2103 aa, synthetic construct
MPAAKRVKLDGGDKKYSIGLDIGTNSVGWAVITDEYKVPSKKFKVLGNTDRHSIKKNLIGALLFDSGETAEATRLKRTARRRYTRRKNRICYLQEIFSNEMAKVDDSFFHRLEESFLVEEDKKHERHPIFGNIVDEVAYHEKYPTIYHLRKKLVDSTDKADLRLIYLALAHMIKFRGHFLIEGDLNPDNSDVDKLFIQLVQTYNQLFEENPINASGVDAKAILSARLSKSRRLENLIAQLPGEKKNGLFGNLIALSLGLTPNFKSNFDLAEDAKLQLSKDTYDDDLDNLLAQIGDQYADLFLAAKNLSDAILLSDILRVNTEITKAPLSASMIKRYDEHHQDLTLLKALVRQQLPEKYKEIFFDQSKNGYAGYIDGGASQEEFYKFIKPILEKMDGTEELLVKLNREDLLRKQRTFDNGSIPHQIHLGELHAILRRQEDFYPFLKDNREKIEKILTFRIPYYVGPLARGNSRFAWMTRKSEETITPWNFEEVVDKGASAQSFIERMTNFDKNLPNEKVLPKHSLLYEYFTVYNELTKVKYVTEGMRKPAFLSGEQKKAIVDLLFKTNRKVTVKQLKEDYFKKIECFDSVEISGVEDRFNASLGTYHDLLKIIKDKDFLDNEENEDILEDIVLTLTLFEDREMIEERLKTYAHLFDDKVMKQLKRRRYTGWGRLSRKLINGIRDKQSGKTILDFLKSDGFANRNFMQLIHDDSLTFKEDIQKAQVSGQGDSLHEHIANLAGSPAIKKGILQTVKVVDELVKVMGRHKPENIVIEMARENQTTQKGQKNSRERMKRIEEGIKELGSQILKEHPVENTQLQNEKLYLYYLQNGRDMYVDQELDINRLSDYDVDHIVPQSFLKDDSIDNKVLTRSDKARGKSDNVPSEEVVKKMKNYWRQLLNAKLITQRKFDNLTKAERGGLSELDKAGFIKRQLVETRQITKHVAQILDSRMNTKYDENDKLIREVKVITLKSKLVSDFRKDFQFYKVREINNYHHAHDAYLNAVVGTALIKKYPKLESEFVYGDYKVYDVRKMIAKSEQEIGKATAKYFFYSNIMNFFKTEITLANGEIRKRPLIETNGETGEIVWDKGRDFATVRKVLSMPQVNIVKKTEVQTGGFSKESILPKRNSDKLIARKKDWDPKKYGGFDSPTVAYSVLVVAKVEKGKSKKLKSVKELLGITIMERSSFEKNPIDFLEAKGYKEVKKDLIIKLPKYSLFELENGRKRMLASAGELQKGNELALPSKYVNFLYLASHYEKLKGSPEDNEQKQLFVEQHKHYLDEIIEQISEFSKRVILADANLDKVLSAYNKHRDKPIREQAENIIHLFTLTNLGAPAAFKYFDTTIDRKRYTSTKEVLDATLIHQSITGLYETRIDLSQLGGDGGGSSGSSGSSGSSGSSGSSGGTLNIEDEHRLHETSKEPDVSLGSTWLSDFPQAWAETGGMGLAVRQAPLIIPLKATSTPVSIKQYPMSQEARLGIKPHIQRLLDQGILVPCQSPWNTPLLPVKKPGTNDYRPVQDLREVNKRVEDIHPTVPNPYNLLSGLPPSHQWYTVLDLKDAFFCLRLHPTSQPLFAFEWRDPEMGISGQLTWTRLPQGFKNSPTLFDEALHRDLADFRIQHPDLILLQYVDDLLLAATSELDCQQGTRALLQTLGNLGYRASAKKAQICQKQVKYLGYLLKEGQRWLTEARKETVMGQPTPKTPRQLREFLGTAGFCRLWIPGFAEMAAPLYPLTKTGTLFNWGPDQQKAYQEIKQALLTAPALGLPDLTKPFELFVDEKQGYAKGVLTQKLGPWRRPVAYLSKKLDPVAAGWPPCLRMVAAIAVLTKDAGKLTMGQPLVILAPHAVEALVKQPPDRWLSNARMTHYQALLLDTDRVQFGPVVALNPATLLPLPEEGLQHNCLDILAEAHGTRPDLTDQPLPDADHTWYTDGSSLLQEGQRKAGAAVTTETEVIWAKALPAGTSAQRAELIALTQALKMAEGKKLNVYTDSRYAFATAHIHGEIYRRRGLLTSEGKEIKNKDEILALLKALFLPKRLSIIHCPGHQKGHSAEARGNRMADQAARKAAITETPDTSTLLAGKRTADGSEFEKRTADGSEFESPKKKAKVE

SEQ ID NO: 6353 - protein, 2103 aa, synthetic construct
MPAAKRVKLDGGDKKYSIGLDIGTNSVGWAVITDEYKVPSKKFKVLGNTDRHSIKKNLIGALLFDSGETAEATRLKRTARRRYTRRKNRICYLQEIFSNEMAKVDDSFFHRLEESFLVEEDKKHERHPIFGNIVDEVAYHEKYPTIYHLRKKLVDSTDKADLRLIYLALAHMIKFRGHFLIEGDLNPDNSDVDKLFIQLVQTYNQLFEENPINASGVDAKAILSARLSKSRRLENLIAQLPGEKKNGLFGNLIALSLGLTPNFKSNFDLAEDAKLQLSKDTYDDDLDNLLAQIGDQYADLFLAAKNLSDAILLSDILRVNTEITKAPLSASMIKRYDEHHQDLTLLKALVRQQLPEKYKEIFFDQSKNGYAGYIDGGASQEEFYKFIKPILEKMDGTEELLVKLNREDLLRKQRTFDNGSIPHQIHLGELHAILRRQEDFYPFLKDNREKIEKILTFRIPYYVGPLARGNSRFAWMTRKSEETITPWNFEEVVDKGASAQSFIERMTNFDKNLPNEKVLPKHSLLYEYFTVYNELTKVKYVTEGMRKPAFLSGEQKKAIVDLLFKTNRKVTVKQLKEDYFKKIECFDSVEISGVEDRFNASLGTYHDLLKIIKDKDFLDNEENEDILEDIVLTLTLFEDREMIEERLKTYAHLFDDKVMKQLKRRRYTGWGRLSRKLINGIRDKQSGKTILDFLKSDGFANRNFMQLIHDDSLTFKEDIQKAQVSGQGDSLHEHIANLAGSPAIKKGILQTVKVVDELVKVMGRHKPENIVIEMARENQTTQKGQKNSRERMKRIEEGIKELGSQILKEHPVENTQLQNEKLYLYYLQNGRDMYVDQELDINRLSDYDVDHIVPQSFLKDDSIDNKVLTRSDKARGKSDNVPSEEVVKKMKNYWRQLLNAKLITQRKFDNLTKAERGGLSELDKAGFIKRQLVETRQITKHVAQILDSRMNTKYDENDKLIREVKVITLKSKLVSDFRKDFQFYKVREINNYHHAHDAYLNAVVGTALIKKYPKLESEFVYGDYKVYDVRKMIAKSEQEIGKATAKYFFYSNIMNFFKTEITLANGEIRKRPLIETNGETGEIVWDKGRDFATVRKVLSMPQVNIVKKTEVQTGGFSKESILPKRNSDKLIARKKDWDPKKYGGFDSPTVAYSVLVVAKVEKGKSKKLKSVKELLGITIMERSSFEKNPIDFLEAKGYKEVKKDLIIKLPKYSLFELENGRKRMLASAGELQKGNELALPSKYVNFLYLASHYEKLKGSPEDNEQKQLFVEQHKHYLDEIIEQISEFSKRVILADANLDKVLSAYNKHRDKPIREQAENIIHLFTLTNLGAPAAFKYFDTTIDRKRYTSTKEVLDATLIHQSITGLYETRIDLSQLGGDGGGSSGSSGSSGSSGSSGSSGGTLNIEDEYRLHEISTEPDVSPGSTWLSDFPQAWAETGGMGLAVRQAPLIIPLKATSTPVSIKQYPMSQEAKLGIKPHIQRLLDQGILVPCQSPWNTPLLPVKKPGTNDYRPVQGLREVNKRVEDIHPTVPNPYNLLSGLPTSHRWYTVLDLKDAFFCLRLHPTSQPLFASEWRDPGMGISGQLTWTRLPQGFKNSPTLFDEALHRGLADFRIQHPDLILLQYVDDLLLAATSELDCQQGTRALLKTLGNLGYRASAKKAQICQKQVKYLGYLLREGQRWLTEARKETVMGQPTPKTPRQLREFLGTAGFCRLWIPRFAEMAAPLYPLTKTGTLFNWGPDQQKAYHEIKQALLTAPALGLPDLTKPFELFVDEKQGYAKGVLTQKLGPWRRPVAYLSKKLDPVAAGWPPCLRMVAAIAVLTKDAGKLTMGQPLVILAPHAVEALVKQPPDRWLSNARMTHYQAMLLDTDRVQFGPVVALNPATLLPLPEEGAPHDCLEILAETHGTEPDLTDQPIPDADHTWYTDGSSFLQEGQRKAGAAVTTETEVIWARALPAGTSAQRAELIALTQALKMAEGKRLNVYTDSRYAFATAHIHGEIYKRRGLLTSEGREIKNKSEILALLKALFLPKRLSIIHCLGHQKGDSAEARGNRLADQAAREAAIKTPPDTSTLLAGKRTADGSEFEKRTADGSEFESPKKKAKVE

SEQ ID NO: 6354 - protein, 2097 aa, synthetic construct
MPAAKRVKLDGGDKKYSIGLDIGTNSVGWAVITDEYKVPSKKFKVLGNTDRHSIKKNLIGALLFDSGETAEATRLKRTARRRYTRRKNRICYLQEIFSNEMAKVDDSFFHRLEESFLVEEDKKHERHPIFGNIVDEVAYHEKYPTIYHLRKKLVDSTDKADLRLIYLALAHMIKFRGHFLIEGDLNPDNSDVDKLFIQLVQTYNQLFEENPINASGVDAKAILSARLSKSRRLENLIAQLPGEKKNGLFGNLIALSLGLTPNFKSNFDLAEDAKLQLSKDTYDDDLDNLLAQIGDQYADLFLAAKNLSDAILLSDILRVNTEITKAPLSASMIKRYDEHHQDLTLLKALVRQQLPEKYKEIFFDQSKNGYAGYIDGGASQEEFYKFIKPILEKMDGTEELLVKLNREDLLRKQRTFDNGSIPHQIHLGELHAILRRQEDFYPFLKDNREKIEKILTFRIPYYVGPLARGNSRFAWMTRKSEETITPWNFEEVVDKGASAQSFIERMTNFDKNLPNEKVLPKHSLLYEYFTVYNELTKVKYVTEGMRKPAFLSGEQKKAIVDLLFKTNRKVTVKQLKEDYFKKIECFDSVEISGVEDRFNASLGTYHDLLKIIKDKDFLDNEENEDILEDIVLTLTLFEDREMIEERLKTYAHLFDDKVMKQLKRRRYTGWGRLSRKLINGIRDKQSGKTILDFLKSDGFANRNFMQLIHDDSLTFKEDIQKAQVSGQGDSLHEHIANLAGSPAIKKGILQTVKVVDELVKVMGRHKPENIVIEMARENQTTQKGQKNSRERMKRIEEGIKELGSQILKEHPVENTQLQNEKLYLYYLQNGRDMYVDQELDINRLSDYDVDHIVPQSFLKDDSIDNKVLTRSDKARGKSDNVPSEEVVKKMKNYWRQLLNAKLITQRKFDNLTKAERGGLSELDKAGFIKRQLVETRQITKHVAQILDSRMNTKYDENDKLIREVKVITLKSKLVSDFRKDFQFYKVREINNYHHAHDAYLNAVVGTALIKKYPKLESEFVYGDYKVYDVRKMIAKSEQEIGKATAKYFFYSNIMNFFKTEITLANGEIRKRPLIETNGETGEIVWDKGRDFATVRKVLSMPQVNIVKKTEVQTGGFSKESILPKRNSDKLIARKKDWDPKKYGGFDSPTVAYSVLVVAKVEKGKSKKLKSVKELLGITIMERSSFEKNPIDFLEAKGYKEVKKDLIIKLPKYSLFELENGRKRMLASAGELQKGNELALPSKYVNFLYLASHYEKLKGSPEDNEQKQLFVEQHKHYLDEIIEQISEFSKRVILADANLDKVLSAYNKHRDKPIREQAENIIHLFTLTNLGAPAAFKYFDTTIDRKRYTSTKEVLDATLIHQSITGLYETRIDLSQLGGDGGGSSGSSGSSGSSGSSGSSGGTLQLDDEYRLYSPLVKPDQNIQFWLEQFPQAWAETAGMGLAKQVPPQVIQLKASATPVSVRQYPLSKEAQEGIRPHVQRLIQQGILVPVQSPWNTPLLPVRKPGTNDYRPVQDLREVNKRVQDIHPTVPNPYNLLCALPPQRSWYTVLDLKDAFFCLRLHPTSQPLFAFEWRDPGTGRTGQLTWTRLPQGFKNSPTIFDEALHRDLANFRIQHPQVTLLQYVDDLLLAGATKQDCLEGTKALLLELSDLGYRASAKKAQICRREVTYLGYSLRDGQRWLTEARKKTVVQIPAPTTAKQVREFLGTAGFCRLWIPGFATLAAPLYPLTKEKGEFSWAPEHQKAFDAIKKALLSAPALALPDVTKPFTLYVDERKGVARGVLTQTLGPWRRPVAYLSKKLDPVASGWPVCLKAIAAVAILVKDADKLTLGQNITVIAPHALENIVRQPPDRWMTNARMTHYQSLLLTERVTFAPPAALNPATLLPEETDEPVTHDCHQLLIEETGVRKDLTDIPLTGEVLTWFTDGSSYVVEGKRMAGAAVVDGTRTIWASSLPEGTSAQKAELMALTQALRLAEGKSINIYTDSRYAFATAHVHGAIYKQRGLLTSAGREIKNKEEILSLLEALHLPKRLAIIHCPGHQKAKDPISRGNQMADRVAKQAAQGVNLLAGKRTADGSEFEKRTADGSEFESPKKKAKVE

SEQ ID NO: 6355 - protein, 2183 aa, synthetic construct
MPAAKRVKLDGGDKKYSIGLDIGTNSVGWAVITDEYKVPSKKFKVLGNTDRHSIKKNLIGALLFDSGETAEATRLKRTARRRYTRRKNRICYLQEIFSNEMAKVDDSFFHRLEESFLVEEDKKHERHPIFGNIVDEVAYHEKYPTIYHLRKKLVDSTDKADLRLIYLALAHMIKFRGHFLIEGDLNPDNSDVDKLFIQLVQTYNQLFEENPINASGVDAKAILSARLSKSRRLENLIAQLPGEKKNGLFGNLIALSLGLTPNFKSNFDLAEDAKLQLSKDTYDDDLDNLLAQIGDQYADLFLAAKNLSDAILLSDILRVNTEITKAPLSASMIKRYDEHHQDLTLLKALVRQQLPEKYKEIFFDQSKNGYAGYIDGGASQEEFYKFIKPILEKMDGTEELLVKLNREDLLRKQRTFDNGSIPHQIHLGELHAILRRQEDFYPFLKDNREKIEKILTFRIPYYVGPLARGNSRFAWMTRKSEETITPWNFEEVVDKGASAQSFIERMTNFDKNLPNEKVLPKHSLLYEYFTVYNELTKVKYVTEGMRKPAFLSGEQKKAIVDLLFKTNRKVTVKQLKEDYFKKIECFDSVEISGVEDRFNASLGTYHDLLKIIKDKDFLDNEENEDILEDIVLTLTLFEDREMIEERLKTYAHLFDDKVMKQLKRRRYTGWGRLSRKLINGIRDKQSGKTILDFLKSDGFANRNFMQLIHDDSLTFKEDIQKAQVSGQGDSLHEHIANLAGSPAIKKGILQTVKVVDELVKVMGRHKPENIVIEMARENQTTQKGQKNSRERMKRIEEGIKELGSQILKEHPVENTQLQNEKLYLYYLQNGRDMYVDQELDINRLSDYDVDHIVPQSFLKDDSIDNKVLTRSDKARGKSDNVPSEEVVKKMKNYWRQLLNAKLITQRKFDNLTKAERGGLSELDKAGFIKRQLVETRQITKHVAQILDSRMNTKYDENDKLIREVKVITLKSKLVSDFRKDFQFYKVREINNYHHAHDAYLNAVVGTALIKKYPKLESEFVYGDYKVYDVRKMIAKSEQEIGKATAKYFFYSNIMNFFKTEITLANGEIRKRPLIETNGETGEIVWDKGRDFATVRKVLSMPQVNIVKKTEVQTGGFSKESILPKRNSDKLIARKKDWDPKKYGGFDSPTVAYSVLVVAKVEKGKSKKLKSVKELLGITIMERSSFEKNPIDFLEAKGYKEVKKDLIIKLPKYSLFELENGRKRMLASAGELQKGNELALPSKYVNFLYLASHYEKLKGSPEDNEQKQLFVEQHKHYLDEIIEQISEFSKRVILADANLDKVLSAYNKHRDKPIREQAENIIHLFTLTNLGAPAAFKYFDTTIDRKRYTSTKEVLDATLIHQSITGLYETRIDLSQLGGDGGGSSGSSGSSGSSGSSGSSGGMDPLQLLQPLEAEIKGTKLKAHWNSGATITCVPEAFLEDERPIQTMLIKTIHGEKQQDVYYLTFKVQGRKVEAEVLASPYDYILLNPSDVPWLMKKPLQLTVLVPLHEYQERLLQQTALPKEQKELLQKLFLKYDALWQHWENQVGHRRIKPHNIATGTLAPRPQKQYPINPKAKPSIQIVIDDLLKQGVLIQQNSTMNTPVYPVPKPDGKWRMVLDYREVNKTIPLIAAQNQHSAGILSSIYRGKYKTTLDLTNGFWAHPITPESYWLTAFTWQGKQYCWTRLPQGFLNSPALFNADVVDLLKEIPNVQAYVDDIYISHDDPQEHLEQLEKIFSILLNAGYVVSLKKSEIAQREVEFLGFNITKEGRGLTDTFKQKLLNITPPKDLKQLQSILGLLNFARNFIPNYSELVKPLYTIVAPANGKFISWTEDNSNQLQHIISVLNQADNLEERNPETRLIIKVNSSPSAGYIRYYNEGSKRPIMYVNYIFSKAEAKFTQTEKLLTTMHKGLIKAMDLAMGQEILVYSPIVSMTKIQRTPLPERKALPVRWITWMTYLEDPRIQFHYDKSLPELQQIPNVTEDVIAKTKHPSEFAMVFYTDGSAIKHPDVNKSHSAGMGIAQVQFIPEYKIVHQWSIPLGDHTAQLAEIAAVEFACKKALKISGPVLIVTDSFYVAESANKELPYWKSNGFLNNKKKPLRHVSKWKSIAECLQLKPDIIIMHEKGHQQPMTTLHTEGNNLADKLATQGSYVVHAGKRTADGSEFEKRTADGSEFESPKKKAKVE

SEQ ID NO: 6356 - protein, 2094 aa, synthetic construct
MPAAKRVKLDGGDKKYSIGLDIGTNSVGWAVITDEYKVPSKKFKVLGNTDRHSIKKNLIGALLFDSGETAEATRLKRTARRRYTRRKNRICYLQEIFSNEMAKVDDSFFHRLEESFLVEEDKKHERHPIFGNIVDEVAYHEKYPTIYHLRKKLVDSTDKADLRLIYLALAHMIKFRGHFLIEGDLNPDNSDVDKLFIQLVQTYNQLFEENPINASGVDAKAILSARLSKSRRLENLIAQLPGEKKNGLFGNLIALSLGLTPNFKSNFDLAEDAKLQLSKDTYDDDLDNLLAQIGDQYADLFLAAKNLSDAILLSDILRVNTEITKAPLSASMIKRYDEHHQDLTLLKALVRQQLPEKYKEIFFDQSKNGYAGYIDGGASQEEFYKFIKPILEKMDGTEELLVKLNREDLLRKQRTFDNGSIPHQIHLGELHAILRRQEDFYPFLKDNREKIEKILTFRIPYYVGPLARGNSRFAWMTRKSEETITPWNFEEVVDKGASAQSFIERMTNFDKNLPNEKVLPKHSLLYEYFTVYNELTKVKYVTEGMRKPAFLSGEQKKAIVDLLFKTNRKVTVKQLKEDYFKKIECFDSVEISGVEDRFNASLGTYHDLLKIIKDKDFLDNEENEDILEDIVLTLTLFEDREMIEERLKTYAHLFDDKVMKQLKRRRYTGWGRLSRKLINGIRDKQSGKTILDFLKSDGFANRNFMQLIHDDSLTFKEDIQKAQVSGQGDSLHEHIANLAGSPAIKKGILQTVKVVDELVKVMGRHKPENIVIEMARENQTTQKGQKNSRERMKRIEEGIKELGSQILKEHPVENTQLQNEKLYLYYLQNGRDMYVDQELDINRLSDYDVDHIVPQSFLKDDSIDNKVLTRSDKARGKSDNVPSEEVVKKMKNYWRQLLNAKLITQRKFDNLTKAERGGLSELDKAGFIKRQLVETRQITKHVAQILDSRMNTKYDENDKLIREVKVITLKSKLVSDFRKDFQFYKVREINNYHHAHDAYLNAVVGTALIKKYPKLESEFVYGDYKVYDVRKMIAKSEQEIGKATAKYFFYSNIMNFFKTEITLANGEIRKRPLIETNGETGEIVWDKGRDFATVRKVLSMPQVNIVKKTEVQTGGFSKESILPKRNSDKLIARKKDWDPKKYGGFDSPTVAYSVLVVAKVEKGKSKKLKSVKELLGITIMERSSFEKNPIDFLEAKGYKEVKKDLIIKLPKYSLFELENGRKRMLASAGELQKGNELALPSKYVNFLYLASHYEKLKGSPEDNEQKQLFVEQHKHYLDEIIEQISEFSKRVILADANLDKVLSAYNKHRDKPIREQAENIIHLFTLTNLGAPAAFKYFDTTIDRKRYTSTKEVLDATLIHQSITGLYETRIDLSQLGGDGGGSSGSSGSSGSSGSSGSSGGIPWLMKKPLQLTTLVPLQEYEERLLKQTMLTGSYKEKLQSLFLKYDALWQHWENQVGHRRIKPHHIATGTVNPRPQKQYPINPKAKASIQTVINDLLKQGVLIQQNSIMNTPVYPVPKPDGKWRMVLDYREVNKTIPLIAAQNQHSAGILSSIFRGKYKTTLDLSNGFWAHSITPESYWLTAFTWLGQQYCWTRLPQGFLNSPALFNADVVDLLKEVPNVQVYVDDIYISHDDPREHLEQLEKVFSLLLNAGYVVSLKKSEIAQHEVEFLGFNITKEGRGLTETFKQKLLNITPPRDLKQLQSILGKLNFARNFIPNFSELVKPLYNIIATAPGKYITWTTDNSQQLQNIISMLNSAENLEERNPEVRLIMKVNTSPSAGYIRFYNEFAKRPIMYLNYVYTKAEVKFTNTEKLLTTIHKGLIKALDLGMGQEILVYSPIVSMTKIQKTPLPERKALPIRWITWMSYLEDPRIQFHYDKTLPELQQVPTVTDDIIAKIKHPSEFSMVFYTDGSAIKHPNVNKSHNAGMGIAQVQFKPEFTVINTWSIPLGDHTAQLAEVAAVEFACKKALKIDGPVLIVTDSFYVAESVNKELPYWQSNGFFNNKKKPLKHVSKWKSIADCIQLKPDIIIIHEKGHQPTASTFHTEGNNLADKLATQGSYVVNAGKRTADGSEFEKRTADGSEFESPKKKAKVE

SEQ ID NO: 6357 - protein, 2183 aa, synthetic construct
MPAAKRVKLDGGDKKYSIGLDIGTNSVGWAVITDEYKVPSKKFKVLGNTDRHSIKKNLIGALLFDSGETAEATRLKRTARRRYTRRKNRICYLQEIFSNEMAKVDDSFFHRLEESFLVEEDKKHERHPIFGNIVDEVAYHEKYPTIYHLRKKLVDSTDKADLRLIYLALAHMIKFRGHFLIEGDLNPDNSDVDKLFIQLVQTYNQLFEENPINASGVDAKAILSARLSKSRRLENLIAQLPGEKKNGLFGNLIALSLGLTPNFKSNFDLAEDAKLQLSKDTYDDDLDNLLAQIGDQYADLFLAAKNLSDAILLSDILRVNTEITKAPLSASMIKRYDEHHQDLTLLKALVRQQLPEKYKEIFFDQSKNGYAGYIDGGASQEEFYKFIKPILEKMDGTEELLVKLNREDLLRKQRTFDNGSIPHQIHLGELHAILRRQEDFYPFLKDNREKIEKILTFRIPYYVGPLARGNSRFAWMTRKSEETITPWNFEEVVDKGASAQSFIERMTNFDKNLPNEKVLPKHSLLYEYFTVYNELTKVKYVTEGMRKPAFLSGEQKKAIVDLLFKTNRKVTVKQLKEDYFKKIECFDSVEISGVEDRFNASLGTYHDLLKIIKDKDFLDNEENEDILEDIVLTLTLFEDREMIEERLKTYAHLFDDKVMKQLKRRRYTGWGRLSRKLINGIRDKQSGKTILDFLKSDGFANRNFMQLIHDDSLTFKEDIQKAQVSGQGDSLHEHIANLAGSPAIKKGILQTVKVVDELVKVMGRHKPENIVIEMARENQTTQKGQKNSRERMKRIEEGIKELGSQILKEHPVENTQLQNEKLYLYYLQNGRDMYVDQELDINRLSDYDVDHIVPQSFLKDDSIDNKVLTRSDKARGKSDNVPSEEVVKKMKNYWRQLLNAKLITQRKFDNLTKAERGGLSELDKAGFIKRQLVETRQITKHVAQILDSRMNTKYDENDKLIREVKVITLKSKLVSDFRKDFQFYKVREINNYHHAHDAYLNAVVGTALIKKYPKLESEFVYGDYKVYDVRKMIAKSEQEIGKATAKYFFYSNIMNFFKTEITLANGEIRKRPLIETNGETGEIVWDKGRDFATVRKVLSMPQVNIVKKTEVQTGGFSKESILPKRNSDKLIARKKDWDPKKYGGFDSPTVAYSVLVVAKVEKGKSKKLKSVKELLGITIMERSSFEKNPIDFLEAKGYKEVKKDLIIKLPKYSLFELENGRKRMLASAGELQKGNELALPSKYVNFLYLASHYEKLKGSPEDNEQKQLFVEQHKHYLDEIIEQISEFSKRVILADANLDKVLSAYNKHRDKPIREQAENIIHLFTLTNLGAPAAFKYFDTTIDRKRYTSTKEVLDATLIHQSITGLYETRIDLSQLGGDGGGSSGSSGSSGSSGSSGSSGGMDPLQLLQPLEAEIKGTKLKAHWNSGATITCVPQAFLEEEVPIKNIWIKTIHGEKEQPVYYLTFKIQGRKVEAEVISSPYDYILVSPSDIPWLMKKPLQLTTLVPLQEYEERLLKQTMLTGSYKEKLQSLFLKYDALWQHWENQVGHRRIKPHHIATGTVNPRPQKQYPINPKAKASIQTVINDLLKQGVLIQQNSIMNTPVYPVPKPDGKWRMVLDYREVNKTIPLIAAQNQHSAGILSSIFRGKYKTTLDLSNGFWAHSITPESYWLTAFTWLGQQYCWTRLPQGFLNSPALFNADVVDLLKEVPNVQVYVDDIYISHDDPREHLEQLEKVFSLLLNAGYVVSLKKSEIAQHEVEFLGFNITKEGRGLTETFKQKLLNITPPRDLKQLQSILGLLNFARNFIPNFSELVKPLYNIIATAPGKYITWTTDNSQQLQNIISMLNSAENLEERNPEVRLIMKVNTSPSAGYIRFYNEFAKRPIMYLNYVYTKAEVKFTNTEKLLTTIHKGLIKALDLGMGQEILVYSPIVSMTKIQKTPLPERKALPIRWITWMSYLEDPRIQFHYDKTLPELQQVPTVTDDIIAKIKHPSEFSMVFYTDGSAIKHPNVNKSHNAGMGIAQVQFKPEFTVINTWSIPLGDHTAQLAEVAAVEFACKKALKIDGPVLIVTDSFYVAESVNKELPYWQSNGFFNNKKKPLKHVSKWKSIADCIQLKPDIIIIHEKGHQPTASTFHTEGNNLADKLATQGSYVVNAGKRTADGSEFEKRTADGSEFESPKKKAKVE

SEQ ID NO: 6358 - protein, 2101 aa, synthetic construct
MPAAKRVKLDGGDKKYSIGLDIGTNSVGWAVITDEYKVPSKKFKVLGNTDRHSIKKNLIGALLFDSGETAEATRLKRTARRRYTRRKNRICYLQEIFSNEMAKVDDSFFHRLEESFLVEEDKKHERHPIFGNIVDEVAYHEKYPTIYHLRKKLVDSTDKADLRLIYLALAHMIKFRGHFLIEGDLNPDNSDVDKLFIQLVQTYNQLFEENPINASGVDAKAILSARLSKSRRLENLIAQLPGEKKNGLFGNLIALSLGLTPNFKSNFDLAEDAKLQLSKDTYDDDLDNLLAQIGDQYADLFLAAKNLSDAILLSDILRVNTEITKAPLSASMIKRYDEHHQDLTLLKALVRQQLPEKYKEIFFDQSKNGYAGYIDGGASQEEFYKFIKPILEKMDGTEELLVKLNREDLLRKQRTFDNGSIPHQIHLGELHAILRRQEDFYPFLKDNREKIEKILTFRIPYYVGPLARGNSRFAWMTRKSEETITPWNFEEVVDKGASAQSFIERMTNFDKNLPNEKVLPKHSLLYEYFTVYNELTKVKYVTEGMRKPAFLSGEQKKAIVDLLFKTNRKVTVKQLKEDYFKKIECFDSVEISGVEDRFNASLGTYHDLLKIIKDKDFLDNEENEDILEDIVLTLTLFEDREMIEERLKTYAHLFDDKVMKQLKRRRYTGWGRLSRKLINGIRDKQSGKTILDFLKSDGFANRNFMQLIHDDSLTFKEDIQKAQVSGQGDSLHEHIANLAGSPAIKKGILQTVKVVDELVKVMGRHKPENIVIEMARENQTTQKGQKNSRERMKRIEEGIKELGSQILKEHPVENTQLQNEKLYLYYLQNGRDMYVDQELDINRLSDYDVDHIVPQSFLKDDSIDNKVLTRSDKARGKSDNVPSEEVVKKMKNYWRQLLNAKLITQRKFDNLTKAERGGLSELDKAGFIKRQLVETRQITKHVAQILDSRMNTKYDENDKLIREVKVITLKSKLVSDFRKDFQFYKVREINNYHHAHDAYLNAVVGTALIKKYPKLESEFVYGDYKVYDVRKMIAKSEQEIGKATAKYFFYSNIMNFFKTEITLANGEIRKRPLIETNGETGEIVWDKGRDFATVRKVLSMPQVNIVKKTEVQTGGFSKESILPKRNSDKLIARKKDWDPKKYGGFDSPTVAYSVLVVAKVEKGKSKKLKSVKELLGITIMERSSFEKNPIDFLEAKGYKEVKKDLIIKLPKYSLFELENGRKRMLASAGELQKGNELALPSKYVNFLYLASHYEKLKGSPEDNEQKQLFVEQHKHYLDEIIEQISEFSKRVILADANLDKVLSAYNKHRDKPIREQAENIIHLFTLTNLGAPAAFKYFDTTIDRKRYTSTKEVLDATLIHQSITGLYETRIDLSQLGGDGGGSSGSSGSSGSSGSSGSSGGVLNLEEEYRLHEKPVPSSIDPSWLQLFPTVWAERAGMGLANQVPPVVVELRSGASPVAVRQYPMSKEAREGIRPHIQRFLDLGVLVPCQSPWNTPLLPVKKPGTNDYRPVQDLREINKRVQDIHPTVPNPYNLLSSLPPSHTWYSVLDLKDAFFCLKLHPNSQPLFAFEWRDPEKGNTGQLTWTRLPQGFKNSPTLFDEALHRDLAPFRALNPQVVLLQYVDDLLVAAPTYRDCKEGTQKLLQELSKLGYRVSAKKAQLCQKEVTYLGYLLKEGKRWLTPARKATVMKIPPPTTPRQVREFLGTAGFCRLWIPGFASLAAPLYPLTKESIPFIWTEEHQKAFDRIKEALLSAPALALPDLTKPFTLYVDERAGVARGVLTQTLGPWRRPVAYLSKKLDPVASGWPTCLKAVAAVALLLKDADKLTLGQNVTVIASHSLESIVRQPPDRWMTNARMTHYQSLLLNERVSFAPPAVLNPATLLPVESEATPVHRCSEILAEETGTRRDLKDQPLPGVPAWYTDGSSFIAEGKRRAGAAIVDGKRTVWASSLPEGTSAQKAELVALTQALRLAEGKDINIYTDSRYAFATAHIHGAIYKQRGLLTSAGKDIKNKEEILALLEAIHLPKRVAIIHCPGHQKGNDPVATGNRRADEAAKQAALSTRVLAETTKPAGKRTADGSEFEKRTADGSEFESPKKKAKVE

SEQ ID NO: 6359 - protein, 2103 aa, synthetic construct
MPAAKRVKLDGGDKKYSIGLDIGTNSVGWAVITDEYKVPSKKFKVLGNTDRHSIKKNLIGALLFDSGETAEATRLKRTARRRYTRRKNRICYLQEIFSNEMAKVDDSFFHRLEESFLVEEDKKHERHPIFGNIVDEVAYHEKYPTIYHLRKKLVDSTDKADLRLIYLALAHMIKFRGHFLIEGDLNPDNSDVDKLFIQLVQTYNQLFEENPINASGVDAKAILSARLSKSRRLENLIAQLPGEKKNGLFGNLIALSLGLTPNFKSNFDLAEDAKLQLSKDTYDDDLDNLLAQIGDQYADLFLAAKNLSDAILLSDILRVNTEITKAPLSASMIKRYDEHHQDLTLLKALVRQQLPEKYKEIFFDQSKNGYAGYIDGGASQEEFYKFIKPILEKMDGTEELLVKLNREDLLRKQRTFDNGSIPHQIHLGELHAILRRQEDFYPFLKDNREKIEKILTFRIPYYVGPLARGNSRFAWMTRKSEETITPWNFEEVVDKGASAQSFIERMTNFDKNLPNEKVLPKHSLLYEYFTVYNELTKVKYVTEGMRKPAFLSGEQKKAIVDLLFKTNRKVTVKQLKEDYFKKIECFDSVEISGVEDRFNASLGTYHDLLKIIKDKDFLDNEENEDILEDIVLTLTLFEDREMIEERLKTYAHLFDDKVMKQLKRRRYTGWGRLSRKLINGIRDKQSGKTILDFLKSDGFANRNFMQLIHDDSLTFKEDIQKAQVSGQGDSLHEHIANLAGSPAIKKGILQTVKVVDELVKVMGRHKPENIVIEMARENQTTQKGQKNSRERMKRIEEGIKELGSQILKEHPVENTQLQNEKLYLYYLQNGRDMYVDQELDINRLSDYDVDHIVPQSFLKDDSIDNKVLTRSDKARGKSDNVPSEEVVKKMKNYWRQLLNAKLITQRKFDNLTKAERGGLSELDKAGFIKRQLVETRQITKHVAQILDSRMNTKYDENDKLIREVKVITLKSKLVSDFRKDFQFYKVREINNYHHAHDAYLNAVVGTALIKKYPKLESEFVYGDYKVYDVRKMIAKSEQEIGKATAKYFFYSNIMNFFKTEITLANGEIRKRPLIETNGETGEIVWDKGRDFATVRKVLSMPQVNIVKKTEVQTGGFSKESILPKRNSDKLIARKKDWDPKKYGGFDSPTVAYSVLVVAKVEKGKSKKLKSVKELLGITIMERSSFEKNPIDFLEAKGYKEVKKDLIIKLPKYSLFELENGRKRMLASAGELQKGNELALPSKYVNFLYLASHYEKLKGSPEDNEQKQLFVEQHKHYLDEIIEQISEFSKRVILADANLDKVLSAYNKHRDKPIREQAENIIHLFTLTNLGAPAAFKYFDTTIDRKRYTSTKEVLDATLIHQSITGLYETRIDLSQLGGDGGGSSGSSGSSGSSGSSGSSGGTLNIEDEYRLHETSKEPDVPLGSTWLSDFPQAWAETGGMGLAVRQAPLIIPLKATSTPVSIKQYPMSQEARLGIKPHIQRLLDQGILVPCQSPWNTPLLPVKKPGTNDYRPVQDLREVNKRVEDIHPTVPNPYNLLSGLPPSHQWYTVLDLKDAFFCLRLHPTSQPLFAFEWRDPEMGISGQLTWTRLPQGFKNSPTLFNEALHRDLADFRIQHPDLILLQYVDDLLLAATSEQDCQRGTRALLQTLGNLGYRASAKKAQICQKQVKYLGYLLKEGQRWLTEARKETVMGQPTPKTPRQLREFLGTAGFCRLWIPGFAEMAAPLYPLTKPGTLFNWGPDQQKAYQEIKQALLTAPALGLPDLTKPFELFVDEKQGYAKGVLTQKLGPWRRPVAYLSKKLDPVAAGWPPCLRMVAAIAVLTKDAGKLTMGQPLVILAPHAVEALVKQPPDRWLSNARMTHYQAMLLDTDRVQFGPVVALNPATLLPLPEKEAPHDCLEILAETHGTRPDLTDQPIPDADYTWYTDGSSFLQEGQRRAGAAVTTETEVIWARALPAGTSAQRAELIALTQALKMAEGKKLNVYTDSRYAFATAHVHGEIYRRRGWLTSEGREIKNKNEILALLKALFLPKRLSIIHCPGHQKGNSAEARGNRMADQAAREAAMKAVLETSTLLAGKRTADGSEFEKRTADGSEFESPKKKAKVE

SEQ ID NO: 6360 - protein, 2096 aa, synthetic construct
MPAAKRVKLDGGDKKYSIGLDIGTNSVGWAVITDEYKVPSKKFKVLGNTDRHSIKKNLIGALLFDSGETAEATRLKRTARRRYTRRKNRICYLQEIFSNEMAKVDDSFFHRLEESFLVEEDKKHERHPIFGNIVDEVAYHEKYPTIYHLRKKLVDSTDKADLRLIYLALAHMIKFRGHFLIEGDLNPDNSDVDKLFIQLVQTYNQLFEENPINASGVDAKAILSARLSKSRRLENLIAQLPGEKKNGLFGNLIALSLGLTPNFKSNFDLAEDAKLQLSKDTYDDDLDNLLAQIGDQYADLFLAAKNLSDAILLSDILRVNTEITKAPLSASMIKRYDEHHQDLTLLKALVRQQLPEKYKEIFFDQSKNGYAGYIDGGASQEEFYKFIKPILEKMDGTEELLVKLNREDLLRKQRTFDNGSIPHQIHLGELHAILRRQEDFYPFLKDNREKIEKILTFRIPYYVGPLARGNSRFAWMTRKSEETITPWNFEEVVDKGASAQSFIERMTNFDKNLPNEKVLPKHSLLYEYFTVYNELTKVKYVTEGMRKPAFLSGEQKKAIVDLLFKTNRKVTVKQLKEDYFKKIECFDSVEISGVEDRFNASLGTYHDLLKIIKDKDFLDNEENEDILEDIVLTLTLFEDREMIEERLKTYAHLFDDKVMKQLKRRRYTGWGRLSRKLINGIRDKQSGKTILDFLKSDGFANRNFMQLIHDDSLTFKEDIQKAQVSGQGDSLHEHIANLAGSPAIKKGILQTVKVVDELVKVMGRHKPENIVIEMARENQTTQKGQKNSRERMKRIEEGIKELGSQILKEHPVENTQLQNEKLYLYYLQNGRDMYVDQELDINRLSDYDVDHIVPQSFLKDDSIDNKVLTRSDKARGKSDNVPSEEVVKKMKNYWRQLLNAKLITQRKFDNLTKAERGGLSELDKAGFIKRQLVETRQITKHVAQILDSRMNTKYDENDKLIREVKVITLKSKLVSDFRKDFQFYKVREINNYHHAHDAYLNAVVGTALIKKYPKLESEFVYGDYKVYDVRKMIAKSEQEIGKATAKYFFYSNIMNFFKTEITLANGEIRKRPLIETNGETGEIVWDKGRDFATVRKVLSMPQVNIVKKTEVQTGGFSKESILPKRNSDKLIARKKDWDPKKYGGFDSPTVAYSVLVVAKVEKGKSKKLKSVKELLGITIMERSSFEKNPIDFLEAKGYKEVKKDLIIKLPKYSLFELENGRKRMLASAGELQKGNELALPSKYVNFLYLASHYEKLKGSPEDNEQKQLFVEQHKHYLDEIIEQISEFSKRVILADANLDKVLSAYNKHRDKPIREQAENIIHLFTLTNLGAPAAFKYFDTTIDRKRYTSTKEVLDATLIHQSITGLYETRIDLSQLGGDGGEAAAKGGTVSLQDEHRLFDIPVTTSLPDVWLQDFPQAWAETGGLGRAKCQAPIIIDLKPTAVPVSIKQYPMSLEAHMGIRQHIIKFLELGVLRPCRSPWNTPLLPVKKPGTQDYRPVQDLREINKRTVDIHPTVPNPYNLLSTLKPDYSWYTVLDLKDAFFCLPLAPQSQELFAFEWKDPERGISGQLTWTRLPQGFKNSPTLFNEALHRDLTDFRTQHPEVTLLQYVDDLLLAAPTKKACTQGTRHLLQELGEKGYRASAKKAQICQTKVTYLGYILSEGKRWLTPGRIETVARIPPPRNPREVREFLGTAGFCRLWIPGFAELAAPLYALTKPSTPFTWQTEHQLAFEALKKALLSAPALGLPDTSKPFTLFLDERQGIAKGVLTQKLGPWKRPVAYLSKKLDPVAAGWPPCLRIMAATAMLVKDSAKLTLGQPLTVITPHTLEAIVRQPPDRWITNARLTHYQALLLDTDRVQFGPPVTLNPATLLPVPENQPSPHDCRQVLAETHGTREDLKDQELPDADHTWYTDGSSYLDSGTRRAGAAVVDGHNTIWAQSLPPGTSAQKAELIALTKALELSKGKKANIYTDSRYAFATAHTHGSIYERRGWLTSEGKEIKNKAEIIALLKALFLPQEVAIIHCPGHQKGQDPVAVGNRQADRVARQAAMAEVLTLATEPDNTSHITAGKRTADGSEFEKRTADGSEFESPKKKAKVE

SEQ ID NO: 6361 - protein, 2167 aa, synthetic construct
MPAAKRVKLDGGDKKYSIGLDIGTNSVGWAVITDEYKVPSKKFKVLGNTDRHSIKKNLIGALLFDSGETAEATRLKRTARRRYTRRKNRICYLQEIFSNEMAKVDDSFFHRLEESFLVEEDKKHERHPIFGNIVDEVAYHEKYPTIYHLRKKLVDSTDKADLRLIYLALAHMIKFRGHFLIEGDLNPDNSDVDKLFIQLVQTYNQLFEENPINASGVDAKAILSARLSKSRRLENLIAQLPGEKKNGLFGNLIALSLGLTPNFKSNFDLAEDAKLQLSKDTYDDDLDNLLAQIGDQYADLFLAAKNLSDAILLSDILRVNTEITKAPLSASMIKRYDEHHQDLTLLKALVRQQLPEKYKEIFFDQSKNGYAGYIDGGASQEEFYKFIKPILEKMDGTEELLVKLNREDLLRKQRTFDNGSIPHQIHLGELHAILRRQEDFYPFLKDNREKIEKILTFRIPYYVGPLARGNSRFAWMTRKSEETITPWNFEEVVDKGASAQSFIERMTNFDKNLPNEKVLPKHSLLYEYFTVYNELTKVKYVTEGMRKPAFLSGEQKKAIVDLLFKTNRKVTVKQLKEDYFKKIECFDSVEISGVEDRFNASLGTYHDLLKIIKDKDFLDNEENEDILEDIVLTLTLFEDREMIEERLKTYAHLFDDKVMKQLKRRRYTGWGRLSRKLINGIRDKQSGKTILDFLKSDGFANRNFMQLIHDDSLTFKEDIQKAQVSGQGDSLHEHIANLAGSPAIKKGILQTVKVVDELVKVMGRHKPENIVIEMARENQTTQKGQKNSRERMKRIEEGIKELGSQILKEHPVENTQLQNEKLYLYYLQNGRDMYVDQELDINRLSDYDVDHIVPQSFLKDDSIDNKVLTRSDKARGKSDNVPSEEVVKKMKNYWRQLLNAKLITQRKFDNLTKAERGGLSELDKAGFIKRQLVETRQITKHVAQILDSRMNTKYDENDKLIREVKVITLKSKLVSDFRKDFQFYKVREINNYHHAHDAYLNAVVGTALIKKYPKLESEFVYGDYKVYDVRKMIAKSEQEIGKATAKYFFYSNIMNFFKTEITLANGEIRKRPLIETNGETGEIVWDKGRDFATVRKVLSMPQVNIVKKTEVQTGGFSKESILPKRNSDKLIARKKDWDPKKYGGFDSPTVAYSVLVVAKVEKGKSKKLKSVKELLGITIMERSSFEKNPIDFLEAKGYKEVKKDLIIKLPKYSLFELENGRKRMLASAGELQKGNELALPSKYVNFLYLASHYEKLKGSPEDNEQKQLFVEQHKHYLDEIIEQISEFSKRVILADANLDKVLSAYNKHRDKPIREQAENIIHLFTLTNLGAPAAFKYFDTTIDRKRYTSTKEVLDATLIHQSITGLYETRIDLSQLGGDGGEAAAKGGMDLLKPLTVERKGVKIKGYWNSQADITCVPKDLLQGEEPVRQQNVTTIHGTQEGDVYYVNLKIDGRRINTEVIGTTLDYAIITPGDVPWILKKPLELTIKLDLEEQQGTLLNNSILSKKGKEELKQLFEKYSALWQSWENQVGHRRIRPHKIATGTVKPTPQKQYHINPKAKPDIQIVINDLLKQGVLIQKESTMNTPVYPVPKPNGRWRMVLDYRAVNKVTPLIAVQNQHSYGILGSLFKGRYKTTIDLSNGFWAHPIVPEDYWITAFTWQGKQYCWTVLPQGFLNSPGLFNGDVVDLLQGIPNVEVYVDDVYISHDSEKEHLEYLDILFNRLKEAGYIISLKKSNIANSIVDFLGFQITNEGRGLTDTFKEKLENITAPTTLKQLQSILGLLNFARNFIPDFTELIAPLYALIPKSPKNYVPWQIEHSTTLETLITKLNGAEYLQGRKGDKTLIMKVNASYTTGYIRYYNEGEKKPISYVSIVFSKTELKFTELEKLLTTVHKGLLKALDLSMGQNIHVYSPIVSMQNIQKTPQTAKKALASRWLSWLSYLEDPRIRFFYDPQMPALKDLPAVDTGKDNKKHPSNFQHIFYTDGSAITSPTKEGHLNAGMGIVYFINKDGNLQKQQEWSISLGNHTAQFAEIAAFEFALKKCLPLGGNILVVTDSNYVAKAYNEELDVWASNGFVNNRKKPLKHISKWKSVADLKRLRPDVVVTHEPGHQKLDSSPHAYGNNLADQLATQASFKVHAGKRTADGSEFEKRTADGSEFESPKKKAKVE

SEQ ID NO: 6362 - protein, 2121 aa, synthetic construct
MPAAKRVKLDGGDKKYSIGLDIGTNSVGWAVITDEYKVPSKKFKVLGNTDRHSIKKNLIGALLFDSGETAEATRLKRTARRRYTRRKNRICYLQEIFSNEMAKVDDSFFHRLEESFLVEEDKKHERHPIFGNIVDEVAYHEKYPTIYHLRKKLVDSTDKADLRLIYLALAHMIKFRGHFLIEGDLNPDNSDVDKLFIQLVQTYNQLFEENPINASGVDAKAILSARLSKSRRLENLIAQLPGEKKNGLFGNLIALSLGLTPNFKSNFDLAEDAKLQLSKDTYDDDLDNLLAQIGDQYADLFLAAKNLSDAILLSDILRVNTEITKAPLSASMIKRYDEHHQDLTLLKALVRQQLPEKYKEIFFDQSKNGYAGYIDGGASQEEFYKFIKPILEKMDGTEELLVKLNREDLLRKQRTFDNGSIPHQIHLGELHAILRRQEDFYPFLKDNREKIEKILTFRIPYYVGPLARGNSRFAWMTRKSEETITPWNFEEVVDKGASAQSFIERMTNFDKNLPNEKVLPKHSLLYEYFTVYNELTKVKYVTEGMRKPAFLSGEQKKAIVDLLFKTNRKVTVKQLKEDYFKKIECFDSVEISGVEDRFNASLGTYHDLLKIIKDKDFLDNEENEDILEDIVLTLTLFEDREMIEERLKTYAHLFDDKVMKQLKRRRYTGWGRLSRKLINGIRDKQSGKTILDFLKSDGFANRNFMQLIHDDSLTFKEDIQKAQVSGQGDSLHEHIANLAGSPAIKKGILQTVKVVDELVKVMGRHKPENIVIEMARENQTTQKGQKNSRERMKRIEEGIKELGSQILKEHPVENTQLQNEKLYLYYLQNGRDMYVDQELDINRLSDYDVDHIVPQSFLKDDSIDNKVLTRSDKARGKSDNVPSEEVVKKMKNYWRQLLNAKLITQRKFDNLTKAERGGLSELDKAGFIKRQLVETRQITKHVAQILDSRMNTKYDENDKLIREVKVITLKSKLVSDFRKDFQFYKVREINNYHHAHDAYLNAVVGTALIKKYPKLESEFVYGDYKVYDVRKMIAKSEQEIGKATAKYFFYSNIMNFFKTEITLANGEIRKRPLIETNGETGEIVWDKGRDFATVRKVLSMPQVNIVKKTEVQTGGFSKESILPKRNSDKLIARKKDWDPKKYGGFDSPTVAYSVLVVAKVEKGKSKKLKSVKELLGITIMERSSFEKNPIDFLEAKGYKEVKKDLIIKLPKYSLFELENGRKRMLASAGELQKGNELALPSKYVNFLYLASHYEKLKGSPEDNEQKQLFVEQHKHYLDEIIEQISEFSKRVILADANLDKVLSAYNKHRDKPIREQAENIIHLFTLTNLGAPAAFKYFDTTIDRKRYTSTKEVLDATLIHQSITGLYETRIDLSQLGGDGGEAAAKGGLLGRDLLTKLKAQIQFSTEGPQVTWEDRPAMCLVLNLEEEYRLHEKPVPPSIDPSWLQLFPMVWAEKAGMGLANQVPPVVVELKSDASPVAVRQYPMSKEAREGIRPHIQRFLDLGILVPCQSPWNTPLLPVKKPGTNDYRPVQDLREVNKRVQDIHPTVPNPYNLLSSLPPSHTWYSVLDLKDAFFCLKLHPNSQPLFAFEWRDPEKGNTGQLTWTRLPQGFKNSPTLFNEALHRDLASFRALNPQVVMLQYVDDLLVAAPTYRDCKEGTRRLLQELSKLGYRVSAKKAQLCREEVTYLGYLLKGGKRWLTPARKATVMKIPTPTTPRQVREFLGTAGFCRLWIPGFASLAAPLYPLTRPKVPFTWTEAHQEAFGRIKEALLSAPALALPDLTKPFALYVDEKEGVARGVLTQTLGPWRRPVAYLSKKLDPVASGWPTCLKAIAAVALLLKDADKLTLGQNVLVIAPHNLESIVRQPPDRWMTNARMTHYQSLLLNERVSFAPPAILNPATLLPVESDDTPIHICSEILAEETGTRPDLRDQPLPGVPAWYTDGSSFIMDGRRQAGAAIVDNKRTVWASNLPEGTSAQKAELIALTQALRLAEGKSINIYTDSRYAFATAHVHGAIYKQRGWLTSAGKDIKNKEEILALLEAIHLPKRVAIIHCPGHQRGTDPVATGNRKADEAAKQAAQSTRILTETTKNAGKRTADGSEFEKRTADGSEFESPKKKAKVE

SEQ ID NO: 6363 - protein, 2212 aa, synthetic construct
MPAAKRVKLDGGDKKYSIGLDIGTNSVGWAVITDEYKVPSKKFKVLGNTDRHSIKKNLIGALLFDSGETAEATRLKRTARRRYTRRKNRICYLQEIFSNEMAKVDDSFFHRLEESFLVEEDKKHERHPIFGNIVDEVAYHEKYPTIYHLRKKLVDSTDKADLRLIYLALAHMIKFRGHFLIEGDLNPDNSDVDKLFIQLVQTYNQLFEENPINASGVDAKAILSARLSKSRRLENLIAQLPGEKKNGLFGNLIALSLGLTPNFKSNFDLAEDAKLQLSKDTYDDDLDNLLAQIGDQYADLFLAAKNLSDAILLSDILRVNTEITKAPLSASMIKRYDEHHQDLTLLKALVRQQLPEKYKEIFFDQSKNGYAGYIDGGASQEEFYKFIKPILEKMDGTEELLVKLNREDLLRKQRTFDNGSIPHQIHLGELHAILRRQEDFYPFLKDNREKIEKILTFRIPYYVGPLARGNSRFAWMTRKSEETITPWNFEEVVDKGASAQSFIERMTNFDKNLPNEKVLPKHSLLYEYFTVYNELTKVKYVTEGMRKPAFLSGEQKKAIVDLLFKTNRKVTVKQLKEDYFKKIECFDSVEISGVEDRFNASLGTYHDLLKIIKDKDFLDNEENEDILEDIVLTLTLFEDREMIEERLKTYAHLFDDKVMKQLKRRRYTGWGRLSRKLINGIRDKQSGKTILDFLKSDGFANRNFMQLIHDDSLTFKEDIQKAQVSGQGDSLHEHIANLAGSPAIKKGILQTVKVVDELVKVMGRHKPENIVIEMARENQTTQKGQKNSRERMKRIEEGIKELGSQILKEHPVENTQLQNEKLYLYYLQNGRDMYVDQELDINRLSDYDVDHIVPQSFLKDDSIDNKVLTRSDKARGKSDNVPSEEVVKKMKNYWRQLLNAKLITQRKFDNLTKAERGGLSELDKAGFIKRQLVETRQITKHVAQILDSRMNTKYDENDKLIREVKVITLKSKLVSDFRKDFQFYKVREINNYHHAHDAYLNAVVGTALIKKYPKLESEFVYGDYKVYDVRKMIAKSEQEIGKATAKYFFYSNIMNFFKTEITLANGEIRKRPLIETNGETGEIVWDKGRDFATVRKVLSMPQVNIVKKTEVQTGGFSKESILPKRNSDKLIARKKDWDPKKYGGFDSPTVAYSVLVVAKVEKGKSKKLKSVKELLGITIMERSSFEKNPIDFLEAKGYKEVKKDLIIKLPKYSLFELENGRKRMLASAGELQKGNELALPSKYVNFLYLASHYEKLKGSPEDNEQKQLFVEQHKHYLDEIIEQISEFSKRVILADANLDKVLSAYNKHRDKPIREQAENIIHLFTLTNLGAPAAFKYFDTTIDRKRYTSTKEVLDATLIHQSITGLYETRIDLSQLGGDGGEAAAKGGTLGDQGSRGSDPLPEPRVTLTVEGIPTEFLVNTGAEHSVLTKPMGKMGSKRTVVAGATGSKVYPWTTKRLLKIGQKQVTHSFLVIPECPAPLLGRDLLTKLKAQIQFSTEGPQVTWEDRPAMCLVLNLEEEYRLHEKPVPPSIDPSWLQLFPMVWAEKAGMGLANQVPPVVVELKSDASPVAVRQYPMSKEAREGIRPHIQRFLDLGILVPCQSPWNTPLLPVKKPGTNDYRPVQDLREVNKRVQDIHPTVPNPYNLLSSLPPSHTWYSVLDLKDAFFCLKLHPNSQPLFAFEWRDPEKGNTGQLTWTRLPQGFKNSPTLFNEALHRDLASFRALNPQVVMLQYVDDLLVAAPTYRDCKEGTRRLLQELSKLGYRVSAKKAQLCREEVTYLGYLLKGGKRWLTPARKATVMKIPTPTTPRQVREFLGTAGFCRLWIPGFASLAAPLYPLTRPKVPFTWTEAHQEAFGRIKEALLSAPALALPDLTKPFALYVDEKEGVARGVLTQTLGPWRRPVAYLSKKLDPVASGWPTCLKAIAAVALLLKDADKLTLGQNVLVIAPHNLESIVRQPPDRWMTNARMTHYQSLLLNERVSFAPPAILNPATLLPVESDDTPIHICSEILAEETGTRPDLRDQPLPGVPAWYTDGSSFIMDGRRQAGAAIVDNKRTVWASNLPEGTSAQKAELIALTQALRLAEGKSINIYTDSRYAFATAHVHGAIYKQRGWLTSAGKDIKNKEEILALLEAIHLPKRVAIIHCPGHQRGTDPVATGNRKADEAAKQAAQSTRILTETTKNAGKRTADGSEFEKRTADGSEFESPKKKAKVE

SEQ ID NO: 6364 - protein, 2212 aa, synthetic construct
MPAAKRVKLDGGDKKYSIGLDIGTNSVGWAVITDEYKVPSKKFKVLGNTDRHSIKKNLIGALLFDSGETAEATRLKRTARRRYTRRKNRICYLQEIFSNEMAKVDDSFFHRLEESFLVEEDKKHERHPIFGNIVDEVAYHEKYPTIYHLRKKLVDSTDKADLRLIYLALAHMIKFRGHFLIEGDLNPDNSDVDKLFIQLVQTYNQLFEENPINASGVDAKAILSARLSKSRRLENLIAQLPGEKKNGLFGNLIALSLGLTPNFKSNFDLAEDAKLQLSKDTYDDDLDNLLAQIGDQYADLFLAAKNLSDAILLSDILRVNTEITKAPLSASMIKRYDEHHQDLTLLKALVRQQLPEKYKEIFFDQSKNGYAGYIDGGASQEEFYKFIKPILEKMDGTEELLVKLNREDLLRKQRTFDNGSIPHQIHLGELHAILRRQEDFYPFLKDNREKIEKILTFRIPYYVGPLARGNSRFAWMTRKSEETITPWNFEEVVDKGASAQSFIERMTNFDKNLPNEKVLPKHSLLYEYFTVYNELTKVKYVTEGMRKPAFLSGEQKKAIVDLLFKTNRKVTVKQLKEDYFKKIECFDSVEISGVEDRFNASLGTYHDLLKIIKDKDFLDNEENEDILEDIVLTLTLFEDREMIEERLKTYAHLFDDKVMKQLKRRRYTGWGRLSRKLINGIRDKQSGKTILDFLKSDGFANRNFMQLIHDDSLTFKEDIQKAQVSGQGDSLHEHIANLAGSPAIKKGILQTVKVVDELVKVMGRHKPENIVIEMARENQTTQKGQKNSRERMKRIEEGIKELGSQILKEHPVENTQLQNEKLYLYYLQNGRDMYVDQELDINRLSDYDVDHIVPQSFLKDDSIDNKVLTRSDKARGKSDNVPSEEVVKKMKNYWRQLLNAKLITQRKFDNLTKAERGGLSELDKAGFIKRQLVETRQITKHVAQILDSRMNTKYDENDKLIREVKVITLKSKLVSDFRKDFQFYKVREINNYHHAHDAYLNAVVGTALIKKYPKLESEFVYGDYKVYDVRKMIAKSEQEIGKATAKYFFYSNIMNFFKTEITLANGEIRKRPLIETNGETGEIVWDKGRDFATVRKVLSMPQVNIVKKTEVQTGGFSKESILPKRNSDKLIARKKDWDPKKYGGFDSPTVAYSVLVVAKVEKGKSKKLKSVKELLGITIMERSSFEKNPIDFLEAKGYKEVKKDLIIKLPKYSLFELENGRKRMLASAGELQKGNELALPSKYVNFLYLASHYEKLKGSPEDNEQKQLFVEQHKHYLDEIIEQISEFSKRVILADANLDKVLSAYNKHRDKPIREQAENIIHLFTLTNLGAPAAFKYFDTTIDRKRYTSTKEVLDATLIHQSITGLYETRIDLSQLGGDGGEAAAKGGTLGDQGSRGSDPLPEPRVTLTVEGIPTEFLVNTGAEHSVLTKPMGKMGSKRTVVAGATGSKVYPWTTKRLLKIGQKQVTHSFLVIPECPAPLLGRDLLTKLKAQIQFSTEGPQVTWEDRPAMCLVLNLEEEYRLHEKPVPPSIDPSWLQLFPMVWAEKAGMGLANQVPPVVVELKSDASPVAVRQYPMSKEAREGIRPHIQRFLDLGILVPCQSPWNTPLLPVKKPGTNDYRPVQDLREVNKRVQDIHPTVPNPYNLLSSLPPSHTWYSVLDLKDAFFCLKLHPNSQPLFAFEWRDPEKGNTGQLTWTRLPQGFKNSPTLFNEALHRDLASFRALNPQVVMLQYVDDLLVAAPTYRDCKEGTRRLLQELSKLGYRVSAKKAQLCREEVTYLGYLLKGGKRWLTPARKATVMKIPTPTTPRQVREFLGKAGFCRLFIPGFASLAAPLYPLTRPKVPFTWTEAHQEAFGRIKEALLSAPALALPDLTKPFALYVDEKEGVARGVLTQTLGPWRRPVAYLSKKLDPVASGWPTCLKAIAAVALLLKDADKLTLGQNVLVIAPHNLESIVRQPPDRWMTNARMTHYQSLLLNERVSFAPPAILNPATLLPVESDDTPIHICSEILAEETGTRPDLRDQPLPGVPAWYTDGSSFIMDGRRQAGAAIVDNKRTVWASNLPEGTSAQKAELIALTQALRLAEGKSINIYTDSRYAFATAHVHGAIYKQRGWLTSAGKDIKNKEEILALLEAIHLPKRVAIIHCPGHQRGTDPVATGNRKADEAAKQAAQSTRILTETTKNAGKRTADGSEFEKRTADGSEFESPKKKAKVE

SEQ ID NO: 6365 - protein, 2090 aa, synthetic construct
MPAAKRVKLDGGDKKYSIGLDIGTNSVGWAVITDEYKVPSKKFKVLGNTDRHSIKKNLIGALLFDSGETAEATRLKRTARRRYTRRKNRICYLQEIFSNEMAKVDDSFFHRLEESFLVEEDKKHERHPIFGNIVDEVAYHEKYPTIYHLRKKLVDSTDKADLRLIYLALAHMIKFRGHFLIEGDLNPDNSDVDKLFIQLVQTYNQLFEENPINASGVDAKAILSARLSKSRRLENLIAQLPGEKKNGLFGNLIALSLGLTPNFKSNFDLAEDAKLQLSKDTYDDDLDNLLAQIGDQYADLFLAAKNLSDAILLSDILRVNTEITKAPLSASMIKRYDEHHQDLTLLKALVRQQLPEKYKEIFFDQSKNGYAGYIDGGASQEEFYKFIKPILEKMDGTEELLVKLNREDLLRKQRTFDNGSIPHQIHLGELHAILRRQEDFYPFLKDNREKIEKILTFRIPYYVGPLARGNSRFAWMTRKSEETITPWNFEEVVDKGASAQSFIERMTNFDKNLPNEKVLPKHSLLYEYFTVYNELTKVKYVTEGMRKPAFLSGEQKKAIVDLLFKTNRKVTVKQLKEDYFKKIECFDSVEISGVEDRFNASLGTYHDLLKIIKDKDFLDNEENEDILEDIVLTLTLFEDREMIEERLKTYAHLFDDKVMKQLKRRRYTGWGRLSRKLINGIRDKQSGKTILDFLKSDGFANRNFMQLIHDDSLTFKEDIQKAQVSGQGDSLHEHIANLAGSPAIKKGILQTVKVVDELVKVMGRHKPENIVIEMARENQTTQKGQKNSRERMKRIEEGIKELGSQILKEHPVENTQLQNEKLYLYYLQNGRDMYVDQELDINRLSDYDVDHIVPQSFLKDDSIDNKVLTRSDKARGKSDNVPSEEVVKKMKNYWRQLLNAKLITQRKFDNLTKAERGGLSELDKAGFIKRQLVETRQITKHVAQILDSRMNTKYDENDKLIREVKVITLKSKLVSDFRKDFQFYKVREINNYHHAHDAYLNAVVGTALIKKYPKLESEFVYGDYKVYDVRKMIAKSEQEIGKATAKYFFYSNIMNFFKTEITLANGEIRKRPLIETNGETGEIVWDKGRDFATVRKVLSMPQVNIVKKTEVQTGGFSKESILPKRNSDKLIARKKDWDPKKYGGFDSPTVAYSVLVVAKVEKGKSKKLKSVKELLGITIMERSSFEKNPIDFLEAKGYKEVKKDLIIKLPKYSLFELENGRKRMLASAGELQKGNELALPSKYVNFLYLASHYEKLKGSPEDNEQKQLFVEQHKHYLDEIIEQISEFSKRVILADANLDKVLSAYNKHRDKPIREQAENIIHLFTLTNLGAPAAFKYFDTTIDRKRYTSTKEVLDATLIHQSITGLYETRIDLSQLGGDGGEAAAKGGTLNIEDEHRLHETSKEPDVSLGSTWLSDFPQAWAETGGMGLAVRQAPLIIPLKATSTPVSIKQYPMSQEARLGIKPHIQRLLDQGILVPCQSPWNTPLLPVKKPGTNDYRPVQDLREVNKRVEDIHPTVPNPYNLLSGLPPSHQWYTVLDLKDAFFCLRLHPTSQPLFAFEWRDPEMGISGQLTWTRLPQGFKNSPTLFDEALHRDLADFRIQHPDLILLQYVDDLLLAATSELDCQQGTRALLQTLGNLGYRASAKKAQICQKQVKYLGYLLKEGQRWLTEARKETVMGQPTPKTPRQLREFLGTAGFCRLWIPGFAEMAAPLYPLTKTGTLFNWGPDQQKAYQEIKQALLTAPALGLPDLTKPFELFVDEKQGYAKGVLTQKLGPWRRPVAYLSKKLDPVAAGWPPCLRMVAAIAVLTKDAGKLTMGQPLVILAPHAVEALVKQPPDRWLSNARMTHYQALLLDTDRVQFGPVVALNPATLLPLPEEGLQHNCLDILAEAHGTRPDLTDQPLPDADHTWYTDGSSLLQEGQRKAGAAVTTETEVIWAKALPAGTSAQRAELIALTQALKMAEGKKLNVYTDSRYAFATAHIHGEIYRRRGLLTSEGKEIKNKDEILALLKALFLPKRLSIIHCPGHQKGHSAEARGNRMADQAARKAAITETPDTSTLLAGKRTADGSEFEKRTADGSEFESPKKKAKVE

SEQ ID NO: 6366 - protein, 2082 aa, synthetic construct
MPAAKRVKLDGGDKKYSIGLDIGTNSVGWAVITDEYKVPSKKFKVLGNTDRHSIKKNLIGALLFDSGETAEATRLKRTARRRYTRRKNRICYLQEIFSNEMAKVDDSFFHRLEESFLVEEDKKHERHPIFGNIVDEVAYHEKYPTIYHLRKKLVDSTDKADLRLIYLALAHMIKFRGHFLIEGDLNPDNSDVDKLFIQLVQTYNQLFEENPINASGVDAKAILSARLSKSRRLENLIAQLPGEKKNGLFGNLIALSLGLTPNFKSNFDLAEDAKLQLSKDTYDDDLDNLLAQIGDQYADLFLAAKNLSDAILLSDILRVNTEITKAPLSASMIKRYDEHHQDLTLLKALVRQQLPEKYKEIFFDQSKNGYAGYIDGGASQEEFYKFIKPILEKMDGTEELLVKLNREDLLRKQRTFDNGSIPHQIHLGELHAILRRQEDFYPFLKDNREKIEKILTFRIPYYVGPLARGNSRFAWMTRKSEETITPWNFEEVVDKGASAQSFIERMTNFDKNLPNEKVLPKHSLLYEYFTVYNELTKVKYVTEGMRKPAFLSGEQKKAIVDLLFKTNRKVTVKQLKEDYFKKIECFDSVEISGVEDRFNASLGTYHDLLKIIKDKDFLDNEENEDILEDIVLTLTLFEDREMIEERLKTYAHLFDDKVMKQLKRRRYTGWGRLSRKLINGIRDKQSGKTILDFLKSDGFANRNFMQLIHDDSLTFKEDIQKAQVSGQGDSLHEHIANLAGSPAIKKGILQTVKVVDELVKVMGRHKPENIVIEMARENQTTQKGQKNSRERMKRIEEGIKELGSQILKEHPVENTQLQNEKLYLYYLQNGRDMYVDQELDINRLSDYDVDHIVPQSFLKDDSIDNKVLTRSDKARGKSDNVPSEEVVKKMKNYWRQLLNAKLITQRKFDNLTKAERGGLSELDKAGFIKRQLVETRQITKHVAQILDSRMNTKYDENDKLIREVKVITLKSKLVSDFRKDFQFYKVREINNYHHAHDAYLNAVVGTALIKKYPKLESEFVYGDYKVYDVRKMIAKSEQEIGKATAKYFFYSNIMNFFKTEITLANGEIRKRPLIETNGETGEIVWDKGRDFATVRKVLSMPQVNIVKKTEVQTGGFSKESILPKRNSDKLIARKKDWDPKKYGGFDSPTVAYSVLVVAKVEKGKSKKLKSVKELLGITIMERSSFEKNPIDFLEAKGYKEVKKDLIIKLPKYSLFELENGRKRMLASAGELQKGNELALPSKYVNFLYLASHYEKLKGSPEDNEQKQLFVEQHKHYLDEIIEQISEFSKRVILADANLDKVLSAYNKHRDKPIREQAENIIHLFTLTNLGAPAAFKYFDTTIDRKRYTSTKEVLDATLIHQSITGLYETRIDLSQLGGDGGEAAAKGGLDDEYRLYSPLVKPDQNIQFWLEQFPQAWAETAGMGLAKQVPPQVIQLKASATPVSVRQYPLSKEAQEGIRPHVQRLIQQGILVPVQSPWNTPLLPVRKPGTNDYRPVQDLREVNKRVQDIHPTVPNPYNLLCALPPQRSWYTVLDLKDAFFCLRLHPTSQPLFAFEWRDPGTGRTGQLTWTRLPQGFKNSPTIFNEALHRDLANFRIQHPQVTLLQYVDDLLLAGATKQDCLEGTKALLLELSDLGYRASAKKAQICRREVTYLGYSLRDGQRWLTEARKKTVVQIPAPTTAKQVREFLGKAGFCRLFIPGFATLAAPLYPLTKPKGEFSWAPEHQKAFDAIKKALLSAPALALPDVTKPFTLYVDERKGVARGVLTQTLGPWRRPVAYLSKKLDPVASGWPVCLKAIAAVAILVKDADKLTLGQNITVIAPHALENIVRQPPDRWMTNARMTHYQSLLLTERVTFAPPAALNPATLLPEETDEPVTHDCHQLLIEETGVRKDLTDIPLTGEVLTWFTDGSSYVVEGKRMAGAAVVDGTRTIWASSLPEGTSAQKAELMALTQALRLAEGKSINIYTDSRYAFATAHVHGAIYKQRGWLTSAGREIKNKEEILSLLEALHLPKRLAIIHCPGHQKAKDPISRGNQMADRVAKQAAQGVNLLPAGKRTADGSEFEKRTADGSEFESPKKKAKVE

SEQ ID NO: 6367 - protein, 2084 aa, synthetic construct
MPAAKRVKLDGGDKKYSIGLDIGTNSVGWAVITDEYKVPSKKFKVLGNTDRHSIKKNLIGALLFDSGETAEATRLKRTARRRYTRRKNRICYLQEIFSNEMAKVDDSFFHRLEESFLVEEDKKHERHPIFGNIVDEVAYHEKYPTIYHLRKKLVDSTDKADLRLIYLALAHMIKFRGHFLIEGDLNPDNSDVDKLFIQLVQTYNQLFEENPINASGVDAKAILSARLSKSRRLENLIAQLPGEKKNGLFGNLIALSLGLTPNFKSNFDLAEDAKLQLSKDTYDDDLDNLLAQIGDQYADLFLAAKNLSDAILLSDILRVNTEITKAPLSASMIKRYDEHHQDLTLLKALVRQQLPEKYKEIFFDQSKNGYAGYIDGGASQEEFYKFIKPILEKMDGTEELLVKLNREDLLRKQRTFDNGSIPHQIHLGELHAILRRQEDFYPFLKDNREKIEKILTFRIPYYVGPLARGNSRFAWMTRKSEETITPWNFEEVVDKGASAQSFIERMTNFDKNLPNEKVLPKHSLLYEYFTVYNELTKVKYVTEGMRKPAFLSGEQKKAIVDLLFKTNRKVTVKQLKEDYFKKIECFDSVEISGVEDRFNASLGTYHDLLKIIKDKDFLDNEENEDILEDIVLTLTLFEDREMIEERLKTYAHLFDDKVMKQLKRRRYTGWGRLSRKLINGIRDKQSGKTILDFLKSDGFANRNFMQLIHDDSLTFKEDIQKAQVSGQGDSLHEHIANLAGSPAIKKGILQTVKVVDELVKVMGRHKPENIVIEMARENQTTQKGQKNSRERMKRIEEGIKELGSQILKEHPVENTQLQNEKLYLYYLQNGRDMYVDQELDINRLSDYDVDHIVPQSFLKDDSIDNKVLTRSDKARGKSDNVPSEEVVKKMKNYWRQLLNAKLITQRKFDNLTKAERGGLSELDKAGFIKRQLVETRQITKHVAQILDSRMNTKYDENDKLIREVKVITLKSKLVSDFRKDFQFYKVREINNYHHAHDAYLNAVVGTALIKKYPKLESEFVYGDYKVYDVRKMIAKSEQEIGKATAKYFFYSNIMNFFKTEITLANGEIRKRPLIETNGETGEIVWDKGRDFATVRKVLSMPQVNIVKKTEVQTGGFSKESILPKRNSDKLIARKKDWDPKKYGGFDSPTVAYSVLVVAKVEKGKSKKLKSVKELLGITIMERSSFEKNPIDFLEAKGYKEVKKDLIIKLPKYSLFELENGRKRMLASAGELQKGNELALPSKYVNFLYLASHYEKLKGSPEDNEQKQLFVEQHKHYLDEIIEQISEFSKRVILADANLDKVLSAYNKHRDKPIREQAENIIHLFTLTNLGAPAAFKYFDTTIDRKRYTSTKEVLDATLIHQSITGLYETRIDLSQLGGDGGEAAAKGGTLQLDDEYRLYSPLVKPDQNIQFWLEQFPQAWAETAGMGLAKQVPPQVIQLKASATPVSVRQYPLSKEAQEGIRPHVQRLIQQGILVPVQSPWNTPLLPVRKPGTNDYRPVQDLREVNKRVQDIHPTVPNPYNLLCALPPQRSWYTVLDLKDAFFCLRLHPTSQPLFAFEWRDPGTGRTGQLTWTRLPQGFKNSPTIFDEALHRDLANFRIQHPQVTLLQYVDDLLLAGATKQDCLEGTKALLLELSDLGYRASAKKAQICRREVTYLGYSLRDGQRWLTEARKKTVVQIPAPTTAKQVREFLGTAGFCRLWIPGFATLAAPLYPLTKEKGEFSWAPEHQKAFDAIKKALLSAPALALPDVTKPFTLYVDERKGVARGVLTQTLGPWRRPVAYLSKKLDPVASGWPVCLKAIAAVAILVKDADKLTLGQNITVIAPHALENIVRQPPDRWMTNARMTHYQSLLLTERVTFAPPAALNPATLLPEETDEPVTHDCHQLLIEETGVRKDLTDIPLTGEVLTWFTDGSSYVVEGKRMAGAAVVDGTRTIWASSLPEGTSAQKAELMALTQALRLAEGKSINIYTDSRYAFATAHVHGAIYKQRGLLTSAGREIKNKEEILSLLEALHLPKRLAIIHCPGHQKAKDPISRGNQMADRVAKQAAQGVNLLAGKRTADGSEFEKRTADGSEFESPKKKAKVE

SEQ ID NO: 6368 - protein, 2082 aa, synthetic construct; identical to SEQ ID NO: 6366

SEQ ID NO: 6369 - protein, 2081 aa, synthetic construct
MPAAKRVKLDGGDKKYSIGLDIGTNSVGWAVITDEYKVPSKKFKVLGNTDRHSIKKNLIGALLFDSGETAEATRLKRTARRRYTRRKNRICYLQEIFSNEMAKVDDSFFHRLEESFLVEEDKKHERHPIFGNIVDEVAYHEKYPTIYHLRKKLVDSTDKADLRLIYLALAHMIKFRGHFLIEGDLNPDNSDVDKLFIQLVQTYNQLFEENPINASGVDAKAILSARLSKSRRLENLIAQLPGEKKNGLFGNLIALSLGLTPNFKSNFDLAEDAKLQLSKDTYDDDLDNLLAQIGDQYADLFLAAKNLSDAILLSDILRVNTEITKAPLSASMIKRYDEHHQDLTLLKALVRQQLPEKYKEIFFDQSKNGYAGYIDGGASQEEFYKFIKPILEKMDGTEELLVKLNREDLLRKQRTFDNGSIPHQIHLGELHAILRRQEDFYPFLKDNREKIEKILTFRIPYYVGPLARGNSRFAWMTRKSEETITPWNFEEVVDKGASAQSFIERMTNFDKNLPNEKVLPKHSLLYEYFTVYNELTKVKYVTEGMRKPAFLSGEQKKAIVDLLFKTNRKVTVKQLKEDYFKKIECFDSVEISGVEDRFNASLGTYHDLLKIIKDKDFLDNEENEDILEDIVLTLTLFEDREMIEERLKTYAHLFDDKVMKQLKRRRYTGWGRLSRKLINGIRDKQSGKTILDFLKSDGFANRNFMQLIHDDSLTFKEDIQKAQVSGQGDSLHEHIANLAGSPAIKKGILQTVKVVDELVKVMGRHKPENIVIEMARENQTTQKGQKNSRERMKRIEEGIKELGSQILKEHPVENTQLQNEKLYLYYLQNGRDMYVDQELDINRLSDYDVDHIVPQSFLKDDSIDNKVLTRSDKARGKSDNVPSEEVVKKMKNYWRQLLNAKLITQRKFDNLTKAERGGLSELDKAGFIKRQLVETRQITKHVAQILDSRMNTKYDENDKLIREVKVITLKSKLVSDFRKDFQFYKVREINNYHHAHDAYLNAVVGTALIKKYPKLESEFVYGDYKVYDVRKMIAKSEQEIGKATAKYFFYSNIMNFFKTEITLANGEIRKRPLIETNGETGEIVWDKGRDFATVRKVLSMPQVNIVKKTEVQTGGFSKESILPKRNSDKLIARKKDWDPKKYGGFDSPTVAYSVLVVAKVEKGKSKKLKSVKELLGITIMERSSFEKNPIDFLEAKGYKEVKKDLIIKLPKYSLFELENGRKRMLASAGELQKGNELALPSKYVNFLYLASHYEKLKGSPEDNEQKQLFVEQHKHYLDEIIEQISEFSKRVILADANLDKVLSAYNKHRDKPIREQAENIIHLFTLTNLGAPAAFKYFDTTIDRKRYTSTKEVLDATLIHQSITGLYETRIDLSQLGGDGGEAAAKGGIPWLMKKPLQLTTLVPLQEYEERLLKQTMLTGSYKEKLQSLFLKYDALWQHWENQVGHRRIKPHHIATGTVNPRPQKQYPINPKAKASIQTVINDLLKQGVLIQQNSIMNTPVYPVPKPDGKWRMVLDYREVNKTIPLIAAQNQHSAGILSSIFRGKYKTTLDLSNGFWAHSITPESYWLTAFTWLGQQYCWTRLPQGFLNSPALFNADVVDLLKEVPNVQVYVDDIYISHDDPREHLEQLEKVFSLLLNAGYVVSLKKSEIAQHEVEFLGFNITKEGRGLTETFKQKLLNITPPRDLKQLQSILGLLNFARNFIPNFSELVKPLYNIIATAPGKYITWTTDNSQQLQNIISMLNSAENLEERNPEVRLIMKVNTSPSAGYIRFYNEFAKRPIMYLNYVYTKAEVKFTNTEKLLTTIHKGLIKALDLGMGQEILVYSPIVSMTKIQKTPLPERKALPIRWITWMSYLEDPRIQFHYDKTLPELQQVPTVTDDIIAKIKHPSEFSMVFYTDGSAIKHPNVNKSHNAGMGIAQVQFKPEFTVINTWSIPLGDHTAQLAEVAAVEFACKKALKIDGPVLIVTDSFYVAESVNKELPYWQSNGFFNNKKKPLKHVSKWKSIADCIQLKPDIIIIHEKGHQPTASTFHTEGNNLADKLATQGSYVVNAGKRTADGSEFEKRTADGSEFESPKKKAKVE

SEQ ID NO: 6370 - protein, 2097 aa, synthetic construct
MPAAKRVKLDGGDKKYSIGLDIGTNSVGWAVITDEYKVPSKKFKVLGNTDRHSIKKNLIGALLFDSGETAEATRLKRTARRRYTRRKNRICYLQEIFSNEMAKVDDSFFHRLEESFLVEEDKKHERHPIFGNIVDEVAYHEKYPTIYHLRKKLVDSTDKADLRLIYLALAHMIKFRGHFLIEGDLNPDNSDVDKLFIQLVQTYNQLFEENPINASGVDAKAILSARLSKSRRLENLIAQLPGEKKNGLFGNLIALSLGLTPNFKSNFDLAEDAKLQLSKDTYDDDLDNLLAQIGDQYADLFLAAKNLSDAILLSDILRVNTEITKAPLSASMIKRYDEHHQDLTLLKALVRQQLPEKYKEIFFDQSKNGYAGYIDGGASQEEFYKFIKPILEKMDGTEELLVKLNREDLLRKQRTFDNGSIPHQIHLGELHAILRRQEDFYPFLKDNREKIEKILTFRIPYYVGPLARGNSRFAWMTRKSEETITPWNFEEVVDKGASAQSFIERMTNFDKNLPNEKVLPKHSLLYEYFTVYNELTKVKYVTEGMRKPAFLSGEQKKAIVDLLFKTNRKVTVKQLKEDYFKKIECFDSVEISGVEDRFNASLGTYHDLLKIIKDKDFLDNEENEDILEDIVLTLTLFEDREMIEERLKTYAHLFDDKVMKQLKRRRYTGWGRLSRKLINGIRDKQSGKTILDFLKSDGFANRNFMQLIHDDSLTFKEDIQKAQVSGQGDSLHEHIANLAGSPAIKKGILQTVKVVDELVKVMGRHKPENIVIEMARENQTTQKGQKNSRERMKRIEEGIKELGSQILKEHPVENTQLQNEKLYLYYLQNGRDMYVDQELDINRLSDYDVDHIVPQSFLKDDSIDNKVLTRSDKARGKSDNVPSEEVVKKMKNYWRQLLNAKLITQRKFDNLTKAERGGLSELDKAGFIKRQLVETRQITKHVAQILDSRMNTKYDENDKLIREVKVITLKSKLVSDFRKDFQFYKVREINNYHHAHDAYLNAVVGTALIKKYPKLESEFVYGDYKVYDVRKMIAKSEQEIGKATAKYFFYSNIMNFFKTEITLANGEIRKRPLIETNGETGEIVWDKGRDFATVRKVLSMPQVNIVKKTEVQTGGFSKESILPKRNSDKLIARKKDWDPKKYGGFDSPTVAYSVLVVAKVEKGKSKKLKSVKELLGITIMERSSFEKNPIDFLEAKGYKEVKKDLIIKLPKYSLFELENGRKRMLASAGELQKGNELALPSKYVNFLYLASHYEKLKGSPEDNEQKQLFVEQHKHYLDEIIEQISEFSKRVILADANLDKVLSAYNKHRDKPIREQAENIIHLFTLTNLGAPAAFKYFDTTIDRKRYTSTKEVLDATLIHQSITGLYETRIDLSQLGGDGGEAAAKEAAAKGGTAPLEEEYRLFLEAPIQNVTLLEQWKREIPKVWAEINPPGLASTQAPIHVQLLSTALPVRVRQYPITLEAKRSLRETIRKFRAAGILRPVHSPWNTPLLPVRKSGTSEYRMVQDLREVNKRVETIHPTVPNPYTLLSLLPPDRIWYSVLDLKDAFFCIPLAPESQLIFAFEWADAEEGESGQLTWTRLPQGFKNSPTLFNEALNRDLQGFRLDHPSVSLLQYVDDLLIAADTQAACLSATRDLLMTLAELGYRVSGKKAQLCQEEVTYLGFKIHKGSRSLSNSRTQAILQIPVPKTKRQVREFLGKIGYCRLFIPGFAELAQPLYAATRPGNDPLVWGEKEEEAFQSLKLALTQPPALALPSLDKPFQLFVEETSGAAKGVLTQALGPWKRPVAYLSKRLDPVAAGWPRCLRAIAAAALLTREASKLTFGQDIEITSSHNLESLLRSPPDKWLTNARITQYQVLLLDPPRVRFKQTAALNPATLLPETDDTLPIHHCLDTLDSLTSTRPDLTDQPLAQAEATLFTDGSSYIRDGKRYAGAAVVTLDSVIWAEPLPIGTSAQKAELIALTKALEWSKDKSVNIYTDSRYAFATLHVHGMIYRERGWLTAGGKAIKNAPEILALLTAVWLPKRVAVMHCKGHQKDDAPTSTGNRRADEVAREVAIRPLSTQATISAGKRTADGSEFEKRTADGSEFESPKKKAKVE

SEQ ID NO: 6371 - protein, 2172 aa, synthetic construct
MPAAKRVKLDGGDKKYSIGLDIGTNSVGWAVITDEYKVPSKKFKVLGNTDRHSIKKNLIGALLFDSGETAEATRLKRTARRRYTRRKNRICYLQEIFSNEMAKVDDSFFHRLEESFLVEEDKKHERHPIFGNIVDEVAYHEKYPTIYHLRKKLVDSTDKADLRLIYLALAHMIKFRGHFLIEGDLNPDNSDVDKLFIQLVQTYNQLFEENPINASGVDAKAILSARLSKSRRLENLIAQLPGEKKNGLFGNLIALSLGLTPNFKSNFDLAEDAKLQLSKDTYDDDLDNLLAQIGDQYADLFLAAKNLSDAILLSDILRVNTEITKAPLSASMIKRYDEHHQDLTLLKALVRQQLPEKYKEIFFDQSKNGYAGYIDGGASQEEFYKFIKPILEKMDGTEELLVKLNREDLLRKQRTFDNGSIPHQIHLGELHAILRRQEDFYPFLKDNREKIEKILTFRIPYYVGPLARGNSRFAWMTRKSEETITPWNFEEVVDKGASAQSFIERMTNFDKNLPNEKVLPKHSLLYEYFTVYNELTKVKYVTEGMRKPAFLSGEQKKAIVDLLFKTNRKVTVKQLKEDYFKKIECFDSVEISGVEDRFNASLGTYHDLLKIIKDKDFLDNEENEDILEDIVLTLTLFEDREMIEERLKTYAHLFDDKVMKQLKRRRYTGWGRLSRKLINGIRDKQSGKTILDFLKSDGFANRNFMQLIHDDSLTFKEDIQKAQVSGQGDSLHEHIANLAGSPAIKKGILQTVKVVDELVKVMGRHKPENIVIEMARENQTTQKGQKNSRERMKRIEEGIKELGSQILKEHPVENTQLQNEKLYLYYLQNGRDMYVDQELDINRLSDYDVDHIVPQSFLKDDSIDNKVLTRSDKARGKSDNVPSEEVVKKMKNYWRQLLNAKLITQRKFDNLTKAERGGLSELDKAGFIKRQLVETRQITKHVAQILDSRMNTKYDENDKLIREVKVITLKSKLVSDFRKDFQFYKVREINNYHHAHDAYLNAVVGTALIKKYPKLESEFVYGDYKVYDVRKMIAKSEQEIGKATAKYFFYSNIMNFFKTEITLANGEIRKRPLIETNGETGEIVWDKGRDFATVRKVLSMPQVNIVKKTEVQTGGFSKESILPKRNSDKLIARKKDWDPKKYGGFDSPTVAYSVLVVAKVEKGKSKKLKSVKELLGITIMERSSFEKNPIDFLEAKGYKEVKKDLIIKLPKYSLFELENGRKRMLASAGELQKGNELALPSKYVNFLYLASHYEKLKGSPEDNEQKQLFVEQHKHYLDEIIEQISEFSKRVILADANLDKVLSAYNKHRDKPIREQAENIIHLFTLTNLGAPAAFKYFDTTIDRKRYTSTKEVLDATLIHQSITGLYETRIDLSQLGGDGGEAAAKEAAAKGGMDLLKPLTVERKGVKIKGYWNSQADITCVPKDLLQGEEPVRQQNVTTIHGTQEGDVYYVNLKIDGRRINTEVIGTTLDYAIITPGDVPWILKKPLELTIKLDLEEQQGTLLNNSILSKKGKEELKQLFEKYSALWQSWENQVGHRRIRPHKIATGTVKPTPQKQYHINPKAKPDIQIVINDLLKQGVLIQKESTMNTPVYPVPKPNGRWRMVLDYRAVNKVTPLIAVQNQHSYGILGSLFKGRYKTTIDLSNGFWAHPIVPEDYWITAFTWQGKQYCWTVLPQGFLNSPGLFTGDVVDLLQGIPNVEVYVDDVYISHDSEKEHLEYLDILFNRLKEAGYIISLKKSNIANSIVDFLGFQITNEGRGLTDTFKEKLENITAPTTLKQLQSILGLLNFARNFIPDFTELIAPLYALIPKSTKNYVPWQIEHSTTLETLITKLNGAEYLQGRKGDKTLIMKVNASYTTGYIRYYNEGEKKPISYVSIVFSKTELKFTELEKLLTTVHKGLLKALDLSMGQNIHVYSPIVSMQNIQKTPQTAKKALASRWLSWLSYLEDPRIRFFYDPQMPALKDLPAVDTGKDNKKHPSNFQHIFYTDGSAITSPTKEGHLNAGMGIVYFINKDGNLQKQQEWSISLGNHTAQFAEIAAFEFALKKCLPLGGNILVVTDSNYVAKAYNEELDVWASNGFVNNRKKPLKHISKWKSVADLKRLRPDVVVTHEPGHQKLDSSPHAYGNNLADQLATQASFKVHAGKRTADGSEFEKRTADGSEFESPKKKAKVE

SEQ ID NO: 6372 - protein, 2086 aa, synthetic construct
MPAAKRVKLDGGDKKYSIGLDIGTNSVGWAVITDEYKVPSKKFKVLGNTDRHSIKKNLIGALLFDSGETAEATRLKRTARRRYTRRKNRICYLQEIFSNEMAKVDDSFFHRLEESFLVEEDKKHERHPIFGNIVDEVAYHEKYPTIYHLRKKLVDSTDKADLRLIYLALAHMIKFRGHFLIEGDLNPDNSDVDKLFIQLVQTYNQLFEENPINASGVDAKAILSARLSKSRRLENLIAQLPGEKKNGLFGNLIALSLGLTPNFKSNFDLAEDAKLQLSKDTYDDDLDNLLAQIGDQYADLFLAAKNLSDAILLSDILRVNTEITKAPLSASMIKRYDEHHQDLTLLKALVRQQLPEKYKEIFFDQSKNGYAGYIDGGASQEEFYKFIKPILEKMDGTEELLVKLNREDLLRKQRTFDNGSIPHQIHLGELHAILRRQEDFYPFLKDNREKIEKILTFRIPYYVGPLARGNSRFAWMTRKSEETITPWNFEEVVDKGASAQSFIERMTNFDKNLPNEKVLPKHSLLYEYFTVYNELTKVKYVTEGMRKPAFLSGEQKKAIVDLLFKTNRKVTVKQLKEDYFKKIECFDSVEISGVEDRFNASLGTYHDLLKIIKDKDFLDNEENEDILEDIVLTLTLFEDREMIEERLKTYAHLFDDKVMKQLKRRRYTGWGRLSRKLINGIRDKQSGKTILDFLKSDGFANRNFMQLIHDDSLTFKEDIQKAQVSGQGDSLHEHIANLAGSPAIKKGILQTVKVVDELVKVMGRHKPENIVIEMARENQTTQKGQKNSRERMKRIEEGIKELGSQILKEHPVENTQLQNEKLYLYYLQNGRDMYVDQELDINRLSDYDVDHIVPQSFLKDDSIDNKVLTRSDKARGKSDNVPSEEVVKKMKNYWRQLLNAKLITQRKFDNLTKAERGGLSELDKAGFIKRQLVETRQITKHVAQILDSRMNTKYDENDKLIREVKVITLKSKLVSDFRKDFQFYKVREINNYHHAHDAYLNAVVGTALIKKYPKLESEFVYGDYKVYDVRKMIAKSEQEIGKATAKYFFYSNIMNFFKTEITLANGEIRKRPLIETNGETGEIVWDKGRDFATVRKVLSMPQVNIVKKTEVQTGGFSKESILPKRNSDKLIARKKDWDPKKYGGFDSPTVAYSVLVVAKVEKGKSKKLKSVKELLGITIMERSSFEKNPIDFLEAKGYKEVKKDLIIKLPKYSLFELENGRKRMLASAGELQKGNELALPSKYVNFLYLASHYEKLKGSPEDNEQKQLFVEQHKHYLDEIIEQISEFSKRVILADANLDKVLSAYNKHRDKPIREQAENIIHLFTLTNLGAPAAFKYFDTTIDRKRYTSTKEVLDATLIHQSITGLYETRIDLSQLGGDGGEAAAKEAAAKGGVPWILKKPLELTIKLDLEEQQGTLLNNSILSKKGKEELKQLFEKYSALWQSWENQVGHRRIRPHKIATGTVKPTPQKQYHINPKAKPDIQIVINDLLKQGVLIQKESTMNTPVYPVPKPNGRWRMVLDYRAVNKVTPLIAVQNQHSYGILGSLFKGRYKTTIDLSNGFWAHPIVPEDYWITAFTWQGKQYCWTVLPQGFLNSPGLFTGDVVDLLQGIPNVEVYVDDVYISHDSEKEHLEYLDILFNRLKEAGYIISLKKSNIANSIVDFLGFQITNEGRGLTDTFKEKLENITAPTTLKQLQSILGLLNFARNFIPDFTELIAPLYALIPKSTKNYVPWQIEHSTTLETLITKLNGAEYLQGRKGDKTLIMKVNASYTTGYIRYYNEGEKKPISYVSIVFSKTELKFTELEKLLTTVHKGLLKALDLSMGQNIHVYSPIVSMQNIQKTPQTAKKALASRWLSWLSYLEDPRIRFFYDPQMPALKDLPAVDTGKDNKKHPSNFQHIFYTDGSAITSPTKEGHLNAGMGIVYFINKDGNLQKQQEWSISLGNHTAQFAEIAAFEFALKKCLPLGGNILVVTDSNYVAKAYNEELDVWASNGFVNNRKKPLKHISKWKSVADLKRLRPDVVVTHEPGHQKLDSSPHAYGNNLADQLATQASFKVHAGKRTADGSEFEKRTADGSEFESPKKKAKVE

SEQ ID NO: 6373 - protein, 2172 aa, synthetic construct
MPAAKRVKLDGGDKKYSIGLDIGTNSVGWAVITDEYKVPSKKFKVLGNTDRHSIKKNLIGALLFDSGETAEATRLKRTARRRYTRRKNRICYLQEIFSNEMAKVDDSFFHRLEESFLVEEDKKHERHPIFGNIVDEVAYHEKYPTIYHLRKKLVDSTDKADLRLIYLALAHMIKFRGHFLIEGDLNPDNSDVDKLFIQLVQTYNQLFEENPINASGVDAKAILSARLSKSRRLENLIAQLPGEKKNGLFGNLIALSLGLTPNFKSNFDLAEDAKLQLSKDTYDDDLDNLLAQIGDQYADLFLAAKNLSDAILLSDILRVNTEITKAPLSASMIKRYDEHHQDLTLLKALVRQQLPEKYKEIFFDQSKNGYAGYIDGGASQEEFYKFIKPILEKMDGTEELLVKLNREDLLRKQRTFDNGSIPHQIHLGELHAILRRQEDFYPFLKDNREKIEKILTFRIPYYVGPLARGNSRFAWMTRKSEETITPWNFEEVVDKGASAQSFIERMTNFDKNLPNEKVLPKHSLLYEYFTVYNELTKVKYVTEGMRKPAFLSGEQKKAIVDLLFKTNRKVTVKQLKEDYFKKIECFDSVEISGVEDRFNASLGTYHDLLKIIKDKDFLDNEENEDILEDIVLTLTLFEDREMIEERLKTYAHLFDDKVMKQLKRRRYTGWGRLSRKLINGIRDKQSGKTILDFLKSDGFANRNFMQLIHDDSLTFKEDIQKAQVSGQGDSLHEHIANLAGSPAIKKGILQTVKVVDELVKVMGRHKPENIVIEMARENQTTQKGQKNSRERMKRIEEGIKELGSQILKEHPVENTQLQNEKLYLYYLQNGRDMYVDQELDINRLSDYDVDHIVPQSFLKDDSIDNKVLTRSDKARGKSDNVPSEEVVKKMKNYWRQLLNAKLITQRKFDNLTKAERGGLSELDKAGFIKRQLVETRQITKHVAQILDSRMNTKYDENDKLIREVKVITLKSKLVSDFRKDFQFYKVREINNYHHAHDAYLNAVVGTALIKKYPKLESEFVYGDYKVYDVRKMIAKSEQEIGKATAKYFFYSNIMNFFKTEITLANGEIRKRPLIETNGETGEIVWDKGRDFATVRKVLSMPQVNIVKKTEVQTGGFSKESILPKRNSDKLIARKKDWDPKKYGGFDSPTVAYSVLVVAKVEKGKSKKLKSVKELLGITIMERSSFEKNPIDFLEAKGYKEVKKDLIIKLPKYSLFELENGRKRMLASAGELQKGNELALPSKYVNFLYLASHYEKLKGSPEDNEQKQLFVEQHKHYLDEIIEQISEFSKRVILADANLDKVLSAYNKHRDKPIREQAENIIHLFTLTNLGAPAAFKYFDTTIDRKRYTSTKEVLDATLIHQSITGLYETRIDLSQLGGDGGEAAAKEAAAKGGMDLLKPLTVERKGVKIKGYWNSQADITCVPKDLLQGEEPVRQQNVTTIHGTQEGDVYYVNLKIDGRRINTEVIGTTLDYAIITPGDVPWILKKPLELTIKLDLEEQQGTLLNNSILSKKGKEELKQLFEKYSALWQSWENQVGHRRIRPHKIATGTVKPTPQKQYHINPKAKPDIQIVINDLLKQGVLIQKESTMNTPVYPVPKPNGRWRMVLDYRAVNKVTPLIAVQNQHSYGILGSLFKGRYKTTIDLSNGFWAHPIVPEDYWITAFTWQGKQYCWTVLPQGFLNSPGLFNGDVVDLLQGIPNVEVYVDDVYISHDSEKEHLEYLDILFNRLKEAGYIISLKKSNIANSIVDFLGFQITNEGRGLTDTFKEKLENITAPTTLKQLQSILGLLNFARNFIPDFTELIAPLYALIPKSPKNYVPWQIEHSTTLETLITKLNGAEYLQGRKGDKTLIMKVNASYTTGYIRYYNEGEKKPISYVSIVFSKTELKFTELEKLLTTVHKGLLKALDLSMGQNIHVYSPIVSMQNIQKTPQTAKKALASRWLSWLSYLEDPRIRFFYDPQMPALKDLPAVDTGKDNKKHPSNFQHIFYTDGSAITSPTKEGHLNAGMGIVYFINKDGNLQKQQEWSISLGNHTAQFAEIAAFEFALKKCLPLGGNILVVTDSNYVAKAYNEELDVWASNGFVNNRKKPLKHISKWKSVADLKRLRPDVVVTHEPGHQKLDSSPHAYGNNLADQLATQASFKVHAGKRTADGSEFEKRTADGSEFESPKKKAKVE

SEQ ID NO: 6374 - protein, 2093 aa, synthetic construct
MPAAKRVKLDGGDKKYSIGLDIGTNSVGWAVITDEYKVPSKKFKVLGNTDRHSIKKNLIGALLFDSGETAEATRLKRTARRRYTRRKNRICYLQEIFSNEMAKVDDSFFHRLEESFLVEEDKKHERHPIFGNIVDEVAYHEKYPTIYHLRKKLVDSTDKADLRLIYLALAHMIKFRGHFLIEGDLNPDNSDVDKLFIQLVQTYNQLFEENPINASGVDAKAILSARLSKSRRLENLIAQLPGEKKNGLFGNLIALSLGLTPNFKSNFDLAEDAKLQLSKDTYDDDLDNLLAQIGDQYADLFLAAKNLSDAILLSDILRVNTEITKAPLSASMIKRYDEHHQDLTLLKALVRQQLPEKYKEIFFDQSKNGYAGYIDGGASQEEFYKFIKPILEKMDGTEELLVKLNREDLLRKQRTFDNGSIPHQIHLGELHAILRRQEDFYPFLKDNREKIEKILTFRIPYYVGPLARGNSRFAWMTRKSEETITPWNFEEVVDKGASAQSFIERMTNFDKNLPNEKVLPKHSLLYEYFTVYNELTKVKYVTEGMRKPAFLSGEQKKAIVDLLFKTNRKVTVKQLKEDYFKKIECFDSVEISGVEDRFNASLGTYHDLLKIIKDKDFLDNEENEDILEDIVLTLTLFEDREMIEERLKTYAHLFDDKVMKQLKRRRYTGWGRLSRKLINGIRDKQSGKTILDFLKSDGFANRNFMQLIHDDSLTFKEDIQKAQVSGQGDSLHEHIANLAGSPAIKKGILQTVKVVDELVKVMGRHKPENIVIEMARENQTTQKGQKNSRERMKRIEEGIKELGSQILKEHPVENTQLQNEKLYLYYLQNGRDMYVDQELDINRLSDYDVDHIVPQSFLKDDSIDNKVLTRSDKARGKSDNVPSEEVVKKMKNYWRQLLNAKLITQRKFDNLTKAERGGLSELDKAGFIKRQLVETRQITKHVAQILDSRMNTKYDENDKLIREVKVITLKSKLVSDFRKDFQFYKVREINNYHHAHDAYLNAVVGTALIKKYPKLESEFVYGDYKVYDVRKMIAKSEQEIGKATAKYFFYSNIMNFFKTEITLANGEIRKRPLIETNGETGEIVWDKGRDFATVRKVLSMPQVNIVKKTEVQTGGFSKESILPKRNSDKLIARKKDWDPKKYGGFDSPTVAYSVLVVAKVEKGKSKKLKSVKELLGITIMERSSFEKNPIDFLEAKGYKEVKKDLIIKLPKYSLFELENGRKRMLASAGELQKGNELALPSKYVNFLYLASHYEKLKGSPEDNEQKQLFVEQHKHYLDEIIEQISEFSKRVILADANLDKVLSAYNKHRDKPIREQAENIIHLFTLTNLGAPAAFKYFDTTIDRKRYTSTKEVLDATLIHQSITGLYETRIDLSQLGGDGGEAAAKEAAAKGGVLNLEEEYRLHEKPVPSSIDPSWLQLFPTVWAERAGMGLANQVPPVVVELRSGASPVAVRQYPMSKEAREGIRPHIQKFLDLGVLVPCRSPWNTPLLPVKKPGTNDYRPVQDLREINKRVQDIHPTVPNPYNLLSSLPPSYTWYSVLDLKDAFFCLRLHPNSQPLFAFEWKDPEKGNTGQLTWTRLPQGFKNSPTLFNEALHRDLAPFRALNPQVVLLQYVDDLLVAAPTYEDCKKGTQKLLQELSKLGYRVSAKKAQLCQREVTYLGYLLKEGKRWLTPARKATVMKIPVPTTPRQVREFLGKAGFCRLFIPGFASLAAPLYPLTKPSIPFIWTEEHQQAFDHIKKALLSAPALALPDLTKPFTLYIDERAGVARGVLTQTLGPWRRPVAYLSKKLDPVASGWPTCLKAVAAVALLLKDADKLTLGQNVTVIASHSLESIVRQPPDRWMTNARMTHYQSLLLNERVSFAPPAVLNPATLLPVESEATPVHRCSEILAEETGTRRDLEDQPLPGVPTWYTDGSSFITEGKRRAGAPIVDGKRTVWASSLPEGTSAQKAELVALTQALRLAEGKNINIYTDSRYAFATAHIHGAIYKQRGWLTSAGKDIKNKEEILALLEAIHLPRRVAIIHCPGHQRGSNPVATGNRRADEAAKQAALSTRVLAGTTKPAGKRTADGSEFEKRTADGSEFESPKKKAKVE

SEQ ID NO: 6375 - protein, 2126 aa, synthetic construct
MPAAKRVKLDGGDKKYSIGLDIGTNSVGWAVITDEYKVPSKKFKVLGNTDRHSIKKNLIGALLFDSGETAEATRLKRTARRRYTRRKNRICYLQEIFSNEMAKVDDSFFHRLEESFLVEEDKKHERHPIFGNIVDEVAYHEKYPTIYHLRKKLVDSTDKADLRLIYLALAHMIKFRGHFLIEGDLNPDNSDVDKLFIQLVQTYNQLFEENPINASGVDAKAILSARLSKSRRLENLIAQLPGEKKNGLFGNLIALSLGLTPNFKSNFDLAEDAKLQLSKDTYDDDLDNLLAQIGDQYADLFLAAKNLSDAILLSDILRVNTEITKAPLSASMIKRYDEHHQDLTLLKALVRQQLPEKYKEIFFDQSKNGYAGYIDGGASQEEFYKFIKPILEKMDGTEELLVKLNREDLLRKQRTFDNGSIPHQIHLGELHAILRRQEDFYPFLKDNREKIEKILTFRIPYYVGPLARGNSRFAWMTRKSEETITPWNFEEVVDKGASAQSFIERMTNFDKNLPNEKVLPKHSLLYEYFTVYNELTKVKYVTEGMRKPAFLSGEQKKAIVDLLFKTNRKVTVKQLKEDYFKKIECFDSVEISGVEDRFNASLGTYHDLLKIIKDKDFLDNEENEDILEDIVLTLTLFEDREMIEERLKTYAHLFDDKVMKQLKRRRYTGWGRLSRKLINGIRDKQSGKTILDFLKSDGFANRNFMQLIHDDSLTFKEDIQKAQVSGQGDSLHEHIANLAGSPAIKKGILQTVKVVDELVKVMGRHKPENIVIEMARENQTTQKGQKNSRERMKRIEEGIKELGSQILKEHPVENTQLQNEKLYLYYLQNGRDMYVDQELDINRLSDYDVDHIVPQSFLKDDSIDNKVLTRSDKARGKSDNVPSEEVVKKMKNYWRQLLNAKLITQRKFDNLTKAERGGLSELDKAGFIKRQLVETRQITKHVAQILDSRMNTKYDENDKLIREVKVITLKSKLVSDFRKDFQFYKVREINNYHHAHDAYLNAVVGTALIKKYPKLESEFVYGDYKVYDVRKMIAKSEQEIGKATAKYFFYSNIMNFFKTEITLANGEIRKRPLIETNGETGEIVWDKGRDFATVRKVLSMPQVNIVKKTEVQTGGFSKESILPKRNSDKLIARKKDWDPKKYGGFDSPTVAYSVLVVAKVEKGKSKKLKSVKELLGITIMERSSFEKNPIDFLEAKGYKEVKKDLIIKLPKYSLFELENGRKRMLASAGELQKGNELALPSKYVNFLYLASHYEKLKGSPEDNEQKQLFVEQHKHYLDEIIEQISEFSKRVILADANLDKVLSAYNKHRDKPIREQAENIIHLFTLTNLGAPAAFKYFDTTIDRKRYTSTKEVLDATLIHQSITGLYETRIDLSQLGGDGGEAAAKEAAAKGGLLGRDLLTKLKAQIQFSTEGPQVTWEDRPAMCLVLNLEEEYRLHEKPVPPSIDPSWLQLFPMVWAEKAGMGLANQVPPVVVELKSDASPVAVRQYPMSKEAREGIRPHIQRFLDLGILVPCQSPWNTPLLPVKKPGTNDYRPVQDLREVNKRVQDIHPTVPNPYNLLSSLPPSHTWYSVLDLKDAFFCLKLHPNSQPLFAFEWRDPEKGNTGQLTWTRLPQGFKNSPTLFNEALHRDLASFRALNPQVVMLQYVDDLLVAAPTYRDCKEGTRRLLQELSKLGYRVSAKKAQLCREEVTYLGYLLKGGKRWLTPARKATVMKIPTPTTPRQVREFLGTAGFCRLWIPGFASLAAPLYPLTRPKVPFTWTEAHQEAFGRIKEALLSAPALALPDLTKPFALYVDEKEGVARGVLTQTLGPWRRPVAYLSKKLDPVASGWPTCLKAIAAVALLLKDADKLTLGQNVLVIAPHNLESIVRQPPDRWMTNARMTHYQSLLLNERVSFAPPAILNPATLLPVESDDTPIHICSEILAEETGTRPDLRDQPLPGVPAWYTDGSSFIMDGRRQAGAAIVDNKRTVWASNLPEGTSAQKAELIALTQALRLAEGKSINIYTDSRYAFATAHVHGAIYKQRGWLTSAGKDIKNKEEILALLEAIHLPKRVAIIHCPGHQRGTDPVATGNRKADEAAKQAAQSTRILTETTKNAGKRTADGSEFEKRTADGSEFESPKKKAKVE

SEQ ID NO: 6376 - protein, 2126 aa, synthetic construct
MPAAKRVKLDGGDKKYSIGLDIGTNSVGWAVITDEYKVPSKKFKVLGNTDRHSIKKNLIGALLFDSGETAEATRLKRTARRRYTRRKNRICYLQEIFSNEMAKVDDSFFHRLEESFLVEEDKKHERHPIFGNIVDEVAYHEKYPTIYHLRKKLVDSTDKADLRLIYLALAHMIKFRGHFLIEGDLNPDNSDVDKLFIQLVQTYNQLFEENPINASGVDAKAILSARLSKSRRLENLIAQLPGEKKNGLFGNLIALSLGLTPNFKSNFDLAEDAKLQLSKDTYDDDLDNLLAQIGDQYADLFLAAKNLSDAILLSDILRVNTEITKAPLSASMIKRYDEHHQDLTLLKALVRQQLPEKYKEIFFDQSKNGYAGYIDGGASQEEFYKFIKPILEKMDGTEELLVKLNREDLLRKQRTFDNGSIPHQIHLGELHAILRRQEDFYPFLKDNREKIEKILTFRIPYYVGPLARGNSRFAWMTRKSEETITPWNFEEVVDKGASAQSFIERMTNFDKNLPNEKVLPKHSLLYEYFTVYNELTKVKYVTEGMRKPAFLSGEQKKAIVDLLFKTNRKVTVKQLKEDYFKKIECFDSVEISGVEDRFNASLGTYHDLLKIIKDKDFLDNEENEDILEDIVLTLTLFEDREMIEERLKTYAHLFDDKVMKQLKRRRYTGWGRLSRKLINGIRDKQSGKTILDFLKSDGFANRNFMQLIHDDSLTFKEDIQKAQVSGQGDSLHEHIANLAGSPAIKKGILQTVKVVDELVKVMGRHKPENIVIEMARENQTTQKGQKNSRERMKRIEEGIKELGSQILKEHPVENTQLQNEKLYLYYLQNGRDMYVDQELDINRLSDYDVDHIVPQSFLKDDSIDNKVLTRSDKARGKSDNVPSEEVVKKMKNYWRQLLNAKLITQRKFDNLTKAERGGLSELDKAGFIKRQLVETRQITKHVAQILDSRMNTKYDENDKLIREVKVITLKSKLVSDFRKDFQFYKVREINNYHHAHDAYLNAVVGTALIKKYPKLESEFVYGDYKVYDVRKMIAKSEQEIGKATAKYFFYSNIMNFFKTEITLANGEIRKRPLIETNGETGEIVWDKGRDFATVRKVLSMPQVNIVKKTEVQTGGFSKESILPKRNSDKLIARKKDWDPKKYGGFDSPTVAYSVLVVAKVEKGKSKKLKSVKELLGITIMERSSFEKNPIDFLEAKGYKEVKKDLIIKLPKYSLFELENGRKRMLASAGELQKGNELALPSKYVNFLYLASHYEKLKGSPEDNEQKQLFVEQHKHYLDEIIEQISEFSKRVILADANLDKVLSAYNKHRDKPIREQAENIIHLFTLTNLGAPAAFKYFDTTIDRKRYTSTKEVLDATLIHQSITGLYETRIDLSQLGGDGGEAAAKEAAAKGGLLGRDLLTKLKAQIQFSTEGPQVTWEDRPAMCLVLNLEEEYRLHEKPVPPSIDPSWLQLFPMVWAEKAGMGLANQVPPVVVELKSDASPVAVRQYPMSKEAREGIRPHIQRFLDLGILVPCQSPWNTPLLPVKKPGTNDYRPVQDLREVNKRVQDIHPTVPNPYNLLSSLPPSHTWYSVLDLKDAFFCLKLHPNSQPLFAFEWRDPEKGNTGQLTWTRLPQGFKNSPTLFNEALHRDLASFRALNPQVVMLQYVDDLLVAAPTYRDCKEGTRRLLQELSKLGYRVSAKKAQLCREEVTYLGYLLKGGKRWLTPARKATVMKIPTPTTPRQVREFLGKAGFCRLFIPGFASLAAPLYPLTRPKVPFTWTEAHQEAFGRIKEALLSAPALALPDLTKPFALYVDEKEGVARGVLTQTLGPWRRPVAYLSKKLDPVASGWPTCLKAIAAVALLLKDADKLTLGQNVLVIAPHNLESIVRQPPDRWMTNARMTHYQSLLLNERVSFAPPAILNPATLLPVESDDTPIHICSEILAEETGTRPDLRDQPLPGVPAWYTDGSSFIMDGRRQAGAAIVDNKRTVWASNLPEGTSAQKAELIALTQALRLAEGKSINIYTDSRYAFATAHVHGAIYKQRGWLTSAGKDIKNKEEILALLEAIHLPKRVAIIHCPGHQRGTDPVATGNRKADEAAKQAAQSTRILTETTKNAGKRTADGSEFEKRTADGSEFESPKKKAKVE

SEQ ID NO: 6377 - protein, 2095 aa, synthetic construct
MPAAKRVKLDGGDKKYSIGLDIGTNSVGWAVITDEYKVPSKKFKVLGNTDRHSIKKNLIGALLFDSGETAEATRLKRTARRRYTRRKNRICYLQEIFSNEMAKVDDSFFHRLEESFLVEEDKKHERHPIFGNIVDEVAYHEKYPTIYHLRKKLVDSTDKADLRLIYLALAHMIKFRGHFLIEGDLNPDNSDVDKLFIQLVQTYNQLFEENPINASGVDAKAILSARLSKSRRLENLIAQLPGEKKNGLFGNLIALSLGLTPNFKSNFDLAEDAKLQLSKDTYDDDLDNLLAQIGDQYADLFLAAKNLSDAILLSDILRVNTEITKAPLSASMIKRYDEHHQDLTLLKALVRQQLPEKYKEIFFDQSKNGYAGYIDGGASQEEFYKFIKPILEKMDGTEELLVKLNREDLLRKQRTFDNGSIPHQIHLGELHAILRRQEDFYPFLKDNREKIEKILTFRIPYYVGPLARGNSRFAWMTRKSEETITPWNFEEVVDKGASAQSFIERMTNFDKNLPNEKVLPKHSLLYEYFTVYNELTKVKYVTEGMRKPAFLSGEQKKAIVDLLFKTNRKVTVKQLKEDYFKKIECFDSVEISGVEDRFNASLGTYHDLLKIIKDKDFLDNEENEDILEDIVLTLTLFEDREMIEERLKTYAHLFDDKVMKQLKRRRYTGWGRLSRKLINGIRDKQSGKTILDFLKSDGFANRNFMQLIHDDSLTFKEDIQKAQVSGQGDSLHEHIANLAGSPAIKKGILQTVKVVDELVKVMGRHKPENIVIEMARENQTTQKGQKNSRERMKRIEEGIKELGSQILKEHPVENTQLQNEKLYLYYLQNGRDMYVDQELDINRLSDYDVDHIVPQSFLKDDSIDNKVLTRSDKARGKSDNVPSEEVVKKMKNYWRQLLNAKLITQRKFDNLTKAERGGLSELDKAGFIKRQLVETRQITKHVAQILDSRMNTKYDENDKLIREVKVITLKSKLVSDFRKDFQFYKVREINNYHHAHDAYLNAVVGTALIKKYPKLESEFVYGDYKVYDVRKMIAKSEQEIGKATAKYFFYSNIMNFFKTEITLANGEIRKRPLIETNGETGEIVWDKGRDFATVRKVLSMPQVNIVKKTEVQTGGFSKESILPKRNSDKLIARKKDWDPKKYGGFDSPTVAYSVLVVAKVEKGKSKKLKSVKELLGITIMERSSFEKNPIDFLEAKGYKEVKKDLIIKLPKYSLFELENGRKRMLASAGELQKGNELALPSKYVNFLYLASHYEKLKGSPEDNEQKQLFVEQHKHYLDEIIEQISEFSKRVILADANLDKVLSAYNKHRDKPIREQAENIIHLFTLTNLGAPAAFKYFDTTIDRKRYTSTKEVLDATLIHQSITGLYETRIDLSQLGGDGGEAAAKEAAAKGGTLNLEDEYRLYETSAEPEVSPGSTWLSDFPQAWAETGGMGLAVRQAPLIIPLKATSTPVSIKQYPMSQEAKLGIKPHIQRLLDQGILVPCQSPWNTPLLPVKKPGTNDYRPVQDLREVNKRVEDIHPTVPNPYNLLSGLPPSHRWYTVLDLKDAFFCLRLHPTSQPLFAFEWRDPGMGISGQLTWTRLPQGFKNSPTLFNEALHRDLADFRIQHPDLILLQYVDDILLAATSELDCQQGTRALLLTLGNLGYRASAKKAQLCQKQVKYLGYLLKEGQRWLTEARKETVMGQPTPKTPRQLREFLGKAGFCRLFIPGFAEMAAPLYPLTKPGTLFNWGPDQQKAYQEIKQALLTAPALGLPDLTKPFELFVDEKQGYAKGVLTQKLGPWRRPVAYLSKKLDPVAAGWPPCLRMVAAIAVLRKDAGKLTMGQPLVILAPHAVEALVKQPPDRWLSNARMTHYQAMLLDTDRVQFGPVVALNPATLLPLPEEGAPHDCLEILAETHGTRPDLTDQPIPDADHTWYTDGSSFLQEGQRKAGAAVTTETEVIWARALPAGTSAQRAELIALTQALKMAEGKRLNVYTDSRYAFATAHIHGEIYRRRGWLTSEGREIKNKSEILALLKALFLPKRLSIIHCLGHQKGDSAEARGNRLADQAAREAAIKTPPDTSTLLAGKRTADGSEFEKRTADGSEFESPKKKAKVE

SEQ ID NO: 6378 - protein, 2095 aa, synthetic construct
MPAAKRVKLDGGDKKYSIGLDIGTNSVGWAVITDEYKVPSKKFKVLGNTDRHSIKKNLIGALLFDSGETAEATRLKRTARRRYTRRKNRICYLQEIFSNEMAKVDDSFFHRLEESFLVEEDKKHERHPIFGNIVDEVAYHEKYPTIYHLRKKLVDSTDKADLRLIYLALAHMIKFRGHFLIEGDLNPDNSDVDKLFIQLVQTYNQLFEENPINASGVDAKAILSARLSKSRRLENLIAQLPGEKKNGLFGNLIALSLGLTPNFKSNFDLAEDAKLQLSKDTYDDDLDNLLAQIGDQYADLFLAAKNLSDAILLSDILRVNTEITKAPLSASMIKRYDEHHQDLTLLKALVRQQLPEKYKEIFFDQSKNGYAGYIDGGASQEEFYKFIKPILEKMDGTEELLVKLNREDLLRKQRTFDNGSIPHQIHLGELHAILRRQEDFYPFLKDNREKIEKILTFRIPYYVGPLARGNSRFAWMTRKSEETITPWNFEEVVDKGASAQSFIERMTNFDKNLPNEKVLPKHSLLYEYFTVYNELTKVKYVTEGMRKPAFLSGEQKKAIVDLLFKTNRKVTVKQLKEDYFKKIECFDSVEISGVEDRFNASLGTYHDLLKIIKDKDFLDNEENEDILEDIVLTLTLFEDREMIEERLKTYAHLFDDKVMKQLKRRRYTGWGRLSRKLINGIRDKQSGKTILDFLKSDGFANRNFMQLIHDDSLTFKEDIQKAQVSGQGDSLHEHIANLAGSPAIKKGILQTVKVVDELVKVMGRHKPENIVIEMARENQTTQKGQKNSRERMKRIEEGIKELGSQILKEHPVENTQLQNEKLYLYYLQNGRDMYVDQELDINRLSDYDVDHIVPQSFLKDDSIDNKVLTRSDKARGKSDNVPSEEVVKKMKNYWRQLLNAKLITQRKFDNLTKAERGGLSELDKAGFIKRQLVETRQITKHVAQILDSRMNTKYDENDKLIREVKVITLKSKLVSDFRKDFQFYKVREINNYHHAHDAYLNAVVGTALIKKYPKLESEFVYGDYKVYDVRKMIAKSEQEIGKATAKYFFYSNIMNFFKTEITLANGEIRKRPLIETNGETGEIVWDKGRDFATVRKVLSMPQVNIVKKTEVQTGGFSKESILPKRNSDKLIARKKDWDPKKYGGFDSPTVAYSVLVVAKVEKGKSKKLKSVKELLGITIMERSSFEKNPIDFLEAKGYKEVKKDLIIKLPKYSLFELENGRKRMLASAGELQKGNELALPSKYVNFLYLASHYEKLKGSPEDNEQKQLFVEQHKHYLDEIIEQISEFSKRVILADANLDKVLSAYNKHRDKPIREQAENIIHLFTLTNLGAPAAFKYFDTTIDRKRYTSTKEVLDATLIHQSITGLYETRIDLSQLGGDGGEAAAKEAAAKGGTLGIEDEYRLHETSTEPDVSLGSTWLSDFPQAWAETGGMGLAVRQAPLIIPLKATSTPVSIQQYPMSHEARLGIKPHIQRLLDQGILVPCQSPWNTPLLPVKKPGTNDYRPVQDLREVNKRVEDIHPTVPNPYNLLSGLPPSHQWYTVLDLKDAFFCLRLHPTSQPLFAFEWRDPGMGISGQLTWTRLPQGFKNSPTLFNEALHRDLADFRIQHPDLILLQYVDDILLAATSELDCQQGTRALLQTLGDLGYRASAKKAQICQKQVKYLGYLLREGQRWLTEARKETVMGQPVPKTPRQLREFLGTAGFCRLWIPGFAEMAAPLYPLTKPGTLFSWGPDQQKAYQEIKQALLTAPALGLPDLTKPFELFVDEKQGYAKGVLTQKLGPWRRPVAYLSKKLDPVAAGWPPCLRMVAAIAVLTKDAGKLTMGQPLVILAPHAVEALVKQPPDRWLSNARMTHYQAMLLDTDRVQFGPVVALNPATLLPLPEEGAPHDCLEILAETHGTRPDLTDQPIPDADHTWYTDGSSFLQEGQRKAGAAVTTETEVIWAGALPAGTSAQRAELIALTQALKMAEGKRLNVYTDSRYAFATAHIHGEIYRRRGWLTSEGREIKNKSEILALLKALFLPKRLSIIHCLGHQKGDSAEARGNRLADQAAREAAIKTPPDTSTLLAGKRTADGSEFEKRTADGSEFESPKKKAKVE

SEQ ID NO: 6379 - protein, 2087 aa, synthetic construct
MPAAKRVKLDGGDKKYSIGLDIGTNSVGWAVITDEYKVPSKKFKVLGNTDRHSIKKNLIGALLFDSGETAEATRLKRTARRRYTRRKNRICYLQEIFSNEMAKVDDSFFHRLEESFLVEEDKKHERHPIFGNIVDEVAYHEKYPTIYHLRKKLVDSTDKADLRLIYLALAHMIKFRGHFLIEGDLNPDNSDVDKLFIQLVQTYNQLFEENPINASGVDAKAILSARLSKSRRLENLIAQLPGEKKNGLFGNLIALSLGLTPNFKSNFDLAEDAKLQLSKDTYDDDLDNLLAQIGDQYADLFLAAKNLSDAILLSDILRVNTEITKAPLSASMIKRYDEHHQDLTLLKALVRQQLPEKYKEIFFDQSKNGYAGYIDGGASQEEFYKFIKPILEKMDGTEELLVKLNREDLLRKQRTFDNGSIPHQIHLGELHAILRRQEDFYPFLKDNREKIEKILTFRIPYYVGPLARGNSRFAWMTRKSEETITPWNFEEVVDKGASAQSFIERMTNFDKNLPNEKVLPKHSLLYEYFTVYNELTKVKYVTEGMRKPAFLSGEQKKAIVDLLFKTNRKVTVKQLKEDYFKKIECFDSVEISGVEDRFNASLGTYHDLLKIIKDKDFLDNEENEDILEDIVLTLTLFEDREMIEERLKTYAHLFDDKVMKQLKRRRYTGWGRLSRKLINGIRDKQSGKTILDFLKSDGFANRNFMQLIHDDSLTFKEDIQKAQVSGQGDSLHEHIANLAGSPAIKKGILQTVKVVDELVKVMGRHKPENIVIEMARENQTTQKGQKNSRERMKRIEEGIKELGSQILKEHPVENTQLQNEKLYLYYLQNGRDMYVDQELDINRLSDYDVDHIVPQSFLKDDSIDNKVLTRSDKARGKSDNVPSEEVVKKMKNYWRQLLNAKLITQRKFDNLTKAERGGLSELDKAGFIKRQLVETRQITKHVAQILDSRMNTKYDENDKLIREVKVITLKSKLVSDFRKDFQFYKVREINNYHHAHDAYLNAVVGTALIKKYPKLESEFVYGDYKVYDVRKMIAKSEQEIGKATAKYFFYSNIMNFFKTEITLANGEIRKRPLIETNGETGEIVWDKGRDFATVRKVLSMPQVNIVKKTEVQTGGFSKESILPKRNSDKLIARKKDWDPKKYGGFDSPTVAYSVLVVAKVEKGKSKKLKSVKELLGITIMERSSFEKNPIDFLEAKGYKEVKKDLIIKLPKYSLFELENGRKRMLASAGELQKGNELALPSKYVNFLYLASHYEKLKGSPEDNEQKQLFVEQHKHYLDEIIEQISEFSKRVILADANLDKVLSAYNKHRDKPIREQAENIIHLFTLTNLGAPAAFKYFDTTIDRKRYTSTKEVLDATLIHQSITGLYETRIDLSQLGGDGGEAAAKEAAAKGGLDDEYRLYSPLVKPDQNIQFWLEQFPQAWAETAGMGLAKQVPPQVIQLKASATPVSVRQYPLSKEAQEGIRPHVQRLIQQGILVPVQSPWNTPLLPVRKPGTNDYRPVQDLREVNKRVQDIHPTVPNPYNLLCALPPQRSWYTVLDLKDAFFCLRLHPTSQPLFAFEWRDPGTGRTGQLTWTRLPQGFKNSPTIFNEALHRDLANFRIQHPQVTLLQYVDDLLLAGATKQDCLEGTKALLLELSDLGYRASAKKAQICRREVTYLGYSLRDGQRWLTEARKKTVVQIPAPTTAKQVREFLGKAGFCRLFIPGFATLAAPLYPLTKPKGEFSWAPEHQKAFDAIKKALLSAPALALPDVTKPFTLYVDERKGVARGVLTQTLGPWRRPVAYLSKKLDPVASGWPVCLKAIAAVAILVKDADKLTLGQNITVIAPHALENIVRQPPDRWMTNARMTHYQSLLLTERVTFAPPAALNPATLLPEETDEPVTHDCHQLLIEETGVRKDLTDIPLTGEVLTWFTDGSSYVVEGKRMAGAAVVDGTRTIWASSLPEGTSAQKAELMALTQALRLAEGKSINIYTDSRYAFATAHVHGAIYKQRGWLTSAGREIKNKEEILSLLEALHLPKRLAIIHCPGHQKAKDPISRGNQMADRVAKQAAQGVNLLPAGKRTADGSEFEKRTADGSEFESPKKKAKVE

SEQ ID NO: 6380 - protein, 2089 aa, synthetic construct
MPAAKRVKLDGGDKKYSIGLDIGTNSVGWAVITDEYKVPSKKFKVLGNTDRHSIKKNLIGALLFDSGETAEATRLKRTARRRYTRRKNRICYLQEIFSNEMAKVDDSFFHRLEESFLVEEDKKHERHPIFGNIVDEVAYHEKYPTIYHLRKKLVDSTDKADLRLIYLALAHMIKFRGHFLIEGDLNPDNSDVDKLFIQLVQTYNQLFEENPINASGVDAKAILSARLSKSRRLENLIAQLPGEKKNGLFGNLIALSLGLTPNFKSNFDLAEDAKLQLSKDTYDDDLDNLLAQIGDQYADLFLAAKNLSDAILLSDILRVNTEITKAPLSASMIKRYDEHHQDLTLLKALVRQQLPEKYKEIFFDQSKNGYAGYIDGGASQEEFYKFIKPILEKMDGTEELLVKLNREDLLRKQRTFDNGSIPHQIHLGELHAILRRQEDFYPFLKDNREKIEKILTFRIPYYVGPLARGNSRFAWMTRKSEETITPWNFEEVVDKGASAQSFIERMTNFDKNLPNEKVLPKHSLLYEYFTVYNELTKVKYVTEGMRKPAFLSGEQKKAIVDLLFKTNRKVTVKQLKEDYFKKIECFDSVEISGVEDRFNASLGTYHDLLKIIKDKDFLDNEENEDILEDIVLTLTLFEDREMIEERLKTYAHLFDDKVMKQLKRRRYTGWGRLSRKLINGIRDKQSGKTILDFLKSDGFANRNFMQLIHDDSLTFKEDIQKAQVSGQGDSLHEHIANLAGSPAIKKGILQTVKVVDELVKVMGRHKPENIVIEMARENQTTQKGQKNSRERMKRIEEGIKELGSQILKEHPVENTQLQNEKLYLYYLQNGRDMYVDQELDINRLSDYDVDHIVPQSFLKDDSIDNKVLTRSDKARGKSDNVPSEEVVKKMKNYWRQLLNAKLITQRKFDNLTKAERGGLSELDKAGFIKRQLVETRQITKHVAQILDSRMNTKYDENDKLIREVKVITLKSKLVSDFRKDFQFYKVREINNYHHAHDAYLNAVVGTALIKKYPKLESEFVYGDYKVYDVRKMIAKSEQEIGKATAKYFFYSNIMNFFKTEITLANGEIRKRPLIETNGETGEIVWDKGRDFATVRKVLSMPQVNIVKKTEVQTGGFSKESILPKRNSDKLIARKKDWDPKKYGGFDSPTVAYSVLVVAKVEKGKSKKLKSVKELLGITIMERSSFEKNPIDFLEAKGYKEVKKDLIIKLPKYSLFELENGRKRMLASAGELQKGNELALPSKYVNFLYLASHYEKLKGSPEDNEQKQLFVEQHKHYLDEIIEQISEFSKRVILADANLDKVLSAYNKHRDKPIREQAENIIHLFTLTNLGAPAAFKYFDTTIDRKRYTSTKEVLDATLIHQSITGLYETRIDLSQLGGDGGEAAAKEAAAKGGTLQLDDEYRLYSPLVKPDQNIQFWLEQFPQAWAETAGMGLAKQVPPQVIQLKASATPVSVRQYPLSKEAQEGIRPHVQRLIQQGILVPVQSPWNTPLLPVRKPGTNDYRPVQDLREVNKRVQDIHPTVPNPYNLLCALPPQRSWYTVLDLKDAFFCLRLHPTSQPLFAFEWRDPGTGRTGQLTWTRLPQGFKNSPTIFDEALHRDLANFRIQHPQVTLLQYVDDLLLAGATKQDCLEGTKALLLELSDLGYRASAKKAQICRREVTYLGYSLRDGQRWLTEARKKTVVQIPAPTTAKQVREFLGTAGFCRLWIPGFATLAAPLYPLTKEKGEFSWAPEHQKAFDAIKKALLSAPALALPDVTKPFTLYVDERKGVARGVLTQTLGPWRRPVAYLSKKLDPVASGWPVCLKAIAAVAILVKDADKLTLGQNITVIAPHALENIVRQPPDRWMTNARMTHYQSLLLTERVTFAPPAALNPATLLPEETDEPVTHDCHQLLIEETGVRKDLTDIPLTGEVLTWFTDGSSYVVEGKRMAGAAVVDGTRTIWASSLPEGTSAQKAELMALTQALRLAEGKSINIYTDSRYAFATAHVHGAIYKQRGLLTSAGREIKNKEEILSLLEALHLPKRLAIIHCPGHQKAKDPISRGNQMADRVAKQAAQGVNLLAGKRTADGSEFEKRTADGSEFESPKKKAKVE

SEQ ID NO: 6381 - protein, 2087 aa, synthetic construct; identical to SEQ ID NO: 6379

SEQ ID NO: 6382 - protein, 2175 aa, synthetic construct
MPAAKRVKLDGGDKKYSIGLDIGTNSVGWAVITDEYKVPSKKFKVLGNTDRHSIKKNLIGALLFDSGETAEATRLKRTARRRYTRRKNRICYLQEIFSNEMAKVDDSFFHRLEESFLVEEDKKHERHPIFGNIVDEVAYHEKYPTIYHLRKKLVDSTDKADLRLIYLALAHMIKFRGHFLIEGDLNPDNSDVDKLFIQLVQTYNQLFEENPINASGVDAKAILSARLSKSRRLENLIAQLPGEKKNGLFGNLIALSLGLTPNFKSNFDLAEDAKLQLSKDTYDDDLDNLLAQIGDQYADLFLAAKNLSDAILLSDILRVNTEITKAPLSASMIKRYDEHHQDLTLLKALVRQQLPEKYKEIFFDQSKNGYAGYIDGGASQEEFYKFIKPILEKMDGTEELLVKLNREDLLRKQRTFDNGSIPHQIHLGELHAILRRQEDFYPFLKDNREKIEKILTFRIPYYVGPLARGNSRFAWMTRKSEETITPWNFEEVVDKGASAQSFIERMTNFDKNLPNEKVLPKHSLLYEYFTVYNELTKVKYVTEGMRKPAFLSGEQKKAIVDLLFKTNRKVTVKQLKEDYFKKIECFDSVEISGVEDRFNASLGTYHDLLKIIKDKDFLDNEENEDILEDIVLTLTLFEDREMIEERLKTYAHLFDDKVMKQLKRRRYTGWGRLSRKLINGIRDKQSGKTILDFLKSDGFANRNFMQLIHDDSLTFKEDIQKAQVSGQGDSLHEHIANLAGSPAIKKGILQTVKVVDELVKVMGRHKPENIVIEMARENQTTQKGQKNSRERMKRIEEGIKELGSQILKEHPVENTQLQNEKLYLYYLQNGRDMYVDQELDINRLSDYDVDHIVPQSFLKDDSIDNKVLTRSDKARGKSDNVPSEEVVKKMKNYWRQLLNAKLITQRKFDNLTKAERGGLSELDKAGFIKRQLVETRQITKHVAQILDSRMNTKYDENDKLIREVKVITLKSKLVSDFRKDFQFYKVREINNYHHAHDAYLNAVVGTALIKKYPKLESEFVYGDYKVYDVRKMIAKSEQEIGKATAKYFFYSNIMNFFKTEITLANGEIRKRPLIETNGETGEIVWDKGRDFATVRKVLSMPQVNIVKKTEVQTGGFSKESILPKRNSDKLIARKKDWDPKKYGGFDSPTVAYSVLVVAKVEKGKSKKLKSVKELLGITIMERSSFEKNPIDFLEAKGYKEVKKDLIIKLPKYSLFELENGRKRMLASAGELQKGNELALPSKYVNFLYLASHYEKLKGSPEDNEQKQLFVEQHKHYLDEIIEQISEFSKRVILADANLDKVLSAYNKHRDKPIREQAENIIHLFTLTNLGAPAAFKYFDTTIDRKRYTSTKEVLDATLIHQSITGLYETRIDLSQLGGDGGEAAAKEAAAKGGMDPLQLLQPLEAEIKGTKLKAHWNSGATITCVPQAFLEEEVPIKNIWIKTIHGEKEQPVYYLTFKIQGRKVEAEVISSPYDYILVSPSDIPWLMKKPLQLTTLVPLQEYEERLLKQTMLTGSYKEKLQSLFLKYDALWQHWENQVGHRRIKPHHIATGTVNPRPQKQYPINPKAKASIQTVINDLLKQGVLIQQNSIMNTPVYPVPKPDGKWRMVLDYREVNKTIPLIAAQNQHSAGILSSIFRGKYKTTLDLSNGFWAHSITPESYWLTAFTWLGQQYCWTRLPQGFLNSPALFNADVVDLLKEVPNVQVYVDDIYISHDDPREHLEQLEKVFSLLLNAGYVVSLKKSEIAQHEVEFLGFNITKEGRGLTETFKQKLLNITPPRDLKQLQSILGKLNFARNFIPNFSELVKPLYNIIATAPGKYITWTTDNSQQLQNIISMLNSAENLEERNPEVRLIMKVNTSPSAGYIRFYNEFAKRPIMYLNYVYTKAEVKFTNTEKLLTTIHKGLIKALDLGMGQEILVYSPIVSMTKIQKTPLPERKALPIRWITWMSYLEDPRIQFHYDKTLPELQQVPTVTDDIIAKIKHPSEFSMVFYTDGSAIKHPNVNKSHNAGMGIAQVQFKPEFTVINTWSIPLGDHTAQLAEVAAVEFACKKALKIDGPVLIVTDSFYVAESVNKELPYWQSNGFFNNKKKPLKHVSKWKSIADCIQLKPDIIIIHEKGHQPTASTFHTEGNNLADKLATQGSYVVNAGKRTADGSEFEKRTADGSEFESPKKKAKVE

SEQ ID NO: 6383 - protein, 2095 aa, synthetic construct
MPAAKRVKLDGGDKKYSIGLDIGTNSVGWAVITDEYKVPSKKFKVLGNTDRHSIKKNLIGALLFDSGETAEATRLKRTARRRYTRRKNRICYLQEIFSNEMAKVDDSFFHRLEESFLVEEDKKHERHPIFGNIVDEVAYHEKYPTIYHLRKKLVDSTDKADLRLIYLALAHMIKFRGHFLIEGDLNPDNSDVDKLFIQLVQTYNQLFEENPINASGVDAKAILSARLSKSRRLENLIAQLPGEKKNGLFGNLIALSLGLTPNFKSNFDLAEDAKLQLSKDTYDDDLDNLLAQIGDQYADLFLAAKNLSDAILLSDILRVNTEITKAPLSASMIKRYDEHHQDLTLLKALVRQQLPEKYKEIFFDQSKNGYAGYIDGGASQEEFYKFIKPILEKMDGTEELLVKLNREDLLRKQRTFDNGSIPHQIHLGELHAILRRQEDFYPFLKDNREKIEKILTFRIPYYVGPLARGNSRFAWMTRKSEETITPWNFEEVVDKGASAQSFIERMTNFDKNLPNEKVLPKHSLLYEYFTVYNELTKVKYVTEGMRKPAFLSGEQKKAIVDLLFKTNRKVTVKQLKEDYFKKIECFDSVEISGVEDRFNASLGTYHDLLKIIKDKDFLDNEENEDILEDIVLTLTLFEDREMIEERLKTYAHLFDDKVMKQLKRRRYTGWGRLSRKLINGIRDKQSGKTILDFLKSDGFANRNFMQLIHDDSLTFKEDIQKAQVSGQGDSLHEHIANLAGSPAIKKGILQTVKVVDELVKVMGRHKPENIVIEMARENQTTQKGQKNSRERMKRIEEGIKELGSQILKEHPVENTQLQNEKLYLYYLQNGRDMYVDQELDINRLSDYDVDHIVPQSFLKDDSIDNKVLTRSDKARGKSDNVPSEEVVKKMKNYWRQLLNAKLITQRKFDNLTKAERGGLSELDKAGFIKRQLVETRQITKHVAQILDSRMNTKYDENDKLIREVKVITLKSKLVSDFRKDFQFYKVREINNYHHAHDAYLNAVVGTALIKKYPKLESEFVYGDYKVYDVRKMIAKSEQEIGKATAKYFFYSNIMNFFKTEITLANGEIRKRPLIETNGETGEIVWDKGRDFATVRKVLSMPQVNIVKKTEVQTGGFSKESILPKRNSDKLIARKKDWDPKKYGGFDSPTVAYSVLVVAKVEKGKSKKLKSVKELLGITIMERSSFEKNPIDFLEAKGYKEVKKDLIIKLPKYSLFELENGRKRMLASAGELQKGNELALPSKYVNFLYLASHYEKLKGSPEDNEQKQLFVEQHKHYLDEIIEQISEFSKRVILADANLDKVLSAYNKHRDKPIREQAENIIHLFTLTNLGAPAAFKYFDTTIDRKRYTSTKEVLDATLIHQSITGLYETRIDLSQLGGDGGEAAAKEAAAKGGTLNIEDEYRLHETSKEPDVPLGSTWLSDFPQAWAETGGMGLAVRQAPLIIPLKATSTPVSIKQYPMSQEARLGIKPHIQRLLDQGILVPCQSPWNTPLLPVKKPGTNDYRPVQDLREVNKRVEDIHPTVPNPYNLLSGLPPSHQWYTVLDLKDAFFCLRLHPTSQPLFAFEWRDPEMGISGQLTWTRLPQGFKNSPTLFNEALHRDLADFRIQHPDLILLQYVDDLLLAATSEQDCQRGTRALLQTLGNLGYRASAKKAQICQKQVKYLGYLLKEGQRWLTEARKETVMGQPTPKTPRQLREFLGKAGFCRLFIPGFAEMAAPLYPLTKPGTLFNWGPDQQKAYQEIKQALLTAPALGLPDLTKPFELFVDEKQGYAKGVLTQKLGPWRRPVAYLSKKLDPVAAGWPPCLRMVAAIAVLTKDAGKLTMGQPLVILAPHAVEALVKQPPDRWLSNARMTHYQAMLLDTDRVQFGPVVALNPATLLPLPEKEAPHDCLEILAETHGTRPDLTDQPIPDADYTWYTDGSSFLQEGQRRAGAAVTTETEVIWARALPAGTSAQRAELIALTQALKMAEGKKLNVYTDSRYAFATAHVHGEIYRRRGWLTSEGREIKNKNEILALLKALFLPKRLSIIHCPGHQKGNSAEARGNRMADQAAREAAMKAVLETSTLLAGKRTADGSEFEKRTADGSEFESPKKKAKVE

SEQ ID NO: 6384 - protein, 2102 aa, synthetic construct
MPAAKRVKLDGGDKKYSIGLDIGTNSVGWAVITDEYKVPSKKFKVLGNTDRHSIKKNLIGALLFDSGETAEATRLKRTARRRYTRRKNRICYLQEIFSNEMAKVDDSFFHRLEESFLVEEDKKHERHPIFGNIVDEVAYHEKYPTIYHLRKKLVDSTDKADLRLIYLALAHMIKFRGHFLIEGDLNPDNSDVDKLFIQLVQTYNQLFEENPINASGVDAKAILSARLSKSRRLENLIAQLPGEKKNGLFGNLIALSLGLTPNFKSNFDLAEDAKLQLSKDTYDDDLDNLLAQIGDQYADLFLAAKNLSDAILLSDILRVNTEITKAPLSASMIKRYDEHHQDLTLLKALVRQQLPEKYKEIFFDQSKNGYAGYIDGGASQEEFYKFIKPILEKMDGTEELLVKLNREDLLRKQRTFDNGSIPHQIHLGELHAILRRQEDFYPFLKDNREKIEKILTFRIPYYVGPLARGNSRFAWMTRKSEETITPWNFEEVVDKGASAQSFIERMTNFDKNLPNEKVLPKHSLLYEYFTVYNELTKVKYVTEGMRKPAFLSGEQKKAIVDLLFKTNRKVTVKQLKEDYFKKIECFDSVEISGVEDRFNASLGTYHDLLKIIKDKDFLDNEENEDILEDIVLTLTLFEDREMIEERLKTYAHLFDDKVMKQLKRRRYTGWGRLSRKLINGIRDKQSGKTILDFLKSDGFANRNFMQLIHDDSLTFKEDIQKAQVSGQGDSLHEHIANLAGSPAIKKGILQTVKVVDELVKVMGRHKPENIVIEMARENQTTQKGQKNSRERMKRIEEGIKELGSQILKEHPVENTQLQNEKLYLYYLQNGRDMYVDQELDINRLSDYDVDHIVPQSFLKDDSIDNKVLTRSDKARGKSDNVPSEEVVKKMKNYWRQLLNAKLITQRKFDNLTKAERGGLSELDKAGFIKRQLVETRQITKHVAQILDSRMNTKYDENDKLIREVKVITLKSKLVSDFRKDFQFYKVREINNYHHAHDAYLNAVVGTALIKKYPKLESEFVYGDYKVYDVRKMIAKSEQEIGKATAKYFFYSNIMNFFKTEITLANGEIRKRPLIETNGETGEIVWDKGRDFATVRKVLSMPQVNIVKKTEVQTGGFSKESILPKRNSDKLIARKKDWDPKKYGGFDSPTVAYSVLVVAKVEKGKSKKLKSVKELLGITIMERSSFEKNPIDFLEAKGYKEVKKDLIIKLPKYSLFELENGRKRMLASAGELQKGNELALPSKYVNFLYLASHYEKLKGSPEDNEQKQLFVEQHKHYLDEIIEQISEFSKRVILADANLDKVLSAYNKHRDKPIREQAENIIHLFTLTNLGAPAAFKYFDTTIDRKRYTSTKEVLDATLIHQSITGLYETRIDLSQLGGDGGEAAAKEAAAKEAAAKGGTAPLEEEYRLFLEAPIQNVTLLEQWKREIPKVWAEINPPGLASTQAPIHVQLLSTALPVRVRQYPITLEAKRSLRETIRKFRAAGILRPVHSPWNTPLLPVRKSGTSEYRMVQDLREVNKRVETIHPTVPNPYTLLSLLPPDRIWYSVLDLKDAFFCIPLAPESQLIFAFEWADAEEGESGQLTWTRLPQGFKNSPTLFNEALNRDLQGFRLDHPSVSLLQYVDDLLIAADTQAACLSATRDLLMTLAELGYRVSGKKAQLCQEEVTYLGFKIHKGSRSLSNSRTQAILQIPVPKTKRQVREFLGTIGYCRLWIPGFAELAQPLYAATRPGNDPLVWGEKEEEAFQSLKLALTQPPALALPSLDKPFQLFVEETSGAAKGVLTQALGPWKRPVAYLSKRLDPVAAGWPRCLRAIAAAALLTREASKLTFGQDIEITSSHNLESLLRSPPDKWLTNARITQYQVLLLDPPRVRFKQTAALNPATLLPETDDTLPIHHCLDTLDSLTSTRPDLTDQPLAQAEATLFTDGSSYIRDGKRYAGAAVVTLDSVIWAEPLPIGTSAQKAELIALTKALEWSKDKSVNIYTDSRYAFATLHVHGMIYRERGWLTAGGKAIKNAPEILALLTAVWLPKRVAVMHCKGHQKDDAPTSTGNRRADEVAREVAIRPLSTQATISAGKRTADGSEFEKRTADGSEFESPKKKAKVE

SEQ ID NO: 6385 - protein, 2102 aa, synthetic construct
MPAAKRVKLDGGDKKYSIGLDIGTNSVGWAVITDEYKVPSKKFKVLGNTDRHSIKKNLIGALLFDSGETAEATRLKRTARRRYTRRKNRICYLQEIFSNEMAKVDDSFFHRLEESFLVEEDKKHERHPIFGNIVDEVAYHEKYPTIYHLRKKLVDSTDKADLRLIYLALAHMIKFRGHFLIEGDLNPDNSDVDKLFIQLVQTYNQLFEENPINASGVDAKAILSARLSKSRRLENLIAQLPGEKKNGLFGNLIALSLGLTPNFKSNFDLAEDAKLQLSKDTYDDDLDNLLAQIGDQYADLFLAAKNLSDAILLSDILRVNTEITKAPLSASMIKRYDEHHQDLTLLKALVRQQLPEKYKEIFFDQSKNGYAGYIDGGASQEEFYKFIKPILEKMDGTEELLVKLNREDLLRKQRTFDNGSIPHQIHLGELHAILRRQEDFYPFLKDNREKIEKILTFRIPYYVGPLARGNSRFAWMTRKSEETITPWNFEEVVDKGASAQSFIERMTNFDKNLPNEKVLPKHSLLYEYFTVYNELTKVKYVTEGMRKPAFLSGEQKKAIVDLLFKTNRKVTVKQLKEDYFKKIECFDSVEISGVEDRFNASLGTYHDLLKIIKDKDFLDNEENEDILEDIVLTLTLFEDREMIEERLKTYAHLFDDKVMKQLKRRRYTGWGRLSRKLINGIRDKQSGKTILDFLKSDGFANRNFMQLIHDDSLTFKEDIQKAQVSGQGDSLHEHIANLAGSPAIKKGILQTVKVVDELVKVMGRHKPENIVIEMARENQTTQKGQKNSRERMKRIEEGIKELGSQILKEHPVENTQLQNEKLYLYYLQNGRDMYVDQELDINRLSDYDVDHIVPQSFLKDDSIDNKVLTRSDKARGKSDNVPSEEVVKKMKNYWRQLLNAKLITQRKFDNLTKAERGGLSELDKAGFIKRQLVETRQITKHVAQILDSRMNTKYDENDKLIREVKVITLKSKLVSDFRKDFQFYKVREINNYHHAHDAYLNAVVGTALIKKYPKLESEFVYGDYKVYDVRKMIAKSEQEIGKATAKYFFYSNIMNFFKTEITLANGEIRKRPLIETNGETGEIVWDKGRDFATVRKVLSMPQVNIVKKTEVQTGGFSKESILPKRNSDKLIARKKDWDPKKYGGFDSPTVAYSVLVVAKVEKGKSKKLKSVKELLGITIMERSSFEKNPIDFLEAKGYKEVKKDLIIKLPKYSLFELENGRKRMLASAGELQKGNELALPSKYVNFLYLASHYEKLKGSPEDNEQKQLFVEQHKHYLDEIIEQISEFSKRVILADANLDKVLSAYNKHRDKPIREQAENIIHLFTLTNLGAPAAFKYFDTTIDRKRYTSTKEVLDATLIHQSITGLYETRIDLSQLGGDGGEAAAKEAAAKEAAAKGGTAPLEEEYRLFLEAPIQNVTLLEQWKREIPKVWAEINPPGLASTQAPIHVQLLSTALPVRVRQYPITLEAKRSLRETIRKFRAAGILRPVHSPWNTPLLPVRKSGTSEYRMVQDLREVNKRVETIHPTVPNPYTLLSLLPPDRIWYSVLDLKDAFFCIPLAPESQLIFAFEWADAEEGESGQLTWTRLPQGFKNSPTLFNEALNRDLQGFRLDHPSVSLLQYVDDLLIAADTQAACLSATRDLLMTLAELGYRVSGKKAQLCQEEVTYLGFKIHKGSRSLSNSRTQAILQIPVPKTKRQVREFLGKIGYCRLFIPGFAELAQPLYAATRPGNDPLVWGEKEEEAFQSLKLALTQPPALALPSLDKPFQLFVEETSGAAKGVLTQALGPWKRPVAYLSKRLDPVAAGWPRCLRAIAAAALLTREASKLTFGQDIEITSSHNLESLLRSPPDKWLTNARITQYQVLLLDPPRVRFKQTAALNPATLLPETDDTLPIHHCLDTLDSLTSTRPDLTDQPLAQAEATLFTDGSSYIRDGKRYAGAAVVTLDSVIWAEPLPIGTSAQKAELIALTKALEWSKDKSVNIYTDSRYAFATLHVHGMIYRERGWLTAGGKAIKNAPEILALLTAVWLPKRVAVMHCKGHQKDDAPTSTGNRRADEVAREVAIRPLSTQATISAGKRTADGSEFEKRTADGSEFESPKKKAKVE

SEQ ID NO: 6386 - protein, 2106 aa, synthetic construct
MPAAKRVKLDGGDKKYSIGLDIGTNSVGWAVITDEYKVPSKKFKVLGNTDRHSIKKNLIGALLFDSGETAEATRLKRTARRRYTRRKNRICYLQEIFSNEMAKVDDSFFHRLEESFLVEEDKKHERHPIFGNIVDEVAYHEKYPTIYHLRKKLVDSTDKADLRLIYLALAHMIKFRGHFLIEGDLNPDNSDVDKLFIQLVQTYNQLFEENPINASGVDAKAILSARLSKSRRLENLIAQLPGEKKNGLFGNLIALSLGLTPNFKSNFDLAEDAKLQLSKDTYDDDLDNLLAQIGDQYADLFLAAKNLSDAILLSDILRVNTEITKAPLSASMIKRYDEHHQDLTLLKALVRQQLPEKYKEIFFDQSKNGYAGYIDGGASQEEFYKFIKPILEKMDGTEELLVKLNREDLLRKQRTFDNGSIPHQIHLGELHAILRRQEDFYPFLKDNREKIEKILTFRIPYYVGPLARGNSRFAWMTRKSEETITPWNFEEVVDKGASAQSFIERMTNFDKNLPNEKVLPKHSLLYEYFTVYNELTKVKYVTEGMRKPAFLSGEQKKAIVDLLFKTNRKVTVKQLKEDYFKKIECFDSVEISGVEDRFNASLGTYHDLLKIIKDKDFLDNEENEDILEDIVLTLTLFEDREMIEERLKTYAHLFDDKVMKQLKRRRYTGWGRLSRKLINGIRDKQSGKTILDFLKSDGFANRNFMQLIHDDSLTFKEDIQKAQVSGQGDSLHEHIANLAGSPAIKKGILQTVKVVDELVKVMGRHKPENIVIEMARENQTTQKGQKNSRERMKRIEEGIKELGSQILKEHPVENTQLQNEKLYLYYLQNGRDMYVDQELDINRLSDYDVDHIVPQSFLKDDSIDNKVLTRSDKARGKSDNVPSEEVVKKMKNYWRQLLNAKLITQRKFDNLTKAERGGLSELDKAGFIKRQLVETRQITKHVAQILDSRMNTKYDENDKLIREVKVITLKSKLVSDFRKDFQFYKVREINNYHHAHDAYLNAVVGTALIKKYPKLESEFVYGDYKVYDVRKMIAKSEQEIGKATAKYFFYSNIMNFFKTEITLANGEIRKRPLIETNGETGEIVWDKGRDFATVRKVLSMPQVNIVKKTEVQTGGFSKESILPKRNSDKLIARKKDWDPKKYGGFDSPTVAYSVLVVAKVEKGKSKKLKSVKELLGITIMERSSFEKNPIDFLEAKGYKEVKKDLIIKLPKYSLFELENGRKRMLASAGELQKGNELALPSKYVNFLYLASHYEKLKGSPEDNEQKQLFVEQHKHYLDEIIEQISEFSKRVILADANLDKVLSAYNKHRDKPIREQAENIIHLFTLTNLGAPAAFKYFDTTIDRKRYTSTKEVLDATLIHQSITGLYETRIDLSQLGGDGGEAAAKEAAAKEAAAKGGTVSLQDEHRLFDIPVTTSLPDVWLQDFPQAWAETGGLGRAKCQAPIIIDLKPTAVPVSIKQYPMSLEAHMGIRQHIIKFLELGVLRPCRSPWNTPLLPVKKPGTQDYRPVQDLREINKRTVDIHPTVPNPYNLLSTLKPDYSWYTVLDLKDAFFCLPLAPQSQELFAFEWKDPERGISGQLTWTRLPQGFKNSPTLFNEALHRDLTDFRTQHPEVTLLQYVDDLLLAAPTKKACTQGTRHLLQELGEKGYRASAKKAQICQTKVTYLGYILSEGKRWLTPGRIETVARIPPPRNPREVREFLGTAGFCRLWIPGFAELAAPLYALTKPSTPFTWQTEHQLAFEALKKALLSAPALGLPDTSKPFTLFLDERQGIAKGVLTQKLGPWKRPVAYLSKKLDPVAAGWPPCLRIMAATAMLVKDSAKLTLGQPLTVITPHTLEAIVRQPPDRWITNARLTHYQALLLDTDRVQFGPPVTLNPATLLPVPENQPSPHDCRQVLAETHGTREDLKDQELPDADHTWYTDGSSYLDSGTRRAGAAVVDGHNTIWAQSLPPGTSAQKAELIALTKALELSKGKKANIYTDSRYAFATAHTHGSIYERRGWLTSEGKEIKNKAEIIALLKALFLPQEVAIIHCPGHQKGQDPVAVGNRQADRVARQAAMAEVLTLATEPDNTSHITAGKRTADGSEFEKRTADGSEFESPKKKAKVE

SEQ ID NO: 6387 - protein, 2091 aa, synthetic construct
MPAAKRVKLDGGDKKYSIGLDIGTNSVGWAVITDEYKVPSKKFKVLGNTDRHSIKKNLIGALLFDSGETAEATRLKRTARRRYTRRKNRICYLQEIFSNEMAKVDDSFFHRLEESFLVEEDKKHERHPIFGNIVDEVAYHEKYPTIYHLRKKLVDSTDKADLRLIYLALAHMIKFRGHFLIEGDLNPDNSDVDKLFIQLVQTYNQLFEENPINASGVDAKAILSARLSKSRRLENLIAQLPGEKKNGLFGNLIALSLGLTPNFKSNFDLAEDAKLQLSKDTYDDDLDNLLAQIGDQYADLFLAAKNLSDAILLSDILRVNTEITKAPLSASMIKRYDEHHQDLTLLKALVRQQLPEKYKEIFFDQSKNGYAGYIDGGASQEEFYKFIKPILEKMDGTEELLVKLNREDLLRKQRTFDNGSIPHQIHLGELHAILRRQEDFYPFLKDNREKIEKILTFRIPYYVGPLARGNSRFAWMTRKSEETITPWNFEEVVDKGASAQSFIERMTNFDKNLPNEKVLPKHSLLYEYFTVYNELTKVKYVTEGMRKPAFLSGEQKKAIVDLLFKTNRKVTVKQLKEDYFKKIECFDSVEISGVEDRFNASLGTYHDLLKIIKDKDFLDNEENEDILEDIVLTLTLFEDREMIEERLKTYAHLFDDKVMKQLKRRRYTGWGRLSRKLINGIRDKQSGKTILDFLKSDGFANRNFMQLIHDDSLTFKEDIQKAQVSGQGDSLHEHIANLAGSPAIKKGILQTVKVVDELVKVMGRHKPENIVIEMARENQTTQKGQKNSRERMKRIEEGIKELGSQILKEHPVENTQLQNEKLYLYYLQNGRDMYVDQELDINRLSDYDVDHIVPQSFLKDDSIDNKVLTRSDKARGKSDNVPSEEVVKKMKNYWRQLLNAKLITQRKFDNLTKAERGGLSELDKAGFIKRQLVETRQITKHVAQILDSRMNTKYDENDKLIREVKVITLKSKLVSDFRKDFQFYKVREINNYHHAHDAYLNAVVGTALIKKYPKLESEFVYGDYKVYDVRKMIAKSEQEIGKATAKYFFYSNIMNFFKTEITLANGEIRKRPLIETNGETGEIVWDKGRDFATVRKVLSMPQVNIVKKTEVQTGGFSKESILPKRNSDKLIARKKDWDPKKYGGFDSPTVAYSVLVVAKVEKGKSKKLKSVKELLGITIMERSSFEKNPIDFLEAKGYKEVKKDLIIKLPKYSLFELENGRKRMLASAGELQKGNELALPSKYVNFLYLASHYEKLKGSPEDNEQKQLFVEQHKHYLDEIIEQISEFSKRVILADANLDKVLSAYNKHRDKPIREQAENIIHLFTLTNLGAPAAFKYFDTTIDRKRYTSTKEVLDATLIHQSITGLYETRIDLSQLGGDGGEAAAKEAAAKEAAAKGGVPWILKKPLELTIKLDLEEQQGTLLNNSILSKKGKEELKQLFEKYSALWQSWENQVGHRRIRPHKIATGTVKPTPQKQYHINPKAKPDIQIVINDLLKQGVLIQKESTMNTPVYPVPKPNGRWRMVLDYRAVNKVTPLIAVQNQHSYGILGSLFKGRYKTTIDLSNGFWAHPIVPEDYWITAFTWQGKQYCWTVLPQGFLNSPGLFTGDVVDLLQGIPNVEVYVDDVYISHDSEKEHLEYLDILFNRLKEAGYIISLKKSNIANSIVDFLGFQITNEGRGLTDTFKEKLENITAPTTLKQLQSILGLLNFARNFIPDFTELIAPLYALIPKSTKNYVPWQIEHSTTLETLITKLNGAEYLQGRKGDKTLIMKVNASYTTGYIRYYNEGEKKPISYVSIVFSKTELKFTELEKLLTTVHKGLLKALDLSMGQNIHVYSPIVSMQNIQKTPQTAKKALASRWLSWLSYLEDPRIRFFYDPQMPALKDLPAVDTGKDNKKHPSNFQHIFYTDGSAITSPTKEGHLNAGMGIVYFINKDGNLQKQQEWSISLGNHTAQFAEIAAFEFALKKCLPLGGNILVVTDSNYVAKAYNEELDVWASNGFVNNRKKPLKHISKWKSVADLKRLRPDVVVTHEPGHQKLDSSPHAYGNNLADQLATQASFKVHAGKRTADGSEFEKRTADGSEFESPKKKAKVE

SEQ ID NO: 6388 - protein, 2091 aa, synthetic construct
MPAAKRVKLDGGDKKYSIGLDIGTNSVGWAVITDEYKVPSKKFKVLGNTDRHSIKKNLIGALLFDSGETAEATRLKRTARRRYTRRKNRICYLQEIFSNEMAKVDDSFFHRLEESFLVEEDKKHERHPIFGNIVDEVAYHEKYPTIYHLRKKLVDSTDKADLRLIYLALAHMIKFRGHFLIEGDLNPDNSDVDKLFIQLVQTYNQLFEENPINASGVDAKAILSARLSKSRRLENLIAQLPGEKKNGLFGNLIALSLGLTPNFKSNFDLAEDAKLQLSKDTYDDDLDNLLAQIGDQYADLFLAAKNLSDAILLSDILRVNTEITKAPLSASMIKRYDEHHQDLTLLKALVRQQLPEKYKEIFFDQSKNGYAGYIDGGASQEEFYKFIKPILEKMDGTEELLVKLNREDLLRKQRTFDNGSIPHQIHLGELHAILRRQEDFYPFLKDNREKIEKILTFRIPYYVGPLARGNSRFAWMTRKSEETITPWNFEEVVDKGASAQSFIERMTNFDKNLPNEKVLPKHSLLYEYFTVYNELTKVKYVTEGMRKPAFLSGEQKKAIVDLLFKTNRKVTVKQLKEDYFKKIECFDSVEISGVEDRFNASLGTYHDLLKIIKDKDFLDNEENEDILEDIVLTLTLFEDREMIEERLKTYAHLFDDKVMKQLKRRRYTGWGRLSRKLINGIRDKQSGKTILDFLKSDGFANRNFMQLIHDDSLTFKEDIQKAQVSGQGDSLHEHIANLAGSPAIKKGILQTVKVVDELVKVMGRHKPENIVIEMARENQTTQKGQKNSRERMKRIEEGIKELGSQILKEHPVENTQLQNEKLYLYYLQNGRDMYVDQELDINRLSDYDVDHIVPQSFLKDDSIDNKVLTRSDKARGKSDNVPSEEVVKKMKNYWRQLLNAKLITQRKFDNLTKAERGGLSELDKAGFIKRQLVETRQITKHVAQILDSRMNTKYDENDKLIREVKVITLKSKLVSDFRKDFQFYKVREINNYHHAHDAYLNAVVGTALIKKYPKLESEFVYGDYKVYDVRKMIAKSEQEIGKATAKYFFYSNIMNFFKTEITLANGEIRKRPLIETNGETGEIVWDKGRDFATVRKVLSMPQVNIVKKTEVQTGGFSKESILPKRNSDKLIARKKDWDPKKYGGFDSPTVAYSVLVVAKVEKGKSKKLKSVKELLGITIMERSSFEKNPIDFLEAKGYKEVKKDLIIKLPKYSLFELENGRKRMLASAGELQKGNELALPSKYVNFLYLASHYEKLKGSPEDNEQKQLFVEQHKHYLDEIIEQISEFSKRVILADANLDKVLSAYNKHRDKPIREQAENIIHLFTLTNLGAPAAFKYFDTTIDRKRYTSTKEVLDATLIHQSITGLYETRIDLSQLGGDGGEAAAKEAAAKEAAAKGGVPWLTQQPLQLTILVPLQEYQEKILSKTALPEDQKQQLKTLFVKYDNLWQHWENQVGHRKIRPHNIATGDYPPRPQKQYPINPKAKPSIQIVIDDLLKQGVLTPQNSTMNTPVYPVPKPDGRWRMVLDYREVNKTIPLTAAQNQHSAGILATIVRQKYKTTLDLANGFWAHPITPESYWLTAFTWQGKQYCWTRLPQGFLNSPALFNADVVDLLKEIPNVQVYVDDIYLSHDDPKEHVQQLEKVFQILLQAGYVVSLKKSEIGQKTVEFLGFNITKEGRGLTDTFKTKLLNITPPKDLKQLQSILGLLNFARNFIPNFAELVQPLYNLIAPAKGKYIEWSEENTKQLNMVIEALNTASNLEERLPEQRLVIKVNTSPSAGYVRYYNETGKKPIMYLNYVFSKAELKFSMLEKLLTTMHKALIKAMDLAMGQEILVYSPIVSMTKIQKTPLPERKALPIRWITWMTYLEDPRIQFHYDKTLPELKHIPDVYTSSQSPVKHPSQYEGVFYTDGSAIKSPDPTKSNNAGMGIVHATYKPEYQVLNQWSIPLGNHTAQMAEIAAVEFACKKALKIPGPVLVITDSFYVAESANKELPYWKSNGFVNNKKKPLKHISKWKSIAECLSMKPDITIQHEKGISLQIPVFILKGNALADKLATQGSYVVNAGKRTADGSEFEKRTADGSEFESPKKKAKVE

SEQ ID NO: 6389 - protein, 2091 aa, synthetic construct
MPAAKRVKLDGGDKKYSIGLDIGTNSVGWAVITDEYKVPSKKFKVLGNTDRHSIKKNLIGALLFDSGETAEATRLKRTARRRYTRRKNRICYLQEIFSNEMAKVDDSFFHRLEESFLVEEDKKHERHPIFGNIVDEVAYHEKYPTIYHLRKKLVDSTDKADLRLIYLALAHMIKFRGHFLIEGDLNPDNSDVDKLFIQLVQTYNQLFEENPINASGVDAKAILSARLSKSRRLENLIAQLPGEKKNGLFGNLIALSLGLTPNFKSNFDLAEDAKLQLSKDTYDDDLDNLLAQIGDQYADLFLAAKNLSDAILLSDILRVNTEITKAPLSASMIKRYDEHHQDLTLLKALVRQQLPEKYKEIFFDQSKNGYAGYIDGGASQEEFYKFIKPILEKMDGTEELLVKLNREDLLRKQRTFDNGSIPHQIHLGELHAILRRQEDFYPFLKDNREKIEKILTFRIPYYVGPLARGNSRFAWMTRKSEETITPWNFEEVVDKGASAQSFIERMTNFDKNLPNEKVLPKHSLLYEYFTVYNELTKVKYVTEGMRKPAFLSGEQKKAIVDLLFKTNRKVTVKQLKEDYFKKIECFDSVEISGVEDRFNASLGTYHDLLKIIKDKDFLDNEENEDILEDIVLTLTLFEDREMIEERLKTYAHLFDDKVMKQLKRRRYTGWGRLSRKLINGIRDKQSGKTILDFLKSDGFANRNFMQLIHDDSLTFKEDIQKAQVSGQGDSLHEHIANLAGSPAIKKGILQTVKVVDELVKVMGRHKPENIVIEMARENQTTQKGQKNSRERMKRIEEGIKELGSQILKEHPVENTQLQNEKLYLYYLQNGRDMYVDQELDINRLSDYDVDHIVPQSFLKDDSIDNKVLTRSDKARGKSDNVPSEEVVKKMKNYWRQLLNAKLITQRKFDNLTKAERGGLSELDKAGFIKRQLVETRQITKHVAQILDSRMNTKYDENDKLIREVKVITLKSKLVSDFRKDFQFYKVREINNYHHAHDAYLNAVVGTALIKKYPKLESEFVYGDYKVYDVRKMIAKSEQEIGKATAKYFFYSNIMNFFKTEITLANGEIRKRPLIETNGETGEIVWDKGRDFATVRKVLSMPQVNIVKKTEVQTGGFSKESILPKRNSDKLIARKKDWDPKKYGGFDSPTVAYSVLVVAKVEKGKSKKLKSVKELLGITIMERSSFEKNPIDFLEAKGYKEVKKDLIIKLPKYSLFELENGRKRMLASAGELQKGNELALPSKYVNFLYLASHYEKLKGSPEDNEQKQLFVEQHKHYLDEIIEQISEFSKRVILADANLDKVLSAYNKHRDKPIREQAENIIHLFTLTNLGAPAAFKYFDTTIDRKRYTSTKEVLDATLIHQSITGLYETRIDLSQLGGDGGEAAAKEAAAKEAAAKGGVPWLTQQPLQLTILVPLQEYQEKILSKTALPEDQKQQLKTLFVKYDNLWQHWENQVGHRKIRPHNIATGDYPPRPQKQYPINPKAKPSIQIVIDDLLKQGVLTPQNSTMNTPVYPVPKPDGRWRMVLDYREVNKTIPLTAAQNQHSAGILATIVRQKYKTTLDLANGFWAHPITPESYWLTAFTWQGKQYCWTRLPQGFLNSPALFNADVVDLLKEIPNVQVYVDDIYLSHDDPKEHVQQLEKVFQILLQAGYVVSLKKSEIGQKTVEFLGFNITKEGRGLTDTFKTKLLNITPPKDLKQLQSILGKLNFARNFIPNFAELVQPLYNLIAPAKGKYIEWSEENTKQLNMVIEALNTASNLEERLPEQRLVIKVNTSPSAGYVRYYNETGKKPIMYLNYVFSKAELKFSMLEKLLTTMHKALIKAMDLAMGQEILVYSPIVSMTKIQKTPLPERKALPIRWITWMTYLEDPRIQFHYDKTLPELKHIPDVYTSSQSPVKHPSQYEGVFYTDGSAIKSPDPTKSNNAGMGIVHATYKPEYQVLNQWSIPLGNHTAQMAEIAAVEFACKKALKIPGPVLVITDSFYVAESANKELPYWKSNGFVNNKKKPLKHISKWKSIAECLSMKPDITIQHEKGISLQIPVFILKGNALADKLATQGSYVVNAGKRTADGSEFEKRTADGSEFESPKKKAKVE

SEQ ID NO: 6390 - protein, 2222 aa, synthetic construct
MPAAKRVKLDGGDKKYSIGLDIGTNSVGWAVITDEYKVPSKKFKVLGNTDRHSIKKNLIGALLFDSGETAEATRLKRTARRRYTRRKNRICYLQEIFSNEMAKVDDSFFHRLEESFLVEEDKKHERHPIFGNIVDEVAYHEKYPTIYHLRKKLVDSTDKADLRLIYLALAHMIKFRGHFLIEGDLNPDNSDVDKLFIQLVQTYNQLFEENPINASGVDAKAILSARLSKSRRLENLIAQLPGEKKNGLFGNLIALSLGLTPNFKSNFDLAEDAKLQLSKDTYDDDLDNLLAQIGDQYADLFLAAKNLSDAILLSDILRVNTEITKAPLSASMIKRYDEHHQDLTLLKALVRQQLPEKYKEIFFDQSKNGYAGYIDGGASQEEFYKFIKPILEKMDGTEELLVKLNREDLLRKQRTFDNGSIPHQIHLGELHAILRRQEDFYPFLKDNREKIEKILTFRIPYYVGPLARGNSRFAWMTRKSEETITPWNFEEVVDKGASAQSFIERMTNFDKNLPNEKVLPKHSLLYEYFTVYNELTKVKYVTEGMRKPAFLSGEQKKAIVDLLFKTNRKVTVKQLKEDYFKKIECFDSVEISGVEDRFNASLGTYHDLLKIIKDKDFLDNEENEDILEDIVLTLTLFEDREMIEERLKTYAHLFDDKVMKQLKRRRYTGWGRLSRKLINGIRDKQSGKTILDFLKSDGFANRNFMQLIHDDSLTFKEDIQKAQVSGQGDSLHEHIANLAGSPAIKKGILQTVKVVDELVKVMGRHKPENIVIEMARENQTTQKGQKNSRERMKRIEEGIKELGSQILKEHPVENTQLQNEKLYLYYLQNGRDMYVDQELDINRLSDYDVDHIVPQSFLKDDSIDNKVLTRSDKARGKSDNVPSEEVVKKMKNYWRQLLNAKLITQRKFDNLTKAERGGLSELDKAGFIKRQLVETRQITKHVAQILDSRMNTKYDENDKLIREVKVITLKSKLVSDFRKDFQFYKVREINNYHHAHDAYLNAVVGTALIKKYPKLESEFVYGDYKVYDVRKMIAKSEQEIGKATAKYFFYSNIMNFFKTEITLANGEIRKRPLIETNGETGEIVWDKGRDFATVRKVLSMPQVNIVKKTEVQTGGFSKESILPKRNSDKLIARKKDWDPKKYGGFDSPTVAYSVLVVAKVEKGKSKKLKSVKELLGITIMERSSFEKNPIDFLEAKGYKEVKKDLIIKLPKYSLFELENGRKRMLASAGELQKGNELALPSKYVNFLYLASHYEKLKGSPEDNEQKQLFVEQHKHYLDEIIEQISEFSKRVILADANLDKVLSAYNKHRDKPIREQAENIIHLFTLTNLGAPAAFKYFDTTIDRKRYTSTKEVLDATLIHQSITGLYETRIDLSQLGGDGGEAAAKEAAAKEAAAKGGTLGDQGSRGSDPLPEPRVTLTVEGIPTEFLVNTGAEHSVLTKPMGKMGSKRTVVAGATGSKVYPWTTKRLLKIGQKQVTHSFLVIPECPAPLLGRDLLTKLKAQIQFSTEGPQVTWEDRPAMCLVLNLEEEYRLHEKPVPPSIDPSWLQLFPMVWAEKAGMGLANQVPPVVVELKSDASPVAVRQYPMSKEAREGIRPHIQRFLDLGILVPCQSPWNTPLLPVKKPGTNDYRPVQDLREVNKRVQDIHPTVPNPYNLLSSLPPSHTWYSVLDLKDAFFCLKLHPNSQPLFAFEWRDPEKGNTGQLTWTRLPQGFKNSPTLFDEALHRDLASFRALNPQVVMLQYVDDLLVAAPTYRDCKEGTRRLLQELSKLGYRVSAKKAQLCREEVTYLGYLLKGGKRWLTPARKATVMKIPTPTTPRQVREFLGTAGFCRLWIPGFASLAAPLYPLTREKVPFTWTEAHQEAFGRIKEALLSAPALALPDLTKPFALYVDEKEGVARGVLTQTLGPWRRPVAYLSKKLDPVASGWPTCLKAIAAVALLLKDADKLTLGQNVLVIAPHNLESIVRQPPDRWMTNARMTHYQSLLLNERVSFAPPAILNPATLLPVESDDTPIHICSEILAEETGTRPDLRDQPLPGVPAWYTDGSSFIMDGRRQAGAAIVDNKRTVWASNLPEGTSAQKAELIALTQALRLAEGKSINIYTDSRYAFATAHVHGAIYKQRGLLTSAGKDIKNKEEILALLEAIHLPKRVAIIHCPGHQRGTDPVATGNRKADEAAKQAAQSTRILTETTKNAGKRTADGSEFEKRTADGSEFESPKKKAKVE

SEQ ID NO: 6391 - protein, 2131 aa, synthetic construct
MPAAKRVKLDGGDKKYSIGLDIGTNSVGWAVITDEYKVPSKKFKVLGNTDRHSIKKNLIGALLFDSGETAEATRLKRTARRRYTRRKNRICYLQEIFSNEMAKVDDSFFHRLEESFLVEEDKKHERHPIFGNIVDEVAYHEKYPTIYHLRKKLVDSTDKADLRLIYLALAHMIKFRGHFLIEGDLNPDNSDVDKLFIQLVQTYNQLFEENPINASGVDAKAILSARLSKSRRLENLIAQLPGEKKNGLFGNLIALSLGLTPNFKSNFDLAEDAKLQLSKDTYDDDLDNLLAQIGDQYADLFLAAKNLSDAILLSDILRVNTEITKAPLSASMIKRYDEHHQDLTLLKALVRQQLPEKYKEIFFDQSKNGYAGYIDGGASQEEFYKFIKPILEKMDGTEELLVKLNREDLLRKQRTFDNGSIPHQIHLGELHAILRRQEDFYPFLKDNREKIEKILTFRIPYYVGPLARGNSRFAWMTRKSEETITPWNFEEVVDKGASAQSFIERMTNFDKNLPNEKVLPKHSLLYEYFTVYNELTKVKYVTEGMRKPAFLSGEQKKAIVDLLFKTNRKVTVKQLKEDYFKKIECFDSVEISGVEDRFNASLGTYHDLLKIIKDKDFLDNEENEDILEDIVLTLTLFEDREMIEERLKTYAHLFDDKVMKQLKRRRYTGWGRLSRKLINGIRDKQSGKTILDFLKSDGFANRNFMQLIHDDSLTFKEDIQKAQVSGQGDSLHEHIANLAGSPAIKKGILQTVKVVDELVKVMGRHKPENIVIEMARENQTTQKGQKNSRERMKRIEEGIKELGSQILKEHPVENTQLQNEKLYLYYLQNGRDMYVDQELDINRLSDYDVDHIVPQSFLKDDSIDNKVLTRSDKARGKSDNVPSEEVVKKMKNYWRQLLNAKLITQRKFDNLTKAERGGLSELDKAGFIKRQLVETRQITKHVAQILDSRMNTKYDENDKLIREVKVITLKSKLVSDFRKDFQFYKVREINNYHHAHDAYLNAVVGTALIKKYPKLESEFVYGDYKVYDVRKMIAKSEQEIGKATAKYFFYSNIMNFFKTEITLANGEIRKRPLIETNGETGEIVWDKGRDFATVRKVLSMPQVNIVKKTEVQTGGFSKESILPKRNSDKLIARKKDWDPKKYGGFDSPTVAYSVLVVAKVEKGKSKKLKSVKELLGITIMERSSFEKNPIDFLEAKGYKEVKKDLIIKLPKYSLFELENGRKRMLASAGELQKGNELALPSKYVNFLYLASHYEKLKGSPEDNEQKQLFVEQHKHYLDEIIEQISEFSKRVILADANLDKVLSAYNKHRDKPIREQAENIIHLFTLTNLGAPAAFKYFDTTIDRKRYTSTKEVLDATLIHQSITGLYETRIDLSQLGGDGGEAAAKEAAAKEAAAKGGLLGRDLLTKLKAQIQFSTEGPQVTWEDRPAMCLVLNLEEEYRLHEKPVPPSIDPSWLQLFPMVWAEKAGMGLANQVPPVVVELKSDASPVAVRQYPMSKEAREGIRPHIQRFLDLGILVPCQSPWNTPLLPVKKPGTNDYRPVQDLREVNKRVQDIHPTVPNPYNLLSSLPPSHTWYSVLDLKDAFFCLKLHPNSQPLFAFEWRDPEKGNTGQLTWTRLPQGFKNSPTLFNEALHRDLASFRALNPQVVMLQYVDDLLVAAPTYRDCKEGTRRLLQELSKLGYRVSAKKAQLCREEVTYLGYLLKGGKRWLTPARKATVMKIPTPTTPRQVREFLGKAGFCRLFIPGFASLAAPLYPLTRPKVPFTWTEAHQEAFGRIKEALLSAPALALPDLTKPFALYVDEKEGVARGVLTQTLGPWRRPVAYLSKKLDPVASGWPTCLKAIAAVALLLKDADKLTLGQNVLVIAPHNLESIVRQPPDRWMTNARMTHYQSLLLNERVSFAPPAILNPATLLPVESDDTPIHICSEILAEETGTRPDLRDQPLPGVPAWYTDGSSFIMDGRRQAGAAIVDNKRTVWASNLPEGTSAQKAELIALTQALRLAEGKSINIYTDSRYAFATAHVHGAIYKQRGWLTSAGKDIKNKEEILALLEAIHLPKRVAIIHCPGHQRGTDPVATGNRKADEAAKQAAQSTRILTETTKNAGKRTADGSEFEKRTADGSEFESPKKKAKVE

SEQ ID NO: 6392 - protein, 2222 aa, synthetic construct
MPAAKRVKLDGGDKKYSIGLDIGTNSVGWAVITDEYKVPSKKFKVLGNTDRHSIKKNLIGALLFDSGETAEATRLKRTARRRYTRRKNRICYLQEIFSNEMAKVDDSFFHRLEESFLVEEDKKHERHPIFGNIVDEVAYHEKYPTIYHLRKKLVDSTDKADLRLIYLALAHMIKFRGHFLIEGDLNPDNSDVDKLFIQLVQTYNQLFEENPINASGVDAKAILSARLSKSRRLENLIAQLPGEKKNGLFGNLIALSLGLTPNFKSNFDLAEDAKLQLSKDTYDDDLDNLLAQIGDQYADLFLAAKNLSDAILLSDILRVNTEITKAPLSASMIKRYDEHHQDLTLLKALVRQQLPEKYKEIFFDQSKNGYAGYIDGGASQEEFYKFIKPILEKMDGTEELLVKLNREDLLRKQRTFDNGSIPHQIHLGELHAILRRQEDFYPFLKDNREKIEKILTFRIPYYVGPLARGNSRFAWMTRKSEETITPWNFEEVVDKGASAQSFIERMTNFDKNLPNEKVLPKHSLLYEYFTVYNELTKVKYVTEGMRKPAFLSGEQKKAIVDLLFKTNRKVTVKQLKEDYFKKIECFDSVEISGVEDRFNASLGTYHDLLKIIKDKDFLDNEENEDILEDIVLTLTLFEDREMIEERLKTYAHLFDDKVMKQLKRRRYTGWGRLSRKLINGIRDKQSGKTILDFLKSDGFANRNFMQLIHDDSLTFKEDIQKAQVSGQGDSLHEHIANLAGSPAIKKGILQTVKVVDELVKVMGRHKPENIVIEMARENQTTQKGQKNSRERMKRIEEGIKELGSQILKEHPVENTQLQNEKLYLYYLQNGRDMYVDQELDINRLSDYDVDHIVPQSFLKDDSIDNKVLTRSDKARGKSDNVPSEEVVKKMKNYWRQLLNAKLITQRKFDNLTKAERGGLSELDKAGFIKRQLVETRQITKHVAQILDSRMNTKYDENDKLIREVKVITLKSKLVSDFRKDFQFYKVREINNYHHAHDAYLNAVVGTALIKKYPKLESEFVYGDYKVYDVRKMIAKSEQEIGKATAKYFFYSNIMNFFKTEITLANGEIRKRPLIETNGETGEIVWDKGRDFATVRKVLSMPQVNIVKKTEVQTGGFSKESILPKRNSDKLIARKKDWDPKKYGGFDSPTVAYSVLVVAKVEKGKSKKLKSVKELLGITIMERSSFEKNPIDFLEAKGYKEVKKDLIIKLPKYSLFELENGRKRMLASAGELQKGNELALPSKYVNFLYLASHYEKLKGSPEDNEQKQLFVEQHKHYLDEIIEQISEFSKRVILADANLDKVLSAYNKHRDKPIREQAENIIHLFTLTNLGAPAAFKYFDTTIDRKRYTSTKEVLDATLIHQSITGLYETRIDLSQLGGDGGEAAAKEAAAKEAAAKGGTLGDQGSRGSDPLPEPRVTLTVEGIPTEFLVNTGAEHSVLTKPMGKMGSKRTVVAGATGSKVYPWTTKRLLKIGQKQVTHSFLVIPECPAPLLGRDLLTKLKAQIQFSTEGPQVTWEDRPAMCLVLNLEEEYRLHEKPVPPSIDPSWLQLFPMVWAEKAGMGLANQVPPVVVELKSDASPVAVRQYPMSKEAREGIRPHIQRFLDLGILVPCQSPWNTPLLPVKKPGTNDYRPVQDLREVNKRVQDIHPTVPNPYNLLSSLPPSHTWYSVLDLKDAFFCLKLHPNSQPLFAFEWRDPEKGNTGQLTWTRLPQGFKNSPTLFNEALHRDLASFRALNPQVVMLQYVDDLLVAAPTYRDCKEGTRRLLQELSKLGYRVSAKKAQLCREEVTYLGYLLKGGKRWLTPARKATVMKIPTPTTPRQVREFLGKAGFCRLFIPGFASLAAPLYPLTRPKVPFTWTEAHQEAFGRIKEALLSAPALALPDLTKPFALYVDEKEGVARGVLTQTLGPWRRPVAYLSKKLDPVASGWPTCLKAIAAVALLLKDADKLTLGQNVLVIAPHNLESIVRQPPDRWMTNARMTHYQSLLLNERVSFAPPAILNPATLLPVESDDTPIHICSEILAEETGTRPDLRDQPLPGVPAWYTDGSSFIMDGRRQAGAAIVDNKRTVWASNLPEGTSAQKAELIALTQALRLAEGKSINIYTDSRYAFATAHVHGAIYKQRGWLTSAGKDIKNKEEILALLEAIHLPKRVAIIHCPGHQRGTDPVATGNRKADEAAKQAAQSTRILTETTKNAGKRTADGSEFEKRTADGSEFESPKKKAKVE

SEQ ID NO: 6393 - protein, 2100 aa, synthetic construct
MPAAKRVKLDGGDKKYSIGLDIGTNSVGWAVITDEYKVPSKKFKVLGNTDRHSIKKNLIGALLFDSGETAEATRLKRTARRRYTRRKNRICYLQEIFSNEMAKVDDSFFHRLEESFLVEEDKKHERHPIFGNIVDEVAYHEKYPTIYHLRKKLVDSTDKADLRLIYLALAHMIKFRGHFLIEGDLNPDNSDVDKLFIQLVQTYNQLFEENPINASGVDAKAILSARLSKSRRLENLIAQLPGEKKNGLFGNLIALSLGLTPNFKSNFDLAEDAKLQLSKDTYDDDLDNLLAQIGDQYADLFLAAKNLSDAILLSDILRVNTEITKAPLSASMIKRYDEHHQDLTLLKALVRQQLPEKYKEIFFDQSKNGYAGYIDGGASQEEFYKFIKPILEKMDGTEELLVKLNREDLLRKQRTFDNGSIPHQIHLGELHAILRRQEDFYPFLKDNREKIEKILTFRIPYYVGPLARGNSRFAWMTRKSEETITPWNFEEVVDKGASAQSFIERMTNFDKNLPNEKVLPKHSLLYEYFTVYNELTKVKYVTEGMRKPAFLSGEQKKAIVDLLFKTNRKVTVKQLKEDYFKKIECFDSVEISGVEDRFNASLGTYHDLLKIIKDKDFLDNEENEDILEDIVLTLTLFEDREMIEERLKTYAHLFDDKVMKQLKRRRYTGWGRLSRKLINGIRDKQSGKTILDFLKSDGFANRNFMQLIHDDSLTFKEDIQKAQVSGQGDSLHEHIANLAGSPAIKKGILQTVKVVDELVKVMGRHKPENIVIEMARENQTTQKGQKNSRERMKRIEEGIKELGSQILKEHPVENTQLQNEKLYLYYLQNGRDMYVDQELDINRLSDYDVDHIVPQSFLKDDSIDNKVLTRSDKARGKSDNVPSEEVVKKMKNYWRQLLNAKLITQRKFDNLTKAERGGLSELDKAGFIKRQLVETRQITKHVAQILDSRMNTKYDENDKLIREVKVITLKSKLVSDFRKDFQFYKVREINNYHHAHDAYLNAVVGTALIKKYPKLESEFVYGDYKVYDVRKMIAKSEQEIGKATAKYFFYSNIMNFFKTEITLANGEIRKRPLIETNGETGEIVWDKGRDFATVRKVLSMPQVNIVKKTEVQTGGFSKESILPKRNSDKLIARKKDWDPKKYGGFDSPTVAYSVLVVAKVEKGKSKKLKSVKELLGITIMERSSFEKNPIDFLEAKGYKEVKKDLIIKLPKYSLFELENGRKRMLASAGELQKGNELALPSKYVNFLYLASHYEKLKGSPEDNEQKQLFVEQHKHYLDEIIEQISEFSKRVILADANLDKVLSAYNKHRDKPIREQAENIIHLFTLTNLGAPAAFKYFDTTIDRKRYTSTKEVLDATLIHQSITGLYETRIDLSQLGGDGGEAAAKEAAAKEAAAKGGLGIEDEYRLHETSTEPDVSLGSTWLSDFPQAWAETGGMGLAVRQAPLIIPLKATSTPVSIQQYPMSHEARLGIKPHIQRLLDQGILVPCQSPWNTPLLPVKKPGTNDYRPVQDLREVNKRVEDIHPTVPNPYNLLSGLPPSHQWYTVLDLKDAFFCLRLHPTSQPLFAFEWRDPGMGISGQLTWTRLPQGFKNSPTLFNEALHRDLADFRIQHPDLILLQYVDDILLAATSELDCQQGTRALLQTLGDLGYRASAKKAQICQKQVKYLGYLLREGQRWLTEARKETVMGQPVPKTPRQLREFLGKAGFCRLFIPGFAEMAAPLYPLTKPGTLFSWGPDQQKAYQEIKQALLTAPALGLPDLTKPFELFVDEKQGYAKGVLTQKLGPWRRPVAYLSKKLDPVAAGWPPCLRMVAAIAVLTKDAGKLTMGQPLVILAPHAVEALVKQPPDRWLSNARMTHYQAMLLDTDRVQFGPVVALNPATLLPLPEEGAPHDCLEILAETHGTRPDLTDQPIPDADHTWYTDGSSFLQEGQRKAGAAVTTETEVIWAGALPAGTSAQRAELIALTQALKMAEGKRLNVYTDSRYAFATAHIHGEIYRRRGWLTSEGREIKNKSEILALLKALFLPKRLSIIHCLGHQKGDSAEARGNRLADQAAREAAIKTPPDTSTLLIAGKRTADGSEFEKRTADGSEFESPKKKAKVE

SEQ ID NO: 6394 - protein, 2100 aa, synthetic construct; identical to SEQ ID NO: 6393

SEQ ID NO: 6395 - protein, 2100 aa, synthetic construct
MPAAKRVKLDGGDKKYSIGLDIGTNSVGWAVITDEYKVPSKKFKVLGNTDRHSIKKNLIGALLFDSGETAEATRLKRTARRRYTRRKNRICYLQEIFSNEMAKVDDSFFHRLEESFLVEEDKKHERHPIFGNIVDEVAYHEKYPTIYHLRKKLVDSTDKADLRLIYLALAHMIKFRGHFLIEGDLNPDNSDVDKLFIQLVQTYNQLFEENPINASGVDAKAILSARLSKSRRLENLIAQLPGEKKNGLFGNLIALSLGLTPNFKSNFDLAEDAKLQLSKDTYDDDLDNLLAQIGDQYADLFLAAKNLSDAILLSDILRVNTEITKAPLSASMIKRYDEHHQDLTLLKALVRQQLPEKYKEIFFDQSKNGYAGYIDGGASQEEFYKFIKPILEKMDGTEELLVKLNREDLLRKQRTFDNGSIPHQIHLGELHAILRRQEDFYPFLKDNREKIEKILTFRIPYYVGPLARGNSRFAWMTRKSEETITPWNFEEVVDKGASAQSFIERMTNFDKNLPNEKVLPKHSLLYEYFTVYNELTKVKYVTEGMRKPAFLSGEQKKAIVDLLFKTNRKVTVKQLKEDYFKKIECFDSVEISGVEDRFNASLGTYHDLLKIIKDKDFLDNEENEDILEDIVLTLTLFEDREMIEERLKTYAHLFDDKVMKQLKRRRYTGWGRLSRKLINGIRDKQSGKTILDFLKSDGFANRNFMQLIHDDSLTFKEDIQKAQVSGQGDSLHEHIANLAGSPAIKKGILQTVKVVDELVKVMGRHKPENIVIEMARENQTTQKGQKNSRERMKRIEEGIKELGSQILKEHPVENTQLQNEKLYLYYLQNGRDMYVDQELDINRLSDYDVDHIVPQSFLKDDSIDNKVLTRSDKARGKSDNVPSEEVVKKMKNYWRQLLNAKLITQRKFDNLTKAERGGLSELDKAGFIKRQLVETRQITKHVAQILDSRMNTKYDENDKLIREVKVITLKSKLVSDFRKDFQFYKVREINNYHHAHDAYLNAVVGTALIKKYPKLESEFVYGDYKVYDVRKMIAKSEQEIGKATAKYFFYSNIMNFFKTEITLANGEIRKRPLIETNGETGEIVWDKGRDFATVRKVLSMPQVNIVKKTEVQTGGFSKESILPKRNSDKLIARKKDWDPKKYGGFDSPTVAYSVLVVAKVEKGKSKKLKSVKELLGITIMERSSFEKNPIDFLEAKGYKEVKKDLIIKLPKYSLFELENGRKRMLASAGELQKGNELALPSKYVNFLYLASHYEKLKGSPEDNEQKQLFVEQHKHYLDEIIEQISEFSKRVILADANLDKVLSAYNKHRDKPIREQAENIIHLFTLTNLGAPAAFKYFDTTIDRKRYTSTKEVLDATLIHQSITGLYETRIDLSQLGGDGGEAAAKEAAAKEAAAKGGTLNIEDEYRLHETSKGPDVPLGSTWLSDFPQAWAETGGMGLAVRQAPLIIPLKATSTPVSIKQYPMSQEARLGIKPHIQRLLDQGILVPCQSPWNTPLLPVKKPGTNDYRPVQDLREVNKRVEDIHPTVPNPYNLLSGLPPSHQWYTVLDLKDAFFCLRLHPTSQSLFAFEWRDPEMGISGQLTWTRLPQGFKNSPTLFNEALHRDLADFRIQHPDLILLQYVDDLLLAATSELDCQQGTRALLQTLGDLGYRASAKKAQICQKQVKYLGYLLKEGQRWLTEARKETVMGQPTPKTPRQLREFLGTAGFCRLWIPGFAEMAAPLYPLTKPGTLFEWGPDQQKAYQEIKQALLTAPALGLPDLTKPFELFVDEKQGYAKGVLTQKLGPWRRPVAYLSKKLDPVAAGWPPCLRMVAAIAVLTKDAGKLTMGQPLVILAPHAVEALVKQPPDRWLSNARMTHYQALLLDTDRVQFGPIVALNPATLLPLPEEGLQHDCLDILAEAHGTRPDLTDQPLPDADHTWYTDGSSFLQEGQRKAGAAVTTETEVVWAKALPAGTSAQRAELIALTQALKMAEGKKLNVYTDSRYAFATAHIHGEIYRRRGWLTSEGKEIKNKDEILALLKALFLPKRLSIIHCPGHQKGNRAEARGNRMADQAAREVATRETPETSTLLAGKRTADGSEFEKRTADGSEFESPKKKAKVE

SEQ ID NO: 6396 - protein, 2100 aa, synthetic construct
MPAAKRVKLDGGDKKYSIGLDIGTNSVGWAVITDEYKVPSKKFKVLGNTDRHSIKKNLIGALLFDSGETAEATRLKRTARRRYTRRKNRICYLQEIFSNEMAKVDDSFFHRLEESFLVEEDKKHERHPIFGNIVDEVAYHEKYPTIYHLRKKLVDSTDKADLRLIYLALAHMIKFRGHFLIEGDLNPDNSDVDKLFIQLVQTYNQLFEENPINASGVDAKAILSARLSKSRRLENLIAQLPGEKKNGLFGNLIALSLGLTPNFKSNFDLAEDAKLQLSKDTYDDDLDNLLAQIGDQYADLFLAAKNLSDAILLSDILRVNTEITKAPLSASMIKRYDEHHQDLTLLKALVRQQLPEKYKEIFFDQSKNGYAGYIDGGASQEEFYKFIKPILEKMDGTEELLVKLNREDLLRKQRTFDNGSIPHQIHLGELHAILRRQEDFYPFLKDNREKIEKILTFRIPYYVGPLARGNSRFAWMTRKSEETITPWNFEEVVDKGASAQSFIERMTNFDKNLPNEKVLPKHSLLYEYFTVYNELTKVKYVTEGMRKPAFLSGEQKKAIVDLLFKTNRKVTVKQLKEDYFKKIECFDSVEISGVEDRFNASLGTYHDLLKIIKDKDFLDNEENEDILEDIVLTLTLFEDREMIEERLKTYAHLFDDKVMKQLKRRRYTGWGRLSRKLINGIRDKQSGKTILDFLKSDGFANRNFMQLIHDDSLTFKEDIQKAQVSGQGDSLHEHIANLAGSPAIKKGILQTVKVVDELVKVMGRHKPENIVIEMARENQTTQKGQKNSRERMKRIEEGIKELGSQILKEHPVENTQLQNEKLYLYYLQNGRDMYVDQELDINRLSDYDVDHIVPQSFLKDDSIDNKVLTRSDKARGKSDNVPSEEVVKKMKNYWRQLLNAKLITQRKFDNLTKAERGGLSELDKAGFIKRQLVETRQITKHVAQILDSRMNTKYDENDKLIREVKVITLKSKLVSDFRKDFQFYKVREINNYHHAHDAYLNAVVGTALIKKYPKLESEFVYGDYKVYDVRKMIAKSEQEIGKATAKYFFYSNIMNFFKTEITLANGEIRKRPLIETNGETGEIVWDKGRDFATVRKVLSMPQVNIVKKTEVQTGGFSKESILPKRNSDKLIARKKDWDPKKYGGFDSPTVAYSVLVVAKVEKGKSKKLKSVKELLGITIMERSSFEKNPIDFLEAKGYKEVKKDLIIKLPKYSLFELENGRKRMLASAGELQKGNELALPSKYVNFLYLASHYEKLKGSPEDNEQKQLFVEQHKHYLDEIIEQISEFSKRVILADANLDKVLSAYNKHRDKPIREQAENIIHLFTLTNLGAPAAFKYFDTTIDRKRYTSTKEVLDATLIHQSITGLYETRIDLSQLGGDGGEAAAKEAAAKEAAAKGGTLNIEDEYRLHEISTEPDVSPGSTWLSDFPQAWAETGGMGLAVRQAPLIIPLKATSTPVSIKQYPMSQEAKLGIKPHIQRLLDQGILVPCQSPWNTPLLPVKKPGTNDYRPVQGLREVNKRVEDIHPTVPNPYNLLSGLPTSHRWYTVLDLKDAFFCLRLHPTSQPLFASEWRDPGMGISGQLTWTRLPQGFKNSPTLFDEALHRGLADFRIQHPDLILLQYVDDLLLAATSELDCQQGTRALLKTLGNLGYRASAKKAQICQKQVKYLGYLLREGQRWLTEARKETVMGQPTPKTPRQLREFLGTAGFCRLWIPRFAEMAAPLYPLTKTGTLFNWGPDQQKAYHEIKQALLTAPALGLPDLTKPFELFVDEKQGYAKGVLTQKLGPWRRPVAYLSKKLDPVAAGWPPCLRMVAAIAVLTKDAGKLTMGQPLVILAPHAVEALVKQPPDRWLSNARMTHYQAMLLDTDRVQFGPVVALNPATLLPLPEEGAPHDCLEILAETHGTEPDLTDQPIPDADHTWYTDGSSFLQEGQRKAGAAVTTETEVIWARALPAGTSAQRAELIALTQALKMAEGKRLNVYTDSRYAFATAHIHGEIYKRRGLLTSEGREIKNKSEILALLKALFLPKRLSIIHCLGHQKGDSAEARGNRLADQAAREAAIKTPPDTSTLLAGKRTADGSEFEKRTADGSEFESPKKKAKVE

SEQ ID NO: 6397 - protein, 2120 aa, synthetic construct
MPAAKRVKLDGGDKKYSIGLDIGTNSVGWAVITDEYKVPSKKFKVLGNTDRHSIKKNLIGALLFDSGETAEATRLKRTARRRYTRRKNRICYLQEIFSNEMAKVDDSFFHRLEESFLVEEDKKHERHPIFGNIVDEVAYHEKYPTIYHLRKKLVDSTDKADLRLIYLALAHMIKFRGHFLIEGDLNPDNSDVDKLFIQLVQTYNQLFEENPINASGVDAKAILSARLSKSRRLENLIAQLPGEKKNGLFGNLIALSLGLTPNFKSNFDLAEDAKLQLSKDTYDDDLDNLLAQIGDQYADLFLAAKNLSDAILLSDILRVNTEITKAPLSASMIKRYDEHHQDLTLLKALVRQQLPEKYKEIFFDQSKNGYAGYIDGGASQEEFYKFIKPILEKMDGTEELLVKLNREDLLRKQRTFDNGSIPHQIHLGELHAILRRQEDFYPFLKDNREKIEKILTFRIPYYVGPLARGNSRFAWMTRKSEETITPWNFEEVVDKGASAQSFIERMTNFDKNLPNEKVLPKHSLLYEYFTVYNELTKVKYVTEGMRKPAFLSGEQKKAIVDLLFKTNRKVTVKQLKEDYFKKIECFDSVEISGVEDRFNASLGTYHDLLKIIKDKDFLDNEENEDILEDIVLTLTLFEDREMIEERLKTYAHLFDDKVMKQLKRRRYTGWGRLSRKLINGIRDKQSGKTILDFLKSDGFANRNFMQLIHDDSLTFKEDIQKAQVSGQGDSLHEHIANLAGSPAIKKGILQTVKVVDELVKVMGRHKPENIVIEMARENQTTQKGQKNSRERMKRIEEGIKELGSQILKEHPVENTQLQNEKLYLYYLQNGRDMYVDQELDINRLSDYDVDHIVPQSFLKDDSIDNKVLTRSDKARGKSDNVPSEEVVKKMKNYWRQLLNAKLITQRKFDNLTKAERGGLSELDKAGFIKRQLVETRQITKHVAQILDSRMNTKYDENDKLIREVKVITLKSKLVSDFRKDFQFYKVREINNYHHAHDAYLNAVVGTALIKKYPKLESEFVYGDYKVYDVRKMIAKSEQEIGKATAKYFFYSNIMNFFKTEITLANGEIRKRPLIETNGETGEIVWDKGRDFATVRKVLSMPQVNIVKKTEVQTGGFSKESILPKRNSDKLIARKKDWDPKKYGGFDSPTVAYSVLVVAKVEKGKSKKLKSVKELLGITIMERSSFEKNPIDFLEAKGYKEVKKDLIIKLPKYSLFELENGRKRMLASAGELQKGNELALPSKYVNFLYLASHYEKLKGSPEDNEQKQLFVEQHKHYLDEIIEQISEFSKRVILADANLDKVLSAYNKHRDKPIREQAENIIHLFTLTNLGAPAAFKYFDTTIDRKRYTSTKEVLDATLIHQSITGLYETRIDLSQLGGDGGEAAAKEAAAKEAAAKGGVQEISDSRPMLHIYLNGRRFLGLLDTGADKTCIAGRDWPANWPIHQTESSLQGLGMACGVARSSQPLRWQHEDKSGIIHPFVIPTLPFTLWGRDIMKDIKVRLMTDSPDDSQDLMIGAIESNLFADQISWKSDQPVWLNQWPLKQEKLQALQQLVTEQLQLGHLEESNSPWNTPVFVIKKKSGKWRLLQDLRAVNATMHDMGALQPGLPSPVAVPKGWEIIIIDLQDCFFNIKLHPEDCKRFAFSVPSPNFKRPYQRFQWKVLPQGMKNSPTLCQKFVDKAILTVRDKYQDSYIVHYMDDILLAHPSRSIVDEILTSMIQALNKHGLVVSTEKIQKYDNLKYLGTHIQGDSVSYQKLQIRTDKLRTLNDFQKLLGNINWIRPFLKLTTGELKPLFEILNGDSNPISTRKLTPEACKALQLMNERLSTARVKRLDLSQPWSLCILKTEYTPTACLWQDGVVEWIHLPHISPKVITPYDIFCTQLIIKGRHRSKELFSKDPDYIVVPYTKVQFDLLLQEKEDWPISLLGFLGEVHFHLPKDPLLTFTLQTAIIFPHMTSTTPLEKGIVIFTDGSANGRSVTYIQGREPIIKENTQNTAQQAEIVAVITAFEEVSQPFNLYTDSKYVTGLFPEIETATLSPRTKIYTELKHLQRLIHKRQEKFYIGHIRGHTGLPGPLAQGNAYADSLTRILTAAGKRTADGSEFEKRTADGSEFESPKKKAKVE

SEQ ID NO: 6398 - protein, 2091 aa, synthetic construct
MPAAKRVKLDGGDKKYSIGLDIGTNSVGWAVITDEYKVPSKKFKVLGNTDRHSIKKNLIGALLFDSGETAEATRLKRTARRRYTRRKNRICYLQEIFSNEMAKVDDSFFHRLEESFLVEEDKKHERHPIFGNIVDEVAYHEKYPTIYHLRKKLVDSTDKADLRLIYLALAHMIKFRGHFLIEGDLNPDNSDVDKLFIQLVQTYNQLFEENPINASGVDAKAILSARLSKSRRLENLIAQLPGEKKNGLFGNLIALSLGLTPNFKSNFDLAEDAKLQLSKDTYDDDLDNLLAQIGDQYADLFLAAKNLSDAILLSDILRVNTEITKAPLSASMIKRYDEHHQDLTLLKALVRQQLPEKYKEIFFDQSKNGYAGYIDGGASQEEFYKFIKPILEKMDGTEELLVKLNREDLLRKQRTFDNGSIPHQIHLGELHAILRRQEDFYPFLKDNREKIEKILTFRIPYYVGPLARGNSRFAWMTRKSEETITPWNFEEVVDKGASAQSFIERMTNFDKNLPNEKVLPKHSLLYEYFTVYNELTKVKYVTEGMRKPAFLSGEQKKAIVDLLFKTNRKVTVKQLKEDYFKKIECFDSVEISGVEDRFNASLGTYHDLLKIIKDKDFLDNEENEDILEDIVLTLTLFEDREMIEERLKTYAHLFDDKVMKQLKRRRYTGWGRLSRKLINGIRDKQSGKTILDFLKSDGFANRNFMQLIHDDSLTFKEDIQKAQVSGQGDSLHEHIANLAGSPAIKKGILQTVKVVDELVKVMGRHKPENIVIEMARENQTTQKGQKNSRERMKRIEEGIKELGSQILKEHPVENTQLQNEKLYLYYLQNGRDMYVDQELDINRLSDYDVDHIVPQSFLKDDSIDNKVLTRSDKARGKSDNVPSEEVVKKMKNYWRQLLNAKLITQRKFDNLTKAERGGLSELDKAGFIKRQLVETRQITKHVAQILDSRMNTKYDENDKLIREVKVITLKSKLVSDFRKDFQFYKVREINNYHHAHDAYLNAVVGTALIKKYPKLESEFVYGDYKVYDVRKMIAKSEQEIGKATAKYFFYSNIMNFFKTEITLANGEIRKRPLIETNGETGEIVWDKGRDFATVRKVLSMPQVNIVKKTEVQTGGFSKESILPKRNSDKLIARKKDWDPKKYGGFDSPTVAYSVLVVAKVEKGKSKKLKSVKELLGITIMERSSFEKNPIDFLEAKGYKEVKKDLIIKLPKYSLFELENGRKRMLASAGELQKGNELALPSKYVNFLYLASHYEKLKGSPEDNEQKQLFVEQHKHYLDEIIEQISEFSKRVILADANLDKVLSAYNKHRDKPIREQAENIIHLFTLTNLGAPAAFKYFDTTIDRKRYTSTKEVLDATLIHQSITGLYETRIDLSQLGGDGGEAAAKEAAAKEAAAKGGIPWLMKKPLQLTTLVPLQEYEERLLKQTMLTGSYKEKLQSLFLKYDALWQHWENQVGHRRIKPHHIATGTVNPRPQKQYPINPKAKASIQTVINDLLKQGVLIQQNSIMNTPVYPVPKPDGKWRMVLDYREVNKTIPLIAAQNQHSAGILSSIFRGKYKTTLDLSNGFWAHSITPESYWLTAFTWLGQQYCWTRLPQGFLNSPALFNADVVDLLKEVPNVQVYVDDIYISHDDPREHLEQLEKVFSLLLNAGYVVSLKKSEIAQHEVEFLGFNITKEGRGLTETFKQKLLNITPPRDLKQLQSILGKLNFARNFIPNFSELVKPLYNIIATAPGKYITWTTDNSQQLQNIISMLNSAENLEERNPEVRLIMKVNTSPSAGYIRFYNEFAKRPIMYLNYVYTKAEVKFTNTEKLLTTIHKGLIKALDLGMGQEILVYSPIVSMTKIQKTPLPERKALPIRWITWMSYLEDPRIQFHYDKTLPELQQVPTVTDDIIAKIKHPSEFSMVFYTDGSAIKHPNVNKSHNAGMGIAQVQFKPEFTVINTWSIPLGDHTAQLAEVAAVEFACKKALKIDGPVLIVTDSFYVAESVNKELPYWQSNGFFNNKKKPLKHVSKWKSIADCIQLKPDIIIIHEKGHQPTASTFHTEGNNLADKLATQGSYVVNAGKRTADGSEFEKRTADGSEFESPKKKAKVE

SEQ ID NO: 6399 - protein, 2180 aa, synthetic construct
MPAAKRVKLDGGDKKYSIGLDIGTNSVGWAVITDEYKVPSKKFKVLGNTDRHSIKKNLIGALLFDSGETAEATRLKRTARRRYTRRKNRICYLQEIFSNEMAKVDDSFFHRLEESFLVEEDKKHERHPIFGNIVDEVAYHEKYPTIYHLRKKLVDSTDKADLRLIYLALAHMIKFRGHFLIEGDLNPDNSDVDKLFIQLVQTYNQLFEENPINASGVDAKAILSARLSKSRRLENLIAQLPGEKKNGLFGNLIALSLGLTPNFKSNFDLAEDAKLQLSKDTYDDDLDNLLAQIGDQYADLFLAAKNLSDAILLSDILRVNTEITKAPLSASMIKRYDEHHQDLTLLKALVRQQLPEKYKEIFFDQSKNGYAGYIDGGASQEEFYKFIKPILEKMDGTEELLVKLNREDLLRKQRTFDNGSIPHQIHLGELHAILRRQEDFYPFLKDNREKIEKILTFRIPYYVGPLARGNSRFAWMTRKSEETITPWNFEEVVDKGASAQSFIERMTNFDKNLPNEKVLPKHSLLYEYFTVYNELTKVKYVTEGMRKPAFLSGEQKKAIVDLLFKTNRKVTVKQLKEDYFKKIECFDSVEISGVEDRFNASLGTYHDLLKIIKDKDFLDNEENEDILEDIVLTLTLFEDREMIEERLKTYAHLFDDKVMKQLKRRRYTGWGRLSRKLINGIRDKQSGKTILDFLKSDGFANRNFMQLIHDDSLTFKEDIQKAQVSGQGDSLHEHIANLAGSPAIKKGILQTVKVVDELVKVMGRHKPENIVIEMARENQTTQKGQKNSRERMKRIEEGIKELGSQILKEHPVENTQLQNEKLYLYYLQNGRDMYVDQELDINRLSDYDVDHIVPQSFLKDDSIDNKVLTRSDKARGKSDNVPSEEVVKKMKNYWRQLLNAKLITQRKFDNLTKAERGGLSELDKAGFIKRQLVETRQITKHVAQILDSRMNTKYDENDKLIREVKVITLKSKLVSDFRKDFQFYKVREINNYHHAHDAYLNAVVGTALIKKYPKLESEFVYGDYKVYDVRKMIAKSEQEIGKATAKYFFYSNIMNFFKTEITLANGEIRKRPLIETNGETGEIVWDKGRDFATVRKVLSMPQVNIVKKTEVQTGGFSKESILPKRNSDKLIARKKDWDPKKYGGFDSPTVAYSVLVVAKVEKGKSKKLKSVKELLGITIMERSSFEKNPIDFLEAKGYKEVKKDLIIKLPKYSLFELENGRKRMLASAGELQKGNELALPSKYVNFLYLASHYEKLKGSPEDNEQKQLFVEQHKHYLDEIIEQISEFSKRVILADANLDKVLSAYNKHRDKPIREQAENIIHLFTLTNLGAPAAFKYFDTTIDRKRYTSTKEVLDATLIHQSITGLYETRIDLSQLGGDGGEAAAKEAAAKEAAAKGGMDPLQLLQPLEAEIKGTKLKAHWNSGATITCVPQAFLEEEVPIKNIWIKTIHGEKEQPVYYLTFKIQGRKVEAEVISSPYDYILVSPSDIPWLMKKPLQLTTLVPLQEYEERLLKQTMLTGSYKEKLQSLFLKYDALWQHWENQVGHRRIKPHHIATGTVNPRPQKQYPINPKAKASIQTVINDLLKQGVLIQQNSIMNTPVYPVPKPDGKWRMVLDYREVNKTIPLIAAQNQHSAGILSSIFRGKYKTTLDLSNGFWAHSITPESYWLTAFTWLGQQYCWTRLPQGFLNSPALFNADVVDLLKEVPNVQVYVDDIYISHDDPREHLEQLEKVFSLLLNAGYVVSLKKSEIAQHEVEFLGFNITKEGRGLTETFKQKLLNITPPRDLKQLQSILGKLNFARNFIPNFSELVKPLYNIIATAPGKYITWTTDNSQQLQNIISMLNSAENLEERNPEVRLIMKVNTSPSAGYIRFYNEFAKRPIMYLNYVYTKAEVKFTNTEKLLTTIHKGLIKALDLGMGQEILVYSPIVSMTKIQKTPLPERKALPIRWITWMSYLEDPRIQFHYDKTLPELQQVPTVTDDIIAKIKHPSEFSMVFYTDGSAIKHPNVNKSHNAGMGIAQVQFKPEFTVINTWSIPLGDHTAQLAEVAAVEFACKKALKIDGPVLIVTDSFYVAESVNKELPYWQSNGFFNNKKKPLKHVSKWKSIADCIQLKPDIIIIHEKGHQPTASTFHTEGNNLADKLATQGSYVVNAGKRTADGSEFEKRTADGSEFESPKKKAKVE

SEQ ID NO: 6400 - protein, 2180 aa, synthetic construct
MPAAKRVKLDGGDKKYSIGLDIGTNSVGWAVITDEYKVPSKKFKVLGNTDRHSIKKNLIGALLFDSGETAEATRLKRTARRRYTRRKNRICYLQEIFSNEMAKVDDSFFHRLEESFLVEEDKKHERHPIFGNIVDEVAYHEKYPTIYHLRKKLVDSTDKADLRLIYLALAHMIKFRGHFLIEGDLNPDNSDVDKLFIQLVQTYNQLFEENPINASGVDAKAILSARLSKSRRLENLIAQLPGEKKNGLFGNLIALSLGLTPNFKSNFDLAEDAKLQLSKDTYDDDLDNLLAQIGDQYADLFLAAKNLSDAILLSDILRVNTEITKAPLSASMIKRYDEHHQDLTLLKALVRQQLPEKYKEIFFDQSKNGYAGYIDGGASQEEFYKFIKPILEKMDGTEELLVKLNREDLLRKQRTFDNGSIPHQIHLGELHAILRRQEDFYPFLKDNREKIEKILTFRIPYYVGPLARGNSRFAWMTRKSEETITPWNFEEVVDKGASAQSFIERMTNFDKNLPNEKVLPKHSLLYEYFTVYNELTKVKYVTEGMRKPAFLSGEQKKAIVDLLFKTNRKVTVKQLKEDYFKKIECFDSVEISGVEDRFNASLGTYHDLLKIIKDKDFLDNEENEDILEDIVLTLTLFEDREMIEERLKTYAHLFDDKVMKQLKRRRYTGWGRLSRKLINGIRDKQSGKTILDFLKSDGFANRNFMQLIHDDSLTFKEDIQKAQVSGQGDSLHEHIANLAGSPAIKKGILQTVKVVDELVKVMGRHKPENIVIEMARENQTTQKGQKNSRERMKRIEEGIKELGSQILKEHPVENTQLQNEKLYLYYLQNGRDMYVDQELDINRLSDYDVDHIVPQSFLKDDSIDNKVLTRSDKARGKSDNVPSEEVVKKMKNYWRQLLNAKLITQRKFDNLTKAERGGLSELDKAGFIKRQLVETRQITKHVAQILDSRMNTKYDENDKLIREVKVITLKSKLVSDFRKDFQFYKVREINNYHHAHDAYLNAVVGTALIKKYPKLESEFVYGDYKVYDVRKMIAKSEQEIGKATAKYFFYSNIMNFFKTEITLANGEIRKRPLIETNGETGEIVWDKGRDFATVRKVLSMPQVNIVKKTEVQTGGFSKESILPKRNSDKLIARKKDWDPKKYGGFDSPTVAYSVLVVAKVEKGKSKKLKSVKELLGITIMERSSFEKNPIDFLEAKGYKEVKKDLIIKLPKYSLFELENGRKRMLASAGELQKGNELALPSKYVNFLYLASHYEKLKGSPEDNEQKQLFVEQHKHYLDEIIEQISEFSKRVILADANLDKVLSAYNKHRDKPIREQAENIIHLFTLTNLGAPAAFKYFDTTIDRKRYTSTKEVLDATLIHQSITGLYETRIDLSQLGGDGGEAAAKEAAAKEAAAKGGMNPLQLLQPLPAEVKGTKLLAHWNSGATITCIPESFLEDEQPIKQTLIKTIHGEKQQNVYYLTFKVKGRKVEAEVIASPYEYILLSPTDVPWLTQQPLQLTILVPLQEYQDRILNKTALPEEQKQQLKALFTKYDNLWQHWENQVGHRKIRPHNIATGDYPPRPQKQYPINPKAKPSIQIVIDDLLKQGVLTPQNSTMNTPVYPVPKPDGRWRMVLDYREVNKTIPLTAAQNQHSAGILATIVRQKYKTTLDLANGFWAHPITPDSYWLTAFTWQGKQYCWTRLPQGFLNSPALFTADAVDLLKEVPNVQVYVDDIYLSHDNPHEHIQQLEKVFQILLQAGYVVSLKKSEIGQRTVEFLGFNITKEGRGLTDTFKTKLLNVTPPKDLKQLQSILGLLNFARNFIPNFAELVQTLYNLIASSKGKYIEWTEDNTKQLNKVIEALNTASNLEERLPDQRLVIKVNTSPSAGYVRYYNESGKKPIMYLNYVFSKAELKFSMLEKLLTTMHKALIKAMDLAMGQEILVYSPIVSMTKIQKTPLPERKALPIRWITWMTYLEDPRIQFHYDKTLPELKHIPDVYTSSIPPLKHPSQYEGVFCTDGSAIKSPDPTKSNNAGMGIVHAIYNPEYKILNQWSIPLGHHTAQMAEIAAVEFACKKALKVPGPVLVITDSFYVAESANKELPYWKSNGFVNNKKEPLKHISKWKSIAECLSIKPDITIQHEKGHQPINTSIHTEGNALADKLATQGSYVVNAGKRTADGSEFEKRTADGSEFESPKKKAKVE

SEQ ID NO: 6401 - protein, 2098 aa, synthetic construct
MPAAKRVKLDGGDKKYSIGLDIGTNSVGWAVITDEYKVPSKKFKVLGNTDRHSIKKNLIGALLFDSGETAEATRLKRTARRRYTRRKNRICYLQEIFSNEMAKVDDSFFHRLEESFLVEEDKKHERHPIFGNIVDEVAYHEKYPTIYHLRKKLVDSTDKADLRLIYLALAHMIKFRGHFLIEGDLNPDNSDVDKLFIQLVQTYNQLFEENPINASGVDAKAILSARLSKSRRLENLIAQLPGEKKNGLFGNLIALSLGLTPNFKSNFDLAEDAKLQLSKDTYDDDLDNLLAQIGDQYADLFLAAKNLSDAILLSDILRVNTEITKAPLSASMIKRYDEHHQDLTLLKALVRQQLPEKYKEIFFDQSKNGYAGYIDGGASQEEFYKFIKPILEKMDGTEELLVKLNREDLLRKQRTFDNGSIPHQIHLGELHAILRRQEDFYPFLKDNREKIEKILTFRIPYYVGPLARGNSRFAWMTRKSEETITPWNFEEVVDKGASAQSFIERMTNFDKNLPNEKVLPKHSLLYEYFTVYNELTKVKYVTEGMRKPAFLSGEQKKAIVDLLFKTNRKVTVKQLKEDYFKKIECFDSVEISGVEDRFNASLGTYHDLLKIIKDKDFLDNEENEDILEDIVLTLTLFEDREMIEERLKTYAHLFDDKVMKQLKRRRYTGWGRLSRKLINGIRDKQSGKTILDFLKSDGFANRNFMQLIHDDSLTFKEDIQKAQVSGQGDSLHEHIANLAGSPAIKKGILQTVKVVDELVKVMGRHKPENIVIEMARENQTTQKGQKNSRERMKRIEEGIKELGSQILKEHPVENTQLQNEKLYLYYLQNGRDMYVDQELDINRLSDYDVDHIVPQSFLKDDSIDNKVLTRSDKARGKSDNVPSEEVVKKMKNYWRQLLNAKLITQRKFDNLTKAERGGLSELDKAGFIKRQLVETRQITKHVAQILDSRMNTKYDENDKLIREVKVITLKSKLVSDFRKDFQFYKVREINNYHHAHDAYLNAVVGTALIKKYPKLESEFVYGDYKVYDVRKMIAKSEQEIGKATAKYFFYSNIMNFFKTEITLANGEIRKRPLIETNGETGEIVWDKGRDFATVRKVLSMPQVNIVKKTEVQTGGFSKESILPKRNSDKLIARKKDWDPKKYGGFDSPTVAYSVLVVAKVEKGKSKKLKSVKELLGITIMERSSFEKNPIDFLEAKGYKEVKKDLIIKLPKYSLFELENGRKRMLASAGELQKGNELALPSKYVNFLYLASHYEKLKGSPEDNEQKQLFVEQHKHYLDEIIEQISEFSKRVILADANLDKVLSAYNKHRDKPIREQAENIIHLFTLTNLGAPAAFKYFDTTIDRKRYTSTKEVLDATLIHQSITGLYETRIDLSQLGGDGGEAAAKEAAAKEAAAKGGVLNLEEEYRLHEKPVPSSIDPSWLQLFPTVWAERAGMGLANQVPPVVVELRSGASPVAVRQYPMSKEAREGIRPHIQRFLDLGVLVPCQSPWNTPLLPVKKPGTNDYRPVQDLREINKRVQDIHPTVPNPYNLLSSLPPSHTWYSVLDLKDAFFCLKLHPNSQPLFAFEWRDPEKGNTGQLTWTRLPQGFKNSPTLFNEALHRDLAPFRALNPQVVLLQYVDDLLVAAPTYRDCKEGTQKLLQELSKLGYRVSAKKAQLCQKEVTYLGYLLKEGKRWLTPARKATVMKIPPPTTPRQVREFLGTAGFCRLWIPGFASLAAPLYPLTKPSIPFIWTEEHQKAFDRIKEALLSAPALALPDLTKPFTLYVDERAGVARGVLTQTLGPWRRPVAYLSKKLDPVASGWPTCLKAVAAVALLLKDADKLTLGQNVTVIASHSLESIVRQPPDRWMTNARMTHYQSLLLNERVSFAPPAVLNPATLLPVESEATPVHRCSEILAEETGTRRDLKDQPLPGVPAWYTDGSSFIAEGKRRAGAAIVDGKRTVWASSLPEGTSAQKAELVALTQALRLAEGKDINIYTDSRYAFATAHIHGAIYKQRGWLTSAGKDIKNKEEILALLEAIHLPKRVAIIHCPGHQKGNDPVATGNRRADEAAKQAALSTRVLAETTKPAGKRTADGSEFEKRTADGSEFESPKKKAKVE

SEQ ID NO: 6402 - protein, 2100 aa, synthetic construct; identical to SEQ ID NO: 4506

SEQ ID NO: 6403 - protein, 2107 aa, synthetic construct
MPAAKRVKLDGGDKKYSIGLDIGTNSVGWAVITDEYKVPSKKFKVLGNTDRHSIKKNLIGALLFDSGETAEATRLKRTARRRYTRRKNRICYLQEIFSNEMAKVDDSFFHRLEESFLVEEDKKHERHPIFGNIVDEVAYHEKYPTIYHLRKKLVDSTDKADLRLIYLALAHMIKFRGHFLIEGDLNPDNSDVDKLFIQLVQTYNQLFEENPINASGVDAKAILSARLSKSRRLENLIAQLPGEKKNGLFGNLIALSLGLTPNFKSNFDLAEDAKLQLSKDTYDDDLDNLLAQIGDQYADLFLAAKNLSDAILLSDILRVNTEITKAPLSASMIKRYDEHHQDLTLLKALVRQQLPEKYKEIFFDQSKNGYAGYIDGGASQEEFYKFIKPILEKMDGTEELLVKLNREDLLRKQRTFDNGSIPHQIHLGELHAILRRQEDFYPFLKDNREKIEKILTFRIPYYVGPLARGNSRFAWMTRKSEETITPWNFEEVVDKGASAQSFIERMTNFDKNLPNEKVLPKHSLLYEYFTVYNELTKVKYVTEGMRKPAFLSGEQKKAIVDLLFKTNRKVTVKQLKEDYFKKIECFDSVEISGVEDRFNASLGTYHDLLKIIKDKDFLDNEENEDILEDIVLTLTLFEDREMIEERLKTYAHLFDDKVMKQLKRRRYTGWGRLSRKLINGIRDKQSGKTILDFLKSDGFANRNFMQLIHDDSLTFKEDIQKAQVSGQGDSLHEHIANLAGSPAIKKGILQTVKVVDELVKVMGRHKPENIVIEMARENQTTQKGQKNSRERMKRIEEGIKELGSQILKEHPVENTQLQNEKLYLYYLQNGRDMYVDQELDINRLSDYDVDHIVPQSFLKDDSIDNKVLTRSDKARGKSDNVPSEEVVKKMKNYWRQLLNAKLITQRKFDNLTKAERGGLSELDKAGFIKRQLVETRQITKHVAQILDSRMNTKYDENDKLIREVKVITLKSKLVSDFRKDFQFYKVREINNYHHAHDAYLNAVVGTALIKKYPKLESEFVYGDYKVYDVRKMIAKSEQEIGKATAKYFFYSNIMNFFKTEITLANGEIRKRPLIETNGETGEIVWDKGRDFATVRKVLSMPQVNIVKKTEVQTGGFSKESILPKRNSDKLIARKKDWDPKKYGGFDSPTVAYSVLVVAKVEKGKSKKLKSVKELLGITIMERSSFEKNPIDFLEAKGYKEVKKDLIIKLPKYSLFELENGRKRMLASAGELQKGNELALPSKYVNFLYLASHYEKLKGSPEDNEQKQLFVEQHKHYLDEIIEQISEFSKRVILADANLDKVLSAYNKHRDKPIREQAENIIHLFTLTNLGAPAAFKYFDTTIDRKRYTSTKEVLDATLIHQSITGLYETRIDLSQLGGDGGEAAAKEAAAKEAAAKEAAAKGGTAPLEEEYRLFLEAPIQNVTLLEQWKREIPKVWAEINPPGLASTQAPIHVQLLSTALPVRVRQYPITLEAKRSLRETIRKFRAAGILRPVHSPWNTPLLPVRKSGTSEYRMVQDLREVNKRVETIHPTVPNPYTLLSLLPPDRIWYSVLDLKDAFFCIPLAPESQLIFAFEWADAEEGESGQLTWTRLPQGFKNSPTLFDEALNRDLQGFRLDHPSVSLLQYVDDLLIAADTQAACLSATRDLLMTLAELGYRVSGKKAQLCQEEVTYLGFKIHKGSRSLSNSRTQAILQIPVPKTKRQVREFLGTIGYCRLWIPGFAELAQPLYAATRGGNDPLVWGEKEEEAFQSLKLALTQPPALALPSLDKPFQLFVEETSGAAKGVLTQALGPWKRPVAYLSKRLDPVAAGWPRCLRAIAAAALLTREASKLTFGQDIEITSSHNLESLLRSPPDKWLTNARITQYQVLLLDPPRVRFKQTAALNPATLLPETDDTLPIHHCLDTLDSLTSTRPDLTDQPLAQAEATLFTDGSSYIRDGKRYAGAAVVTLDSVIWAEPLPIGTSAQKAELIALTKALEWSKDKSVNIYTDSRYAFATLHVHGMIYRERGLLTAGGKAIKNAPEILALLTAVWLPKRVAVMHCKGHQKDDAPTSTGNRRADEVAREVAIRPLSTQATISAGKRTADGSEFEKRTADGSEFESPKKKAKVE

SEQ ID NO: 6404 - protein, 2107 aa, synthetic construct
MPAAKRVKLDGGDKKYSIGLDIGTNSVGWAVITDEYKVPSKKFKVLGNTDRHSIKKNLIGALLFDSGETAEATRLKRTARRRYTRRKNRICYLQEIFSNEMAKVDDSFFHRLEESFLVEEDKKHERHPIFGNIVDEVAYHEKYPTIYHLRKKLVDSTDKADLRLIYLALAHMIKFRGHFLIEGDLNPDNSDVDKLFIQLVQTYNQLFEENPINASGVDAKAILSARLSKSRRLENLIAQLPGEKKNGLFGNLIALSLGLTPNFKSNFDLAEDAKLQLSKDTYDDDLDNLLAQIGDQYADLFLAAKNLSDAILLSDILRVNTEITKAPLSASMIKRYDEHHQDLTLLKALVRQQLPEKYKEIFFDQSKNGYAGYIDGGASQEEFYKFIKPILEKMDGTEELLVKLNREDLLRKQRTFDNGSIPHQIHLGELHAILRRQEDFYPFLKDNREKIEKILTFRIPYYVGPLARGNSRFAWMTRKSEETITPWNFEEVVDKGASAQSFIERMTNFDKNLPNEKVLPKHSLLYEYFTVYNELTKVKYVTEGMRKPAFLSGEQKKAIVDLLFKTNRKVTVKQLKEDYFKKIECFDSVEISGVEDRFNASLGTYHDLLKIIKDKDFLDNEENEDILEDIVLTLTLFEDREMIEERLKTYAHLFDDKVMKQLKRRRYTGWGRLSRKLINGIRDKQSGKTILDFLKSDGFANRNFMQLIHDDSLTFKEDIQKAQVSGQGDSLHEHIANLAGSPAIKKGILQTVKVVDELVKVMGRHKPENIVIEMARENQTTQKGQKNSRERMKRIEEGIKELGSQILKEHPVENTQLQNEKLYLYYLQNGRDMYVDQELDINRLSDYDVDHIVPQSFLKDDSIDNKVLTRSDKARGKSDNVPSEEVVKKMKNYWRQLLNAKLITQRKFDNLTKAERGGLSELDKAGFIKRQLVETRQITKHVAQILDSRMNTKYDENDKLIREVKVITLKSKLVSDFRKDFQFYKVREINNYHHAHDAYLNAVVGTALIKKYPKLESEFVYGDYKVYDVRKMIAKSEQEIGKATAKYFFYSNIMNFFKTEITLANGEIRKRPLIETNGETGEIVWDKGRDFATVRKVLSMPQVNIVKKTEVQTGGFSKESILPKRNSDKLIARKKDWDPKKYGGFDSPTVAYSVLVVAKVEKGKSKKLKSVKELLGITIMERSSFEKNPIDFLEAKGYKEVKKDLIIKLPKYSLFELENGRKRMLASAGELQKGNELALPSKYVNFLYLASHYEKLKGSPEDNEQKQLFVEQHKHYLDEIIEQISEFSKRVILADANLDKVLSAYNKHRDKPIREQAENIIHLFTLTNLGAPAAFKYFDTTIDRKRYTSTKEVLDATLIHQSITGLYETRIDLSQLGGDGGEAAAKEAAAKEAAAKEAAAKGGTAPLEEEYRLFLEAPIQNVTLLEQWKREIPKVWAEINPPGLASTQAPIHVQLLSTALPVRVRQYPITLEAKRSLRETIRKFRAAGILRPVHSPWNTPLLPVRKSGTSEYRMVQDLREVNKRVETIHPTVPNPYTLLSLLPPDRIWYSVLDLKDAFFCIPLAPESQLIFAFEWADAEEGESGQLTWTRLPQGFKNSPTLFNEALNRDLQGFRLDHPSVSLLQYVDDLLIAADTQAACLSATRDLLMTLAELGYRVSGKKAQLCQEEVTYLGFKIHKGSRSLSNSRTQAILQIPVPKTKRQVREFLGKIGYCRLFIPGFAELAQPLYAATRPGNDPLVWGEKEEEAFQSLKLALTQPPALALPSLDKPFQLFVEETSGAAKGVLTQALGPWKRPVAYLSKRLDPVAAGWPRCLRAIAAAALLTREASKLTFGQDIEITSSHNLESLLRSPPDKWLTNARITQYQVLLLDPPRVRFKQTAALNPATLLPETDDTLPIHHCLDTLDSLTSTRPDLTDQPLAQAEATLFTDGSSYIRDGKRYAGAAVVTLDSVIWAEPLPIGTSAQKAELIALTKALEWSKDKSVNIYTDSRYAFATLHVHGMIYRERGWLTAGGKAIKNAPEILALLTAVWLPKRVAVMHCKGHQKDDAPTSTGNRRADEVAREVAIRPLSTQATISAGKRTADGSEFEKRTADGSEFESPKKKAKVE

SEQ ID NO: 6405 - protein, 2096 aa, synthetic construct
MPAAKRVKLDGGDKKYSIGLDIGTNSVGWAVITDEYKVPSKKFKVLGNTDRHSIKKNLIGALLFDSGETAEATRLKRTARRRYTRRKNRICYLQEIFSNEMAKVDDSFFHRLEESFLVEEDKKHERHPIFGNIVDEVAYHEKYPTIYHLRKKLVDSTDKADLRLIYLALAHMIKFRGHFLIEGDLNPDNSDVDKLFIQLVQTYNQLFEENPINASGVDAKAILSARLSKSRRLENLIAQLPGEKKNGLFGNLIALSLGLTPNFKSNFDLAEDAKLQLSKDTYDDDLDNLLAQIGDQYADLFLAAKNLSDAILLSDILRVNTEITKAPLSASMIKRYDEHHQDLTLLKALVRQQLPEKYKEIFFDQSKNGYAGYIDGGASQEEFYKFIKPILEKMDGTEELLVKLNREDLLRKQRTFDNGSIPHQIHLGELHAILRRQEDFYPFLKDNREKIEKILTFRIPYYVGPLARGNSRFAWMTRKSEETITPWNFEEVVDKGASAQSFIERMTNFDKNLPNEKVLPKHSLLYEYFTVYNELTKVKYVTEGMRKPAFLSGEQKKAIVDLLFKTNRKVTVKQLKEDYFKKIECFDSVEISGVEDRFNASLGTYHDLLKIIKDKDFLDNEENEDILEDIVLTLTLFEDREMIEERLKTYAHLFDDKVMKQLKRRRYTGWGRLSRKLINGIRDKQSGKTILDFLKSDGFANRNFMQLIHDDSLTFKEDIQKAQVSGQGDSLHEHIANLAGSPAIKKGILQTVKVVDELVKVMGRHKPENIVIEMARENQTTQKGQKNSRERMKRIEEGIKELGSQILKEHPVENTQLQNEKLYLYYLQNGRDMYVDQELDINRLSDYDVDHIVPQSFLKDDSIDNKVLTRSDKARGKSDNVPSEEVVKKMKNYWRQLLNAKLITQRKFDNLTKAERGGLSELDKAGFIKRQLVETRQITKHVAQILDSRMNTKYDENDKLIREVKVITLKSKLVSDFRKDFQFYKVREINNYHHAHDAYLNAVVGTALIKKYPKLESEFVYGDYKVYDVRKMIAKSEQEIGKATAKYFFYSNIMNFFKTEITLANGEIRKRPLIETNGETGEIVWDKGRDFATVRKVLSMPQVNIVKKTEVQTGGFSKESILPKRNSDKLIARKKDWDPKKYGGFDSPTVAYSVLVVAKVEKGKSKKLKSVKELLGITIMERSSFEKNPIDFLEAKGYKEVKKDLIIKLPKYSLFELENGRKRMLASAGELQKGNELALPSKYVNFLYLASHYEKLKGSPEDNEQKQLFVEQHKHYLDEIIEQISEFSKRVILADANLDKVLSAYNKHRDKPIREQAENIIHLFTLTNLGAPAAFKYFDTTIDRKRYTSTKEVLDATLIHQSITGLYETRIDLSQLGGDGGEAAAKEAAAKEAAAKEAAAKGGVPWILKKPLELTIKLDLEEQQGTLLNNSILSKKGKEELKQLFEKYSALWQSWENQVGHRRIRPHKIATGTVKPTPQKQYHINPKAKPDIQIVINDLLKQGVLIQKESTMNTPVYPVPKPNGRWRMVLDYRAVNKVTPLIAVQNQHSYGILGSLFKGRYKTTIDLSNGFWAHPIVPEDYWITAFTWQGKQYCWTVLPQGFLNSPGLFNGDVVDLLQGIPNVEVYVDDVYISHDSEKEHLEYLDILFNRLKEAGYIISLKKSNIANSIVDFLGFQITNEGRGLTDTFKEKLENITAPTTLKQLQSILGLLNFARNFIPDFTELIAPLYALIPKSPKNYVPWQIEHSTTLETLITKLNGAEYLQGRKGDKTLIMKVNASYTTGYIRYYNEGEKKPISYVSIVFSKTELKFTELEKLLTTVHKGLLKALDLSMGQNIHVYSPIVSMQNIQKTPQTAKKALASRWLSWLSYLEDPRIRFFYDPQMPALKDLPAVDTGKDNKKHPSNFQHIFYTDGSAITSPTKEGHLNAGMGIVYFINKDGNLQKQQEWSISLGNHTAQFAEIAAFEFALKKCLPLGGNILVVTDSNYVAKAYNEELDVWASNGFVNNRKKPLKHISKWKSVADLKRLRPDVVVTHEPGHQKLDSSPHAYGNNLADQLATQASFKVHAGKRTADGSEFEKRTADGSEFESPKKKAKVE

SEQ ID NO: 6406 - protein, 2185 aa, synthetic construct
MPAAKRVKLDGGDKKYSIGLDIGTNSVGWAVITDEYKVPSKKFKVLGNTDRHSIKKNLIGALLFDSGETAEATRLKRTARRRYTRRKNRICYLQEIFSNEMAKVDDSFFHRLEESFLVEEDKKHERHPIFGNIVDEVAYHEKYPTIYHLRKKLVDSTDKADLRLIYLALAHMIKFRGHFLIEGDLNPDNSDVDKLFIQLVQTYNQLFEENPINASGVDAKAILSARLSKSRRLENLIAQLPGEKKNGLFGNLIALSLGLTPNFKSNFDLAEDAKLQLSKDTYDDDLDNLLAQIGDQYADLFLAAKNLSDAILLSDILRVNTEITKAPLSASMIKRYDEHHQDLTLLKALVRQQLPEKYKEIFFDQSKNGYAGYIDGGASQEEFYKFIKPILEKMDGTEELLVKLNREDLLRKQRTFDNGSIPHQIHLGELHAILRRQEDFYPFLKDNREKIEKILTFRIPYYVGPLARGNSRFAWMTRKSEETITPWNFEEVVDKGASAQSFIERMTNFDKNLPNEKVLPKHSLLYEYFTVYNELTKVKYVTEGMRKPAFLSGEQKKAIVDLLFKTNRKVTVKQLKEDYFKKIECFDSVEISGVEDRFNASLGTYHDLLKIIKDKDFLDNEENEDILEDIVLTLTLFEDREMIEERLKTYAHLFDDKVMKQLKRRRYTGWGRLSRKLINGIRDKQSGKTILDFLKSDGFANRNFMQLIHDDSLTFKEDIQKAQVSGQGDSLHEHIANLAGSPAIKKGILQTVKVVDELVKVMGRHKPENIVIEMARENQTTQKGQKNSRERMKRIEEGIKELGSQILKEHPVENTQLQNEKLYLYYLQNGRDMYVDQELDINRLSDYDVDHIVPQSFLKDDSIDNKVLTRSDKARGKSDNVPSEEVVKKMKNYWRQLLNAKLITQRKFDNLTKAERGGLSELDKAGFIKRQLVETRQITKHVAQILDSRMNTKYDENDKLIREVKVITLKSKLVSDFRKDFQFYKVREINNYHHAHDAYLNAVVGTALIKKYPKLESEFVYGDYKVYDVRKMIAKSEQEIGKATAKYFFYSNIMNFFKTEITLANGEIRKRPLIETNGETGEIVWDKGRDFATVRKVLSMPQVNIVKKTEVQTGGFSKESILPKRNSDKLIARKKDWDPKKYGGFDSPTVAYSVLVVAKVEKGKSKKLKSVKELLGITIMERSSFEKNPIDFLEAKGYKEVKKDLIIKLPKYSLFELENGRKRMLASAGELQKGNELALPSKYVNFLYLASHYEKLKGSPEDNEQKQLFVEQHKHYLDEIIEQISEFSKRVILADANLDKVLSAYNKHRDKPIREQAENIIHLFTLTNLGAPAAFKYFDTTIDRKRYTSTKEVLDATLIHQSITGLYETRIDLSQLGGDGGEAAAKEAAAKEAAAKEAAAKGGMNPLQLLQPLPAEIKGTKLLAHWNSGATITCIPESFLEDEQPIKKTLIKTIHGEKQQNVYYVTFKVKGRKVEAEVIASPYEYILLSPTDVPWLTQQPLQLTILVPLQEYQEKILSKTALPEDQKQQLKTLFVKYDNLWQHWENQVGHRKIRPHNIATGDYPPRPQKQYPINPKAKPSIQIVIDDLLKQGVLTPQNSTMNTPVYPVPKPDGRWRMVLDYREVNKTIPLTAAQNQHSAGILATIVRQKYKTTLDLANGFWAHPITPESYWLTAFTWQGKQYCWTRLPQGFLNSPALFTADVVDLLKEIPNVQVYVDDIYLSHDDPKEHVQQLEKVFQILLQAGYVVSLKKSEIGQKTVEFLGFNITKEGRGLTDTFKTKLLNITPPKDLKQLQSILGLLNFARNFIPNFAELVQPLYNLIASAKGKYIEWSEENTKQLNMVIEALNTASNLEERLPEQRLVIKVNTSPSAGYVRYYNETGKKPIMYLNYVFSKAELKFSMLEKLLTTMHKALIKAMDLAMGQEILVYSPIVSMTKIQKTPLPERKALPIRWITWMTYLEDPRIQFHYDKTLPELKHIPDVYTSSQSPVKHPSQYEGVFYTDGSAIKSPDPTKSNNAGMGIVHATYKPEYQVLNQWSIPLGNHTAQMAEIAAVEFACKKALKIPGPVLVITDSFYVAESANKELPYWKSNGFVNNKKKPLKHISKWKSIAECLSMKPDITIQHEKGISLQIPVFILKGNALADKLATQGSYVVNAGKRTADGSEFEKRTADGSEFESPKKKAKVE

SEQ ID NO: 6407 - protein, 2103 aa, synthetic construct
MPAAKRVKLDGGDKKYSIGLDIGTNSVGWAVITDEYKVPSKKFKVLGNTDRHSIKKNLIGALLFDSGETAEATRLKRTARRRYTRRKNRICYLQEIFSNEMAKVDDSFFHRLEESFLVEEDKKHERHPIFGNIVDEVAYHEKYPTIYHLRKKLVDSTDKADLRLIYLALAHMIKFRGHFLIEGDLNPDNSDVDKLFIQLVQTYNQLFEENPINASGVDAKAILSARLSKSRRLENLIAQLPGEKKNGLFGNLIALSLGLTPNFKSNFDLAEDAKLQLSKDTYDDDLDNLLAQIGDQYADLFLAAKNLSDAILLSDILRVNTEITKAPLSASMIKRYDEHHQDLTLLKALVRQQLPEKYKEIFFDQSKNGYAGYIDGGASQEEFYKFIKPILEKMDGTEELLVKLNREDLLRKQRTFDNGSIPHQIHLGELHAILRRQEDFYPFLKDNREKIEKILTFRIPYYVGPLARGNSRFAWMTRKSEETITPWNFEEVVDKGASAQSFIERMTNFDKNLPNEKVLPKHSLLYEYFTVYNELTKVKYVTEGMRKPAFLSGEQKKAIVDLLFKTNRKVTVKQLKEDYFKKIECFDSVEISGVEDRFNASLGTYHDLLKIIKDKDFLDNEENEDILEDIVLTLTLFEDREMIEERLKTYAHLFDDKVMKQLKRRRYTGWGRLSRKLINGIRDKQSGKTILDFLKSDGFANRNFMQLIHDDSLTFKEDIQKAQVSGQGDSLHEHIANLAGSPAIKKGILQTVKVVDELVKVMGRHKPENIVIEMARENQTTQKGQKNSRERMKRIEEGIKELGSQILKEHPVENTQLQNEKLYLYYLQNGRDMYVDQELDINRLSDYDVDHIVPQSFLKDDSIDNKVLTRSDKARGKSDNVPSEEVVKKMKNYWRQLLNAKLITQRKFDNLTKAERGGLSELDKAGFIKRQLVETRQITKHVAQILDSRMNTKYDENDKLIREVKVITLKSKLVSDFRKDFQFYKVREINNYHHAHDAYLNAVVGTALIKKYPKLESEFVYGDYKVYDVRKMIAKSEQEIGKATAKYFFYSNIMNFFKTEITLANGEIRKRPLIETNGETGEIVWDKGRDFATVRKVLSMPQVNIVKKTEVQTGGFSKESILPKRNSDKLIARKKDWDPKKYGGFDSPTVAYSVLVVAKVEKGKSKKLKSVKELLGITIMERSSFEKNPIDFLEAKGYKEVKKDLIIKLPKYSLFELENGRKRMLASAGELQKGNELALPSKYVNFLYLASHYEKLKGSPEDNEQKQLFVEQHKHYLDEIIEQISEFSKRVILADANLDKVLSAYNKHRDKPIREQAENIIHLFTLTNLGAPAAFKYFDTTIDRKRYTSTKEVLDATLIHQSITGLYETRIDLSQLGGDGGEAAAKEAAAKEAAAKEAAAKGGVLNLEEEYRLHEKPVPSSIDPSWLQLFPTVWAERAGMGLANQVPPVVVELRSGASPVAVRQYPMSKEAREGIRPHIQKFLDLGVLVPCRSPWNTPLLPVKKPGTNDYRPVQDLREINKRVQDIHPTVPNPYNLLSSLPPSYTWYSVLDLKDAFFCLRLHPNSQPLFAFEWKDPEKGNTGQLTWTRLPQGFKNSPTLFNEALHRDLAPFRALNPQVVLLQYVDDLLVAAPTYEDCKKGTQKLLQELSKLGYRVSAKKAQLCQREVTYLGYLLKEGKRWLTPARKATVMKIPVPTTPRQVREFLGKAGFCRLFIPGFASLAAPLYPLTKPSIPFIWTEEHQQAFDHIKKALLSAPALALPDLTKPFTLYIDERAGVARGVLTQTLGPWRRPVAYLSKKLDPVASGWPTCLKAVAAVALLLKDADKLTLGQNVTVIASHSLESIVRQPPDRWMTNARMTHYQSLLLNERVSFAPPAVLNPATLLPVESEATPVHRCSEILAEETGTRRDLEDQPLPGVPTWYTDGSSFITEGKRRAGAPIVDGKRTVWASSLPEGTSAQKAELVALTQALRLAEGKNINIYTDSRYAFATAHIHGAIYKQRGWLTSAGKDIKNKEEILALLEAIHLPRRVAIIHCPGHQRGSNPVATGNRRADEAAKQAALSTRVLAGTTKPAGKRTADGSEFEKRTADGSEFESPKKKAKVE

SEQ ID NO: 6408 - protein, 2136 aa, synthetic construct
MPAAKRVKLDGGDKKYSIGLDIGTNSVGWAVITDEYKVPSKKFKVLGNTDRHSIKKNLIGALLFDSGETAEATRLKRTARRRYTRRKNRICYLQEIFSNEMAKVDDSFFHRLEESFLVEEDKKHERHPIFGNIVDEVAYHEKYPTIYHLRKKLVDSTDKADLRLIYLALAHMIKFRGHFLIEGDLNPDNSDVDKLFIQLVQTYNQLFEENPINASGVDAKAILSARLSKSRRLENLIAQLPGEKKNGLFGNLIALSLGLTPNFKSNFDLAEDAKLQLSKDTYDDDLDNLLAQIGDQYADLFLAAKNLSDAILLSDILRVNTEITKAPLSASMIKRYDEHHQDLTLLKALVRQQLPEKYKEIFFDQSKNGYAGYIDGGASQEEFYKFIKPILEKMDGTEELLVKLNREDLLRKQRTFDNGSIPHQIHLGELHAILRRQEDFYPFLKDNREKIEKILTFRIPYYVGPLARGNSRFAWMTRKSEETITPWNFEEVVDKGASAQSFIERMTNFDKNLPNEKVLPKHSLLYEYFTVYNELTKVKYVTEGMRKPAFLSGEQKKAIVDLLFKTNRKVTVKQLKEDYFKKIECFDSVEISGVEDRFNASLGTYHDLLKIIKDKDFLDNEENEDILEDIVLTLTLFEDREMIEERLKTYAHLFDDKVMKQLKRRRYTGWGRLSRKLINGIRDKQSGKTILDFLKSDGFANRNFMQLIHDDSLTFKEDIQKAQVSGQGDSLHEHIANLAGSPAIKKGILQTVKVVDELVKVMGRHKPENIVIEMARENQTTQKGQKNSRERMKRIEEGIKELGSQILKEHPVENTQLQNEKLYLYYLQNGRDMYVDQELDINRLSDYDVDHIVPQSFLKDDSIDNKVLTRSDKARGKSDNVPSEEVVKKMKNYWRQLLNAKLITQRKFDNLTKAERGGLSELDKAGFIKRQLVETRQITKHVAQILDSRMNTKYDENDKLIREVKVITLKSKLVSDFRKDFQFYKVREINNYHHAHDAYLNAVVGTALIKKYPKLESEFVYGDYKVYDVRKMIAKSEQEIGKATAKYFFYSNIMNFFKTEITLANGEIRKRPLIETNGETGEIVWDKGRDFATVRKVLSMPQVNIVKKTEVQTGGFSKESILPKRNSDKLIARKKDWDPKKYGGFDSPTVAYSVLVVAKVEKGKSKKLKSVKELLGITIMERSSFEKNPIDFLEAKGYKEVKKDLIIKLPKYSLFELENGRKRMLASAGELQKGNELALPSKYVNFLYLASHYEKLKGSPEDNEQKQLFVEQHKHYLDEIIEQISEFSKRVILADANLDKVLSAYNKHRDKPIREQAENIIHLFTLTNLGAPAAFKYFDTTIDRKRYTSTKEVLDATLIHQSITGLYETRIDLSQLGGDGGEAAAKEAAAKEAAAKEAAAKGGLLGRDLLTKLKAQIQFSTEGPQVTWEDRPAMCLVLNLEEEYRLHEKPVPPSIDPSWLQLFPMVWAEKAGMGLANQVPPVVVELKSDASPVAVRQYPMSKEAREGIRPHIQRFLDLGILVPCQSPWNTPLLPVKKPGTNDYRPVQDLREVNKRVQDIHPTVPNPYNLLSSLPPSHTWYSVLDLKDAFFCLKLHPNSQPLFAFEWRDPEKGNTGQLTWTRLPQGFKNSPTLFDEALHRDLASFRALNPQVVMLQYVDDLLVAAPTYRDCKEGTRRLLQELSKLGYRVSAKKAQLCREEVTYLGYLLKGGKRWLTPARKATVMKIPTPTTPRQVREFLGTAGFCRLWIPGFASLAAPLYPLTREKVPFTWTEAHQEAFGRIKEALLSAPALALPDLTKPFALYVDEKEGVARGVLTQTLGPWRRPVAYLSKKLDPVASGWPTCLKAIAAVALLLKDADKLTLGQNVLVIAPHNLESIVRQPPDRWMTNARMTHYQSLLLNERVSFAPPAILNPATLLPVESDDTPIHICSEILAEETGTRPDLRDQPLPGVPAWYTDGSSFIMDGRRQAGAAIVDNKRTVWASNLPEGTSAQKAELIALTQALRLAEGKSINIYTDSRYAFATAHVHGAIYKQRGLLTSAGKDIKNKEEILALLEAIHLPKRVAIIHCPGHQRGTDPVATGNRKADEAAKQAAQSTRILTETTKNAGKRTADGSEFEKRTADGSEFESPKKKAKVE

SEQ ID NO: 6409 - protein, 2136 aa, synthetic construct
MPAAKRVKLDGGDKKYSIGLDIGTNSVGWAVITDEYKVPSKKFKVLGNTDRHSIKKNLIGALLFDSGETAEATRLKRTARRRYTRRKNRICYLQEIFSNEMAKVDDSFFHRLEESFLVEEDKKHERHPIFGNIVDEVAYHEKYPTIYHLRKKLVDSTDKADLRLIYLALAHMIKFRGHFLIEGDLNPDNSDVDKLFIQLVQTYNQLFEENPINASGVDAKAILSARLSKSRRLENLIAQLPGEKKNGLFGNLIALSLGLTPNFKSNFDLAEDAKLQLSKDTYDDDLDNLLAQIGDQYADLFLAAKNLSDAILLSDILRVNTEITKAPLSASMIKRYDEHHQDLTLLKALVRQQLPEKYKEIFFDQSKNGYAGYIDGGASQEEFYKFIKPILEKMDGTEELLVKLNREDLLRKQRTFDNGSIPHQIHLGELHAILRRQEDFYPFLKDNREKIEKILTFRIPYYVGPLARGNSRFAWMTRKSEETITPWNFEEVVDKGASAQSFIERMTNFDKNLPNEKVLPKHSLLYEYFTVYNELTKVKYVTEGMRKPAFLSGEQKKAIVDLLFKTNRKVTVKQLKEDYFKKIECFDSVEISGVEDRFNASLGTYHDLLKIIKDKDFLDNEENEDILEDIVLTLTLFEDREMIEERLKTYAHLFDDKVMKQLKRRRYTGWGRLSRKLINGIRDKQSGKTILDFLKSDGFANRNFMQLIHDDSLTFKEDIQKAQVSGQGDSLHEHIANLAGSPAIKKGILQTVKVVDELVKVMGRHKPENIVIEMARENQTTQKGQKNSRERMKRIEEGIKELGSQILKEHPVENTQLQNEKLYLYYLQNGRDMYVDQELDINRLSDYDVDHIVPQSFLKDDSIDNKVLTRSDKARGKSDNVPSEEVVKKMKNYWRQLLNAKLITQRKFDNLTKAERGGLSELDKAGFIKRQLVETRQITKHVAQILDSRMNTKYDENDKLIREVKVITLKSKLVSDFRKDFQFYKVREINNYHHAHDAYLNAVVGTALIKKYPKLESEFVYGDYKVYDVRKMIAKSEQEIGKATAKYFFYSNIMNFFKTEITLANGEIRKRPLIETNGETGEIVWDKGRDFATVRKVLSMPQVNIVKKTEVQTGGFSKESILPKRNSDKLIARKKDWDPKKYGGFDSPTVAYSVLVVAKVEKGKSKKLKSVKELLGITIMERSSFEKNPIDFLEAKGYKEVKKDLIIKLPKYSLFELENGRKRMLASAGELQKGNELALPSKYVNFLYLASHYEKLKGSPEDNEQKQLFVEQHKHYLDEIIEQISEFSKRVILADANLDKVLSAYNKHRDKPIREQAENIIHLFTLTNLGAPAAFKYFDTTIDRKRYTSTKEVLDATLIHQSITGLYETRIDLSQLGGDGGEAAAKEAAAKEAAAKEAAAKGGLLGRDLLTKLKAQIQFSTEGPQVTWEDRPAMCLVLNLEEEYRLHEKPVPPSIDPSWLQLFPMVWAEKAGMGLANQVPPVVVELKSDASPVAVRQYPMSKEAREGIRPHIQRFLDLGILVPCQSPWNTPLLPVKKPGTNDYRPVQDLREVNKRVQDIHPTVPNPYNLLSSLPPSHTWYSVLDLKDAFFCLKLHPNSQPLFAFEWRDPEKGNTGQLTWTRLPQGFKNSPTLFNEALHRDLASFRALNPQVVMLQYVDDLLVAAPTYRDCKEGTRRLLQELSKLGYRVSAKKAQLCREEVTYLGYLLKGGKRWLTPARKATVMKIPTPTTPRQVREFLGTAGFCRLWIPGFASLAAPLYPLTRPKVPFTWTEAHQEAFGRIKEALLSAPALALPDLTKPFALYVDEKEGVARGVLTQTLGPWRRPVAYLSKKLDPVASGWPTCLKAIAAVALLLKDADKLTLGQNVLVIAPHNLESIVRQPPDRWMTNARMTHYQSLLLNERVSFAPPAILNPATLLPVESDDTPIHICSEILAEETGTRPDLRDQPLPGVPAWYTDGSSFIMDGRRQAGAAIVDNKRTVWASNLPEGTSAQKAELIALTQALRLAEGKSINIYTDSRYAFATAHVHGAIYKQRGWLTSAGKDIKNKEEILALLEAIHLPKRVAIIHCPGHQRGTDPVATGNRKADEAAKQAAQSTRILTETTKNAGKRTADGSEFEKRTADGSEFESPKKKAKVE

SEQ ID NO: 6410 - protein, 2227 aa, synthetic construct
MPAAKRVKLDGGDKKYSIGLDIGTNSVGWAVITDEYKVPSKKFKVLGNTDRHSIKKNLIGALLFDSGETAEATRLKRTARRRYTRRKNRICYLQEIFSNEMAKVDDSFFHRLEESFLVEEDKKHERHPIFGNIVDEVAYHEKYPTIYHLRKKLVDSTDKADLRLIYLALAHMIKFRGHFLIEGDLNPDNSDVDKLFIQLVQTYNQLFEENPINASGVDAKAILSARLSKSRRLENLIAQLPGEKKNGLFGNLIALSLGLTPNFKSNFDLAEDAKLQLSKDTYDDDLDNLLAQIGDQYADLFLAAKNLSDAILLSDILRVNTEITKAPLSASMIKRYDEHHQDLTLLKALVRQQLPEKYKEIFFDQSKNGYAGYIDGGASQEEFYKFIKPILEKMDGTEELLVKLNREDLLRKQRTFDNGSIPHQIHLGELHAILRRQEDFYPFLKDNREKIEKILTFRIPYYVGPLARGNSRFAWMTRKSEETITPWNFEEVVDKGASAQSFIERMTNFDKNLPNEKVLPKHSLLYEYFTVYNELTKVKYVTEGMRKPAFLSGEQKKAIVDLLFKTNRKVTVKQLKEDYFKKIECFDSVEISGVEDRFNASLGTYHDLLKIIKDKDFLDNEENEDILEDIVLTLTLFEDREMIEERLKTYAHLFDDKVMKQLKRRRYTGWGRLSRKLINGIRDKQSGKTILDFLKSDGFANRNFMQLIHDDSLTFKEDIQKAQVSGQGDSLHEHIANLAGSPAIKKGILQTVKVVDELVKVMGRHKPENIVIEMARENQTTQKGQKNSRERMKRIEEGIKELGSQILKEHPVENTQLQNEKLYLYYLQNGRDMYVDQELDINRLSDYDVDHIVPQSFLKDDSIDNKVLTRSDKARGKSDNVPSEEVVKKMKNYWRQLLNAKLITQRKFDNLTKAERGGLSELDKAGFIKRQLVETRQITKHVAQILDSRMNTKYDENDKLIREVKVITLKSKLVSDFRKDFQFYKVREINNYHHAHDAYLNAVVGTALIKKYPKLESEFVYGDYKVYDVRKMIAKSEQEIGKATAKYFFYSNIMNFFKTEITLANGEIRKRPLIETNGETGEIVWDKGRDFATVRKVLSMPQVNIVKKTEVQTGGFSKESILPKRNSDKLIARKKDWDPKKYGGFDSPTVAYSVLVVAKVEKGKSKKLKSVKELLGITIMERSSFEKNPIDFLEAKGYKEVKKDLIIKLPKYSLFELENGRKRMLASAGELQKGNELALPSKYVNFLYLASHYEKLKGSPEDNEQKQLFVEQHKHYLDEIIEQISEFSKRVILADANLDKVLSAYNKHRDKPIREQAENIIHLFTLTNLGAPAAFKYFDTTIDRKRYTSTKEVLDATLIHQSITGLYETRIDLSQLGGDGGEAAAKEAAAKEAAAKEAAAKGGTLGDQGSRGSDPLPEPRVTLTVEGIPTEFLVNTGAEHSVLTKPMGKMGSKRTVVAGATGSKVYPWTTKRLLKIGQKQVTHSFLVIPECPAPLLGRDLLTKLKAQIQFSTEGPQVTWEDRPAMCLVLNLEEEYRLHEKPVPPSIDPSWLQLFPMVWAEKAGMGLANQVPPVVVELKSDASPVAVRQYPMSKEAREGIRPHIQRFLDLGILVPCQSPWNTPLLPVKKPGTNDYRPVQDLREVNKRVQDIHPTVPNPYNLLSSLPPSHTWYSVLDLKDAFFCLKLHPNSQPLFAFEWRDPEKGNTGQLTWTRLPQGFKNSPTLFNEALHRDLASFRALNPQVVMLQYVDDLLVAAPTYRDCKEGTRRLLQELSKLGYRVSAKKAQLCREEVTYLGYLLKGGKRWLTPARKATVMKIPTPTTPRQVREFLGTAGFCRLWIPGFASLAAPLYPLTRPKVPFTWTEAHQEAFGRIKEALLSAPALALPDLTKPFALYVDEKEGVARGVLTQTLGPWRRPVAYLSKKLDPVASGWPTCLKAIAAVALLLKDADKLTLGQNVLVIAPHNLESIVRQPPDRWMTNARMTHYQSLLLNERVSFAPPAILNPATLLPVESDDTPIHICSEILAEETGTRPDLRDQPLPGVPAWYTDGSSFIMDGRRQAGAAIVDNKRTVWASNLPEGTSAQKAELIALTQALRLAEGKSINIYTDSRYAFATAHVHGAIYKQRGWLTSAGKDIKNKEEILALLEAIHLPKRVAIIHCPGHQRGTDPVATGNRKADEAAKQAAQSTRILTETTKNAGKRTADGSEFEKRTADGSEFESPKKKAKVE

SEQ ID NO: 6411 - protein, 2105 aa, synthetic construct
MPAAKRVKLDGGDKKYSIGLDIGTNSVGWAVITDEYKVPSKKFKVLGNTDRHSIKKNLIGALLFDSGETAEATRLKRTARRRYTRRKNRICYLQEIFSNEMAKVDDSFFHRLEESFLVEEDKKHERHPIFGNIVDEVAYHEKYPTIYHLRKKLVDSTDKADLRLIYLALAHMIKFRGHFLIEGDLNPDNSDVDKLFIQLVQTYNQLFEENPINASGVDAKAILSARLSKSRRLENLIAQLPGEKKNGLFGNLIALSLGLTPNFKSNFDLAEDAKLQLSKDTYDDDLDNLLAQIGDQYADLFLAAKNLSDAILLSDILRVNTEITKAPLSASMIKRYDEHHQDLTLLKALVRQQLPEKYKEIFFDQSKNGYAGYIDGGASQEEFYKFIKPILEKMDGTEELLVKLNREDLLRKQRTFDNGSIPHQIHLGELHAILRRQEDFYPFLKDNREKIEKILTFRIPYYVGPLARGNSRFAWMTRKSEETITPWNFEEVVDKGASAQSFIERMTNFDKNLPNEKVLPKHSLLYEYFTVYNELTKVKYVTEGMRKPAFLSGEQKKAIVDLLFKTNRKVTVKQLKEDYFKKIECFDSVEISGVEDRFNASLGTYHDLLKIIKDKDFLDNEENEDILEDIVLTLTLFEDREMIEERLKTYAHLFDDKVMKQLKRRRYTGWGRLSRKLINGIRDKQSGKTILDFLKSDGFANRNFMQLIHDDSLTFKEDIQKAQVSGQGDSLHEHIANLAGSPAIKKGILQTVKVVDELVKVMGRHKPENIVIEMARENQTTQKGQKNSRERMKRIEEGIKELGSQILKEHPVENTQLQNEKLYLYYLQNGRDMYVDQELDINRLSDYDVDHIVPQSFLKDDSIDNKVLTRSDKARGKSDNVPSEEVVKKMKNYWRQLLNAKLITQRKFDNLTKAERGGLSELDKAGFIKRQLVETRQITKHVAQILDSRMNTKYDENDKLIREVKVITLKSKLVSDFRKDFQFYKVREINNYHHAHDAYLNAVVGTALIKKYPKLESEFVYGDYKVYDVRKMIAKSEQEIGKATAKYFFYSNIMNFFKTEITLANGEIRKRPLIETNGETGEIVWDKGRDFATVRKVLSMPQVNIVKKTEVQTGGFSKESILPKRNSDKLIARKKDWDPKKYGGFDSPTVAYSVLVVAKVEKGKSKKLKSVKELLGITIMERSSFEKNPIDFLEAKGYKEVKKDLIIKLPKYSLFELENGRKRMLASAGELQKGNELALPSKYVNFLYLASHYEKLKGSPEDNEQKQLFVEQHKHYLDEIIEQISEFSKRVILADANLDKVLSAYNKHRDKPIREQAENIIHLFTLTNLGAPAAFKYFDTTIDRKRYTSTKEVLDATLIHQSITGLYETRIDLSQLGGDGGEAAAKEAAAKEAAAKEAAAKGGTLNIEDEHRLHETSKEPDVSLGSTWLSDFPQAWAETGGMGLAVRQAPLIIPLKATSTPVSIKQYPMSQEARLGIKPHIQRLLDQGILVPCQSPWNTPLLPVKKPGTNDYRPVQDLREVNKRVEDIHPTVPNPYNLLSGLPPSHQWYTVLDLKDAFFCLRLHPTSQPLFAFEWRDPEMGISGQLTWTRLPQGFKNSPTLFDEALHRDLADFRIQHPDLILLQYVDDLLLAATSELDCQQGTRALLQTLGNLGYRASAKKAQICQKQVKYLGYLLKEGQRWLTEARKETVMGQPTPKTPRQLREFLGTAGFCRLWIPGFAEMAAPLYPLTKTGTLFNWGPDQQKAYQEIKQALLTAPALGLPDLTKPFELFVDEKQGYAKGVLTQKLGPWRRPVAYLSKKLDPVAAGWPPCLRMVAAIAVLTKDAGKLTMGQPLVILAPHAVEALVKQPPDRWLSNARMTHYQALLLDTDRVQFGPVVALNPATLLPLPEEGLQHNCLDILAEAHGTRPDLTDQPLPDADHTWYTDGSSLLQEGQRKAGAAVTTETEVIWAKALPAGTSAQRAELIALTQALKMAEGKKLNVYTDSRYAFATAHIHGEIYRRRGLLTSEGKEIKNKDEILALLKALFLPKRLSIIHCPGHQKGHSAEARGNRMADQAARKAAITETPDTSTLLAGKRTADGSEFEKRTADGSEFESPKKKAKVE

SEQ ID NO: 6412 - protein, 2099 aa, synthetic construct
MPAAKRVKLDGGDKKYSIGLDIGTNSVGWAVITDEYKVPSKKFKVLGNTDRHSIKKNLIGALLFDSGETAEATRLKRTARRRYTRRKNRICYLQEIFSNEMAKVDDSFFHRLEESFLVEEDKKHERHPIFGNIVDEVAYHEKYPTIYHLRKKLVDSTDKADLRLIYLALAHMIKFRGHFLIEGDLNPDNSDVDKLFIQLVQTYNQLFEENPINASGVDAKAILSARLSKSRRLENLIAQLPGEKKNGLFGNLIALSLGLTPNFKSNFDLAEDAKLQLSKDTYDDDLDNLLAQIGDQYADLFLAAKNLSDAILLSDILRVNTEITKAPLSASMIKRYDEHHQDLTLLKALVRQQLPEKYKEIFFDQSKNGYAGYIDGGASQEEFYKFIKPILEKMDGTEELLVKLNREDLLRKQRTFDNGSIPHQIHLGELHAILRRQEDFYPFLKDNREKIEKILTFRIPYYVGPLARGNSRFAWMTRKSEETITPWNFEEVVDKGASAQSFIERMTNFDKNLPNEKVLPKHSLLYEYFTVYNELTKVKYVTEGMRKPAFLSGEQKKAIVDLLFKTNRKVTVKQLKEDYFKKIECFDSVEISGVEDRFNASLGTYHDLLKIIKDKDFLDNEENEDILEDIVLTLTLFEDREMIEERLKTYAHLFDDKVMKQLKRRRYTGWGRLSRKLINGIRDKQSGKTILDFLKSDGFANRNFMQLIHDDSLTFKEDIQKAQVSGQGDSLHEHIANLAGSPAIKKGILQTVKVVDELVKVMGRHKPENIVIEMARENQTTQKGQKNSRERMKRIEEGIKELGSQILKEHPVENTQLQNEKLYLYYLQNGRDMYVDQELDINRLSDYDVDHIVPQSFLKDDSIDNKVLTRSDKARGKSDNVPSEEVVKKMKNYWRQLLNAKLITQRKFDNLTKAERGGLSELDKAGFIKRQLVETRQITKHVAQILDSRMNTKYDENDKLIREVKVITLKSKLVSDFRKDFQFYKVREINNYHHAHDAYLNAVVGTALIKKYPKLESEFVYGDYKVYDVRKMIAKSEQEIGKATAKYFFYSNIMNFFKTEITLANGEIRKRPLIETNGETGEIVWDKGRDFATVRKVLSMPQVNIVKKTEVQTGGFSKESILPKRNSDKLIARKKDWDPKKYGGFDSPTVAYSVLVVAKVEKGKSKKLKSVKELLGITIMERSSFEKNPIDFLEAKGYKEVKKDLIIKLPKYSLFELENGRKRMLASAGELQKGNELALPSKYVNFLYLASHYEKLKGSPEDNEQKQLFVEQHKHYLDEIIEQISEFSKRVILADANLDKVLSAYNKHRDKPIREQAENIIHLFTLTNLGAPAAFKYFDTTIDRKRYTSTKEVLDATLIHQSITGLYETRIDLSQLGGDGGEAAAKEAAAKEAAAKEAAAKGGTLQLDDEYRLYSPLVKPDQNIQFWLEQFPQAWAETAGMGLAKQVPPQVIQLKASATPVSVRQYPLSKEAQEGIRPHVQRLIQQGILVPVQSPWNTPLLPVRKPGTNDYRPVQDLREVNKRVQDIHPTVPNPYNLLCALPPQRSWYTVLDLKDAFFCLRLHPTSQPLFAFEWRDPGTGRTGQLTWTRLPQGFKNSPTIFDEALHRDLANFRIQHPQVTLLQYVDDLLLAGATKQDCLEGTKALLLELSDLGYRASAKKAQICRREVTYLGYSLRDGQRWLTEARKKTVVQIPAPTTAKQVREFLGTAGFCRLWIPGFATLAAPLYPLTKEKGEFSWAPEHQKAFDAIKKALLSAPALALPDVTKPFTLYVDERKGVARGVLTQTLGPWRRPVAYLSKKLDPVASGWPVCLKAIAAVAILVKDADKLTLGQNITVIAPHALENIVRQPPDRWMTNARMTHYQSLLLTERVTFAPPAALNPATLLPEETDEPVTHDCHQLLIEETGVRKDLTDIPLTGEVLTWFTDGSSYVVEGKRMAGAAVVDGTRTIWASSLPEGTSAQKAELMALTQALRLAEGKSINIYTDSRYAFATAHVHGAIYKQRGLLTSAGREIKNKEEILSLLEALHLPKRLAIIHCPGHQKAKDPISRGNQMADRVAKQAAQGVNLLAGKRTADGSEFEKRTADGSEFESPKKKAKVE

SEQ ID NO: 6413 - protein, 2099 aa, synthetic construct; identical to SEQ ID NO: 6412

SEQ ID NO: 6414 - protein, 2096 aa, synthetic construct
MPAAKRVKLDGGDKKYSIGLDIGTNSVGWAVITDEYKVPSKKFKVLGNTDRHSIKKNLIGALLFDSGETAEATRLKRTARRRYTRRKNRICYLQEIFSNEMAKVDDSFFHRLEESFLVEEDKKHERHPIFGNIVDEVAYHEKYPTIYHLRKKLVDSTDKADLRLIYLALAHMIKFRGHFLIEGDLNPDNSDVDKLFIQLVQTYNQLFEENPINASGVDAKAILSARLSKSRRLENLIAQLPGEKKNGLFGNLIALSLGLTPNFKSNFDLAEDAKLQLSKDTYDDDLDNLLAQIGDQYADLFLAAKNLSDAILLSDILRVNTEITKAPLSASMIKRYDEHHQDLTLLKALVRQQLPEKYKEIFFDQSKNGYAGYIDGGASQEEFYKFIKPILEKMDGTEELLVKLNREDLLRKQRTFDNGSIPHQIHLGELHAILRRQEDFYPFLKDNREKIEKILTFRIPYYVGPLARGNSRFAWMTRKSEETITPWNFEEVVDKGASAQSFIERMTNFDKNLPNEKVLPKHSLLYEYFTVYNELTKVKYVTEGMRKPAFLSGEQKKAIVDLLFKTNRKVTVKQLKEDYFKKIECFDSVEISGVEDRFNASLGTYHDLLKIIKDKDFLDNEENEDILEDIVLTLTLFEDREMIEERLKTYAHLFDDKVMKQLKRRRYTGWGRLSRKLINGIRDKQSGKTILDFLKSDGFANRNFMQLIHDDSLTFKEDIQKAQVSGQGDSLHEHIANLAGSPAIKKGILQTVKVVDELVKVMGRHKPENIVIEMARENQTTQKGQKNSRERMKRIEEGIKELGSQILKEHPVENTQLQNEKLYLYYLQNGRDMYVDQELDINRLSDYDVDHIVPQSFLKDDSIDNKVLTRSDKARGKSDNVPSEEVVKKMKNYWRQLLNAKLITQRKFDNLTKAERGGLSELDKAGFIKRQLVETRQITKHVAQILDSRMNTKYDENDKLIREVKVITLKSKLVSDFRKDFQFYKVREINNYHHAHDAYLNAVVGTALIKKYPKLESEFVYGDYKVYDVRKMIAKSEQEIGKATAKYFFYSNIMNFFKTEITLANGEIRKRPLIETNGETGEIVWDKGRDFATVRKVLSMPQVNIVKKTEVQTGGFSKESILPKRNSDKLIARKKDWDPKKYGGFDSPTVAYSVLVVAKVEKGKSKKLKSVKELLGITIMERSSFEKNPIDFLEAKGYKEVKKDLIIKLPKYSLFELENGRKRMLASAGELQKGNELALPSKYVNFLYLASHYEKLKGSPEDNEQKQLFVEQHKHYLDEIIEQISEFSKRVILADANLDKVLSAYNKHRDKPIREQAENIIHLFTLTNLGAPAAFKYFDTTIDRKRYTSTKEVLDATLIHQSITGLYETRIDLSQLGGDGGEAAAKEAAAKEAAAKEAAAKGGVPWLMKKPLQLTVLVPLHEYQERLLQQTALPKEQKELLQKLFLKYDALWQHWENQVGHRRIKPHNIATGTLAPRPQKQYPINPKAKPSIQIVIDDLLKQGVLIQQNSTMNTPVYPVPKPDGKWRMVLDYREVNKTIPLIAAQNQHSAGILSSIYRGKYKTTLDLTNGFWAHPITPESYWLTAFTWQGKQYCWTRLPQGFLNSPALFNADVVDLLKEIPNVQAYVDDIYISHDDPQEHLEQLEKIFSILLNAGYVVSLKKSEIAQREVEFLGFNITKEGRGLTDTFKQKLLNITPPKDLKQLQSILGKLNFARNFIPNYSELVKPLYTIVAPANGKFISWTEDNSNQLQHIISVLNQADNLEERNPETRLIIKVNSSPSAGYIRYYNEGSKRPIMYVNYIFSKAEAKFTQTEKLLTTMHKGLIKAMDLAMGQEILVYSPIVSMTKIQRTPLPERKALPVRWITWMTYLEDPRIQFHYDKSLPELQQIPNVTEDVIAKTKHPSEFAMVFYTDGSAIKHPDVNKSHSAGMGIAQVQFIPEYKIVHQWSIPLGDHTAQLAEIAAVEFACKKALKISGPVLIVTDSFYVAESANKELPYWKSNGFLNNKKKPLRHVSKWKSIAECLQLKPDIIIMHEKGHQQPMTTLHTEGNNLADKLATQGSYVVHAGKRTADGSEFEKRTADGSEFESPKKKAKVE

SEQ ID NO: 6415 - protein, 2185 aa, synthetic construct
MPAAKRVKLDGGDKKYSIGLDIGTNSVGWAVITDEYKVPSKKFKVLGNTDRHSIKKNLIGALLFDSGETAEATRLKRTARRRYTRRKNRICYLQEIFSNEMAKVDDSFFHRLEESFLVEEDKKHERHPIFGNIVDEVAYHEKYPTIYHLRKKLVDSTDKADLRLIYLALAHMIKFRGHFLIEGDLNPDNSDVDKLFIQLVQTYNQLFEENPINASGVDAKAILSARLSKSRRLENLIAQLPGEKKNGLFGNLIALSLGLTPNFKSNFDLAEDAKLQLSKDTYDDDLDNLLAQIGDQYADLFLAAKNLSDAILLSDILRVNTEITKAPLSASMIKRYDEHHQDLTLLKALVRQQLPEKYKEIFFDQSKNGYAGYIDGGASQEEFYKFIKPILEKMDGTEELLVKLNREDLLRKQRTFDNGSIPHQIHLGELHAILRRQEDFYPFLKDNREKIEKILTFRIPYYVGPLARGNSRFAWMTRKSEETITPWNFEEVVDKGASAQSFIERMTNFDKNLPNEKVLPKHSLLYEYFTVYNELTKVKYVTEGMRKPAFLSGEQKKAIVDLLFKTNRKVTVKQLKEDYFKKIECFDSVEISGVEDRFNASLGTYHDLLKIIKDKDFLDNEENEDILEDIVLTLTLFEDREMIEERLKTYAHLFDDKVMKQLKRRRYTGWGRLSRKLINGIRDKQSGKTILDFLKSDGFANRNFMQLIHDDSLTFKEDIQKAQVSGQGDSLHEHIANLAGSPAIKKGILQTVKVVDELVKVMGRHKPENIVIEMARENQTTQKGQKNSRERMKRIEEGIKELGSQILKEHPVENTQLQNEKLYLYYLQNGRDMYVDQELDINRLSDYDVDHIVPQSFLKDDSIDNKVLTRSDKARGKSDNVPSEEVVKKMKNYWRQLLNAKLITQRKFDNLTKAERGGLSELDKAGFIKRQLVETRQITKHVAQILDSRMNTKYDENDKLIREVKVITLKSKLVSDFRKDFQFYKVREINNYHHAHDAYLNAVVGTALIKKYPKLESEFVYGDYKVYDVRKMIAKSEQEIGKATAKYFFYSNIMNFFKTEITLANGEIRKRPLIETNGETGEIVWDKGRDFATVRKVLSMPQVNIVKKTEVQTGGFSKESILPKRNSDKLIARKKDWDPKKYGGFDSPTVAYSVLVVAKVEKGKSKKLKSVKELLGITIMERSSFEKNPIDFLEAKGYKEVKKDLIIKLPKYSLFELENGRKRMLASAGELQKGNELALPSKYVNFLYLASHYEKLKGSPEDNEQKQLFVEQHKHYLDEIIEQISEFSKRVILADANLDKVLSAYNKHRDKPIREQAENIIHLFTLTNLGAPAAFKYFDTTIDRKRYTSTKEVLDATLIHQSITGLYETRIDLSQLGGDGGEAAAKEAAAKEAAAKEAAAKGGMDPLQLLQPLEAEIKGTKLKAHWNSGATITCVPEAFLEDERPIQTMLIKTIHGEKQQDVYYLTFKVQGRKVEAEVLASPYDYILLNPSDVPWLMKKPLQLTVLVPLHEYQERLLQQTALPKEQKELLQKLFLKYDALWQHWENQVGHRRIKPHNIATGTLAPRPQKQYPINPKAKPSIQIVIDDLLKQGVLIQQNSTMNTPVYPVPKPDGKWRMVLDYREVNKTIPLIAAQNQHSAGILSSIYRGKYKTTLDLTNGFWAHPITPESYWLTAFTWQGKQYCWTRLPQGFLNSPALFNADVVDLLKEIPNVQAYVDDIYISHDDPQEHLEQLEKIFSILLNAGYVVSLKKSEIAQREVEFLGFNITKEGRGLTDTFKQKLLNITPPKDLKQLQSILGLLNFARNFIPNYSELVKPLYTIVAPANGKFISWTEDNSNQLQHIISVLNQADNLEERNPETRLIIKVNSSPSAGYIRYYNEGSKRPIMYVNYIFSKAEAKFTQTEKLLTTMHKGLIKAMDLAMGQEILVYSPIVSMTKIQRTPLPERKALPVRWITWMTYLEDPRIQFHYDKSLPELQQIPNVTEDVIAKTKHPSEFAMVFYTDGSAIKHPDVNKSHSAGMGIAQVQFIPEYKIVHQWSIPLGDHTAQLAEIAAVEFACKKALKISGPVLIVTDSFYVAESANKELPYWKSNGFLNNKKKPLRHVSKWKSIAECLQLKPDIIIMHEKGHQQPMTTLHTEGNNLADKLATQGSYVVHAGKRTADGSEFEKRTADGSEFESPKKKAKVE

SEQ ID NO: 6416 - protein, 2185 aa, synthetic construct
MPAAKRVKLDGGDKKYSIGLDIGTNSVGWAVITDEYKVPSKKFKVLGNTDRHSIKKNLIGALLFDSGETAEATRLKRTARRRYTRRKNRICYLQEIFSNEMAKVDDSFFHRLEESFLVEEDKKHERHPIFGNIVDEVAYHEKYPTIYHLRKKLVDSTDKADLRLIYLALAHMIKFRGHFLIEGDLNPDNSDVDKLFIQLVQTYNQLFEENPINASGVDAKAILSARLSKSRRLENLIAQLPGEKKNGLFGNLIALSLGLTPNFKSNFDLAEDAKLQLSKDTYDDDLDNLLAQIGDQYADLFLAAKNLSDAILLSDILRVNTEITKAPLSASMIKRYDEHHQDLTLLKALVRQQLPEKYKEIFFDQSKNGYAGYIDGGASQEEFYKFIKPILEKMDGTEELLVKLNREDLLRKQRTFDNGSIPHQIHLGELHAILRRQEDFYPFLKDNREKIEKILTFRIPYYVGPLARGNSRFAWMTRKSEETITPWNFEEVVDKGASAQSFIERMTNFDKNLPNEKVLPKHSLLYEYFTVYNELTKVKYVTEGMRKPAFLSGEQKKAIVDLLFKTNRKVTVKQLKEDYFKKIECFDSVEISGVEDRFNASLGTYHDLLKIIKDKDFLDNEENEDILEDIVLTLTLFEDREMIEERLKTYAHLFDDKVMKQLKRRRYTGWGRLSRKLINGIRDKQSGKTILDFLKSDGFANRNFMQLIHDDSLTFKEDIQKAQVSGQGDSLHEHIANLAGSPAIKKGILQTVKVVDELVKVMGRHKPENIVIEMARENQTTQKGQKNSRERMKRIEEGIKELGSQILKEHPVENTQLQNEKLYLYYLQNGRDMYVDQELDINRLSDYDVDHIVPQSFLKDDSIDNKVLTRSDKARGKSDNVPSEEVVKKMKNYWRQLLNAKLITQRKFDNLTKAERGGLSELDKAGFIKRQLVETRQITKHVAQILDSRMNTKYDENDKLIREVKVITLKSKLVSDFRKDFQFYKVREINNYHHAHDAYLNAVVGTALIKKYPKLESEFVYGDYKVYDVRKMIAKSEQEIGKATAKYFFYSNIMNFFKTEITLANGEIRKRPLIETNGETGEIVWDKGRDFATVRKVLSMPQVNIVKKTEVQTGGFSKESILPKRNSDKLIARKKDWDPKKYGGFDSPTVAYSVLVVAKVEKGKSKKLKSVKELLGITIMERSSFEKNPIDFLEAKGYKEVKKDLIIKLPKYSLFELENGRKRMLASAGELQKGNELALPSKYVNFLYLASHYEKLKGSPEDNEQKQLFVEQHKHYLDEIIEQISEFSKRVILADANLDKVLSAYNKHRDKPIREQAENIIHLFTLTNLGAPAAFKYFDTTIDRKRYTSTKEVLDATLIHQSITGLYETRIDLSQLGGDGGEAAAKEAAAKEAAAKEAAAKGGMDPLQLLQPLEAEIKGTKLKAHWNSGATITCVPEAFLEDERPIQTMLIKTIHGEKQQDVYYLTFKVQGRKVEAEVLASPYDYILLNPSDVPWLMKKPLQLTVLVPLHEYQERLLQQTALPKEQKELLQKLFLKYDALWQHWENQVGHRRIKPHNIATGTLAPRPQKQYPINPKAKPSIQIVIDDLLKQGVLIQQNSTMNTPVYPVPKPDGKWRMVLDYREVNKTIPLIAAQNQHSAGILSSIYRGKYKTTLDLTNGFWAHPITPESYWLTAFTWQGKQYCWTRLPQGFLNSPALFNADVVDLLKEIPNVQAYVDDIYISHDDPQEHLEQLEKIFSILLNAGYVVSLKKSEIAQREVEFLGFNITKEGRGLTDTFKQKLLNITPPKDLKQLQSILGKLNFARNFIPNYSELVKPLYTIVAPANGKFISWTEDNSNQLQHIISVLNQADNLEERNPETRLIIKVNSSPSAGYIRYYNEGSKRPIMYVNYIFSKAEAKFTQTEKLLTTMHKGLIKAMDLAMGQEILVYSPIVSMTKIQRTPLPERKALPVRWITWMTYLEDPRIQFHYDKSLPELQQIPNVTEDVIAKTKHPSEFAMVFYTDGSAIKHPDVNKSHSAGMGIAQVQFIPEYKIVHQWSIPLGDHTAQLAEIAAVEFACKKALKISGPVLIVTDSFYVAESANKELPYWKSNGFLNNKKKPLRHVSKWKSIAECLQLKPDIIIMHEKGHQQPMTTLHTEGNNLADKLATQGSYVVHAGKRTADGSEFEKRTADGSEFESPKKKAKVE

SEQ ID NO: 6417 - protein, 2185 aa, synthetic construct
MPAAKRVKLDGGDKKYSIGLDIGTNSVGWAVITDEYKVPSKKFKVLGNTDRHSIKKNLIGALLFDSGETAEATRLKRTARRRYTRRKNRICYLQEIFSNEMAKVDDSFFHRLEESFLVEEDKKHERHPIFGNIVDEVAYHEKYPTIYHLRKKLVDSTDKADLRLIYLALAHMIKFRGHFLIEGDLNPDNSDVDKLFIQLVQTYNQLFEENPINASGVDAKAILSARLSKSRRLENLIAQLPGEKKNGLFGNLIALSLGLTPNFKSNFDLAEDAKLQLSKDTYDDDLDNLLAQIGDQYADLFLAAKNLSDAILLSDILRVNTEITKAPLSASMIKRYDEHHQDLTLLKALVRQQLPEKYKEIFFDQSKNGYAGYIDGGASQEEFYKFIKPILEKMDGTEELLVKLNREDLLRKQRTFDNGSIPHQIHLGELHAILRRQEDFYPFLKDNREKIEKILTFRIPYYVGPLARGNSRFAWMTRKSEETITPWNFEEVVDKGASAQSFIERMTNFDKNLPNEKVLPKHSLLYEYFTVYNELTKVKYVTEGMRKPAFLSGEQKKAIVDLLFKTNRKVTVKQLKEDYFKKIECFDSVEISGVEDRFNASLGTYHDLLKIIKDKDFLDNEENEDILEDIVLTLTLFEDREMIEERLKTYAHLFDDKVMKQLKRRRYTGWGRLSRKLINGIRDKQSGKTILDFLKSDGFANRNFMQLIHDDSLTFKEDIQKAQVSGQGDSLHEHIANLAGSPAIKKGILQTVKVVDELVKVMGRHKPENIVIEMARENQTTQKGQKNSRERMKRIEEGIKELGSQILKEHPVENTQLQNEKLYLYYLQNGRDMYVDQELDINRLSDYDVDHIVPQSFLKDDSIDNKVLTRSDKARGKSDNVPSEEVVKKMKNYWRQLLNAKLITQRKFDNLTKAERGGLSELDKAGFIKRQLVETRQITKHVAQILDSRMNTKYDENDKLIREVKVITLKSKLVSDFRKDFQFYKVREINNYHHAHDAYLNAVVGTALIKKYPKLESEFVYGDYKVYDVRKMIAKSEQEIGKATAKYFFYSNIMNFFKTEITLANGEIRKRPLIETNGETGEIVWDKGRDFATVRKVLSMPQVNIVKKTEVQTGGFSKESILPKRNSDKLIARKKDWDPKKYGGFDSPTVAYSVLVVAKVEKGKSKKLKSVKELLGITIMERSSFEKNPIDFLEAKGYKEVKKDLIIKLPKYSLFELENGRKRMLASAGELQKGNELALPSKYVNFLYLASHYEKLKGSPEDNEQKQLFVEQHKHYLDEIIEQISEFSKRVILADANLDKVLSAYNKHRDKPIREQAENIIHLFTLTNLGAPAAFKYFDTTIDRKRYTSTKEVLDATLIHQSITGLYETRIDLSQLGGDGGEAAAKEAAAKEAAAKEAAAKGGMDPLQLLQPLEAEIKGTKLKAHWNSGATITCVPQAFLEEEVPIKNIWIKTIHGEKEQPVYYLTFKIQGRKVEAEVISSPYDYILVSPSDIPWLMKKPLQLTTLVPLQEYEERLLKQTMLTGSYKEKLQSLFLKYDALWQHWENQVGHRRIKPHHIATGTVNPRPQKQYPINPKAKASIQTVINDLLKQGVLIQQNSIMNTPVYPVPKPDGKWRMVLDYREVNKTIPLIAAQNQHSAGILSSIFRGKYKTTLDLSNGFWAHSITPESYWLTAFTWLGQQYCWTRLPQGFLNSPALFNADVVDLLKEVPNVQVYVDDIYISHDDPREHLEQLEKVFSLLLNAGYVVSLKKSEIAQHEVEFLGFNITKEGRGLTETFKQKLLNITPPRDLKQLQSILGLLNFARNFIPNFSELVKPLYNIIATAPGKYITWTTDNSQQLQNIISMLNSAENLEERNPEVRLIMKVNTSPSAGYIRFYNEFAKRPIMYLNYVYTKAEVKFTNTEKLLTTIHKGLIKALDLGMGQEILVYSPIVSMTKIQKTPLPERKALPIRWITWMSYLEDPRIQFHYDKTLPELQQVPTVTDDIIAKIKHPSEFSMVFYTDGSAIKHPNVNKSHNAGMGIAQVQFKPEFTVINTWSIPLGDHTAQLAEVAAVEFACKKALKIDGPVLIVTDSFYVAESVNKELPYWQSNGFFNNKKKPLKHVSKWKSIADCIQLKPDIIIIHEKGHQPTASTFHTEGNNLADKLATQGSYVVNAGKRTADGSEFEKRTADGSEFESPKKKAKVE

SEQ ID NO: 6418 - protein, 2185 aa, synthetic construct
MPAAKRVKLDGGDKKYSIGLDIGTNSVGWAVITDEYKVPSKKFKVLGNTDRHSIKKNLIGALLFDSGETAEATRLKRTARRRYTRRKNRICYLQEIFSNEMAKVDDSFFHRLEESFLVEEDKKHERHPIFGNIVDEVAYHEKYPTIYHLRKKLVDSTDKADLRLIYLALAHMIKFRGHFLIEGDLNPDNSDVDKLFIQLVQTYNQLFEENPINASGVDAKAILSARLSKSRRLENLIAQLPGEKKNGLFGNLIALSLGLTPNFKSNFDLAEDAKLQLSKDTYDDDLDNLLAQIGDQYADLFLAAKNLSDAILLSDILRVNTEITKAPLSASMIKRYDEHHQDLTLLKALVRQQLPEKYKEIFFDQSKNGYAGYIDGGASQEEFYKFIKPILEKMDGTEELLVKLNREDLLRKQRTFDNGSIPHQIHLGELHAILRRQEDFYPFLKDNREKIEKILTFRIPYYVGPLARGNSRFAWMTRKSEETITPWNFEEVVDKGASAQSFIERMTNFDKNLPNEKVLPKHSLLYEYFTVYNELTKVKYVTEGMRKPAFLSGEQKKAIVDLLFKTNRKVTVKQLKEDYFKKIECFDSVEISGVEDRFNASLGTYHDLLKIIKDKDFLDNEENEDILEDIVLTLTLFEDREMIEERLKTYAHLFDDKVMKQLKRRRYTGWGRLSRKLINGIRDKQSGKTILDFLKSDGFANRNFMQLIHDDSLTFKEDIQKAQVSGQGDSLHEHIANLAGSPAIKKGILQTVKVVDELVKVMGRHKPENIVIEMARENQTTQKGQKNSRERMKRIEEGIKELGSQILKEHPVENTQLQNEKLYLYYLQNGRDMYVDQELDINRLSDYDVDHIVPQSFLKDDSIDNKVLTRSDKARGKSDNVPSEEVVKKMKNYWRQLLNAKLITQRKFDNLTKAERGGLSELDKAGFIKRQLVETRQITKHVAQILDSRMNTKYDENDKLIREVKVITLKSKLVSDFRKDFQFYKVREINNYHHAHDAYLNAVVGTALIKKYPKLESEFVYGDYKVYDVRKMIAKSEQEIGKATAKYFFYSNIMNFFKTEITLANGEIRKRPLIETNGETGEIVWDKGRDFATVRKVLSMPQVNIVKKTEVQTGGFSKESILPKRNSDKLIARKKDWDPKKYGGFDSPTVAYSVLVVAKVEKGKSKKLKSVKELLGITIMERSSFEKNPIDFLEAKGYKEVKKDLIIKLPKYSLFELENGRKRMLASAGELQKGNELALPSKYVNFLYLASHYEKLKGSPEDNEQKQLFVEQHKHYLDEIIEQISEFSKRVILADANLDKVLSAYNKHRDKPIREQAENIIHLFTLTNLGAPAAFKYFDTTIDRKRYTSTKEVLDATLIHQSITGLYETRIDLSQLGGDGGEAAAKEAAAKEAAAKEAAAKGGMDPLQLLQPLEAEIKGTKLKAHWNSGATITCVPQAFLEEEVPIKNIWIKTIHGEKEQPVYYLTFKIQGRKVEAEVISSPYDYILVSPSDIPWLMKKPLQLTTLVPLQEYEERLLKQTMLTGSYKEKLQSLFLKYDALWQHWENQVGHRRIKPHHIATGTVNPRPQKQYPINPKAKASIQTVINDLLKQGVLIQQNSIMNTPVYPVPKPDGKWRMVLDYREVNKTIPLIAAQNQHSAGILSSIFRGKYKTTLDLSNGFWAHSITPESYWLTAFTWLGQQYCWTRLPQGFLNSPALFNADVVDLLKEVPNVQVYVDDIYISHDDPREHLEQLEKVFSLLLNAGYVVSLKKSEIAQHEVEFLGFNITKEGRGLTETFKQKLLNITPPRDLKQLQSILGKLNFARNFIPNFSELVKPLYNIIATAPGKYITWTTDNSQQLQNIISMLNSAENLEERNPEVRLIMKVNTSPSAGYIRFYNEFAKRPIMYLNYVYTKAEVKFTNTEKLLTTIHKGLIKALDLGMGQEILVYSPIVSMTKIQKTPLPERKALPIRWITWMSYLEDPRIQFHYDKTLPELQQVPTVTDDIIAKIKHPSEFSMVFYTDGSAIKHPNVNKSHNAGMGIAQVQFKPEFTVINTWSIPLGDHTAQLAEVAAVEFACKKALKIDGPVLIVTDSFYVAESVNKELPYWQSNGFFNNKKKPLKHVSKWKSIADCIQLKPDIIIIHEKGHQPTASTFHTEGNNLADKLATQGSYVVNAGKRTADGSEFEKRTADGSEFESPKKKAKVE

SEQ ID NO: 6419 - protein, 2105 aa, synthetic construct
MPAAKRVKLDGGDKKYSIGLDIGTNSVGWAVITDEYKVPSKKFKVLGNTDRHSIKKNLIGALLFDSGETAEATRLKRTARRRYTRRKNRICYLQEIFSNEMAKVDDSFFHRLEESFLVEEDKKHERHPIFGNIVDEVAYHEKYPTIYHLRKKLVDSTDKADLRLIYLALAHMIKFRGHFLIEGDLNPDNSDVDKLFIQLVQTYNQLFEENPINASGVDAKAILSARLSKSRRLENLIAQLPGEKKNGLFGNLIALSLGLTPNFKSNFDLAEDAKLQLSKDTYDDDLDNLLAQIGDQYADLFLAAKNLSDAILLSDILRVNTEITKAPLSASMIKRYDEHHQDLTLLKALVRQQLPEKYKEIFFDQSKNGYAGYIDGGASQEEFYKFIKPILEKMDGTEELLVKLNREDLLRKQRTFDNGSIPHQIHLGELHAILRRQEDFYPFLKDNREKIEKILTFRIPYYVGPLARGNSRFAWMTRKSEETITPWNFEEVVDKGASAQSFIERMTNFDKNLPNEKVLPKHSLLYEYFTVYNELTKVKYVTEGMRKPAFLSGEQKKAIVDLLFKTNRKVTVKQLKEDYFKKIECFDSVEISGVEDRFNASLGTYHDLLKIIKDKDFLDNEENEDILEDIVLTLTLFEDREMIEERLKTYAHLFDDKVMKQLKRRRYTGWGRLSRKLINGIRDKQSGKTILDFLKSDGFANRNFMQLIHDDSLTFKEDIQKAQVSGQGDSLHEHIANLAGSPAIKKGILQTVKVVDELVKVMGRHKPENIVIEMARENQTTQKGQKNSRERMKRIEEGIKELGSQILKEHPVENTQLQNEKLYLYYLQNGRDMYVDQELDINRLSDYDVDHIVPQSFLKDDSIDNKVLTRSDKARGKSDNVPSEEVVKKMKNYWRQLLNAKLITQRKFDNLTKAERGGLSELDKAGFIKRQLVETRQITKHVAQILDSRMNTKYDENDKLIREVKVITLKSKLVSDFRKDFQFYKVREINNYHHAHDAYLNAVVGTALIKKYPKLESEFVYGDYKVYDVRKMIAKSEQEIGKATAKYFFYSNIMNFFKTEITLANGEIRKRPLIETNGETGEIVWDKGRDFATVRKVLSMPQVNIVKKTEVQTGGFSKESILPKRNSDKLIARKKDWDPKKYGGFDSPTVAYSVLVVAKVEKGKSKKLKSVKELLGITIMERSSFEKNPIDFLEAKGYKEVKKDLIIKLPKYSLFELENGRKRMLASAGELQKGNELALPSKYVNFLYLASHYEKLKGSPEDNEQKQLFVEQHKHYLDEIIEQISEFSKRVILADANLDKVLSAYNKHRDKPIREQAENIIHLFTLTNLGAPAAFKYFDTTIDRKRYTSTKEVLDATLIHQSITGLYETRIDLSQLGGDGGEAAAKEAAAKEAAAKEAAAKGGTLNIEDEYRLHETSKEPDVPLGSTWLSDFPQAWAETGGMGLAVRQAPLIIPLKATSTPVSIKQYPMSQEARLGIKPHIQRLLDQGILVPCQSPWNTPLLPVKKPGTNDYRPVQDLREVNKRVEDIHPTVPNPYNLLSGLPPSHQWYTVLDLKDAFFCLRLHPTSQPLFAFEWRDPEMGISGQLTWTRLPQGFKNSPTLFDEALHRDLADFRIQHPDLILLQYVDDLLLAATSEQDCQRGTRALLQTLGNLGYRASAKKAQICQKQVKYLGYLLKEGQRWLTEARKETVMGQPTPKTPRQLREFLGTAGFCRLWIPGFAEMAAPLYPLTKTGTLFNWGPDQQKAYQEIKQALLTAPALGLPDLTKPFELFVDEKQGYAKGVLTQKLGPWRRPVAYLSKKLDPVAAGWPPCLRMVAAIAVLTKDAGKLTMGQPLVILAPHAVEALVKQPPDRWLSNARMTHYQAMLLDTDRVQFGPVVALNPATLLPLPEKEAPHDCLEILAETHGTRPDLTDQPIPDADYTWYTDGSSFLQEGQRRAGAAVTTETEVIWARALPAGTSAQRAELIALTQALKMAEGKKLNVYTDSRYAFATAHVHGEIYRRRGLLTSEGREIKNKNEILALLKALFLPKRLSIIHCPGHQKGNSAEARGNRMADQAAREAAMKAVLETSTLLAGKRTADGSEFEKRTADGSEFESPKKKAKVE

SEQ ID NO: 6420 - protein, 2112 aa, synthetic construct
MPAAKRVKLDGGDKKYSIGLDIGTNSVGWAVITDEYKVPSKKFKVLGNTDRHSIKKNLIGALLFDSGETAEATRLKRTARRRYTRRKNRICYLQEIFSNEMAKVDDSFFHRLEESFLVEEDKKHERHPIFGNIVDEVAYHEKYPTIYHLRKKLVDSTDKADLRLIYLALAHMIKFRGHFLIEGDLNPDNSDVDKLFIQLVQTYNQLFEENPINASGVDAKAILSARLSKSRRLENLIAQLPGEKKNGLFGNLIALSLGLTPNFKSNFDLAEDAKLQLSKDTYDDDLDNLLAQIGDQYADLFLAAKNLSDAILLSDILRVNTEITKAPLSASMIKRYDEHHQDLTLLKALVRQQLPEKYKEIFFDQSKNGYAGYIDGGASQEEFYKFIKPILEKMDGTEELLVKLNREDLLRKQRTFDNGSIPHQIHLGELHAILRRQEDFYPFLKDNREKIEKILTFRIPYYVGPLARGNSRFAWMTRKSEETITPWNFEEVVDKGASAQSFIERMTNFDKNLPNEKVLPKHSLLYEYFTVYNELTKVKYVTEGMRKPAFLSGEQKKAIVDLLFKTNRKVTVKQLKEDYFKKIECFDSVEISGVEDRFNASLGTYHDLLKIIKDKDFLDNEENEDILEDIVLTLTLFEDREMIEERLKTYAHLFDDKVMKQLKRRRYTGWGRLSRKLINGIRDKQSGKTILDFLKSDGFANRNFMQLIHDDSLTFKEDIQKAQVSGQGDSLHEHIANLAGSPAIKKGILQTVKVVDELVKVMGRHKPENIVIEMARENQTTQKGQKNSRERMKRIEEGIKELGSQILKEHPVENTQLQNEKLYLYYLQNGRDMYVDQELDINRLSDYDVDHIVPQSFLKDDSIDNKVLTRSDKARGKSDNVPSEEVVKKMKNYWRQLLNAKLITQRKFDNLTKAERGGLSELDKAGFIKRQLVETRQITKHVAQILDSRMNTKYDENDKLIREVKVITLKSKLVSDFRKDFQFYKVREINNYHHAHDAYLNAVVGTALIKKYPKLESEFVYGDYKVYDVRKMIAKSEQEIGKATAKYFFYSNIMNFFKTEITLANGEIRKRPLIETNGETGEIVWDKGRDFATVRKVLSMPQVNIVKKTEVQTGGFSKESILPKRNSDKLIARKKDWDPKKYGGFDSPTVAYSVLVVAKVEKGKSKKLKSVKELLGITIMERSSFEKNPIDFLEAKGYKEVKKDLIIKLPKYSLFELENGRKRMLASAGELQKGNELALPSKYVNFLYLASHYEKLKGSPEDNEQKQLFVEQHKHYLDEIIEQISEFSKRVILADANLDKVLSAYNKHRDKPIREQAENIIHLFTLTNLGAPAAFKYFDTTIDRKRYTSTKEVLDATLIHQSITGLYETRIDLSQLGGDGGEAAAKEAAAKEAAAKEAAAKEAAAKGGTAPLEEEYRLFLEAPIQNVTLLEQWKREIPKVWAEINPPGLASTQAPIHVQLLSTALPVRVRQYPITLEAKRSLRETIRKFRAAGILRPVHSPWNTPLLPVRKSGTSEYRMVQDLREVNKRVETIHPTVPNPYTLLSLLPPDRIWYSVLDLKDAFFCIPLAPESQLIFAFEWADAEEGESGQLTWTRLPQGFKNSPTLFDEALNRDLQGFRLDHPSVSLLQYVDDLLIAADTQAACLSATRDLLMTLAELGYRVSGKKAQLCQEEVTYLGFKIHKGSRSLSNSRTQAILQIPVPKTKRQVREFLGTIGYCRLWIPGFAELAQPLYAATRGGNDPLVWGEKEEEAFQSLKLALTQPPALALPSLDKPFQLFVEETSGAAKGVLTQALGPWKRPVAYLSKRLDPVAAGWPRCLRAIAAAALLTREASKLTFGQDIEITSSHNLESLLRSPPDKWLTNARITQYQVLLLDPPRVRFKQTAALNPATLLPETDDTLPIHHCLDTLDSLTSTRPDLTDQPLAQAEATLFTDGSSYIRDGKRYAGAAVVTLDSVIWAEPLPIGTSAQKAELIALTKALEWSKDKSVNIYTDSRYAFATLHVHGMIYRERGLLTAGGKAIKNAPEILALLTAVWLPKRVAVMHCKGHQKDDAPTSTGNRRADEVAREVAIRPLSTQATISAGKRTADGSEFEKRTADGSEFESPKKKAKVE

SEQ ID NO: 6421 - protein, 2112 aa, synthetic construct
MPAAKRVKLDGGDKKYSIGLDIGTNSVGWAVITDEYKVPSKKFKVLGNTDRHSIKKNLIGALLFDSGETAEATRLKRTARRRYTRRKNRICYLQEIFSNEMAKVDDSFFHRLEESFLVEEDKKHERHPIFGNIVDEVAYHEKYPTIYHLRKKLVDSTDKADLRLIYLALAHMIKFRGHFLIEGDLNPDNSDVDKLFIQLVQTYNQLFEENPINASGVDAKAILSARLSKSRRLENLIAQLPGEKKNGLFGNLIALSLGLTPNFKSNFDLAEDAKLQLSKDTYDDDLDNLLAQIGDQYADLFLAAKNLSDAILLSDILRVNTEITKAPLSASMIKRYDEHHQDLTLLKALVRQQLPEKYKEIFFDQSKNGYAGYIDGGASQEEFYKFIKPILEKMDGTEELLVKLNREDLLRKQRTFDNGSIPHQIHLGELHAILRRQEDFYPFLKDNREKIEKILTFRIPYYVGPLARGNSRFAWMTRKSEETITPWNFEEVVDKGASAQSFIERMTNFDKNLPNEKVLPKHSLLYEYFTVYNELTKVKYVTEGMRKPAFLSGEQKKAIVDLLFKTNRKVTVKQLKEDYFKKIECFDSVEISGVEDRFNASLGTYHDLLKIIKDKDFLDNEENEDILEDIVLTLTLFEDREMIEERLKTYAHLFDDKVMKQLKRRRYTGWGRLSRKLINGIRDKQSGKTILDFLKSDGFANRNFMQLIHDDSLTFKEDIQKAQVSGQGDSLHEHIANLAGSPAIKKGILQTVKVVDELVKVMGRHKPENIVIEMARENQTTQKGQKNSRERMKRIEEGIKELGSQILKEHPVENTQLQNEKLYLYYLQNGRDMYVDQELDINRLSDYDVDHIVPQSFLKDDSIDNKVLTRSDKARGKSDNVPSEEVVKKMKNYWRQLLNAKLITQRKFDNLTKAERGGLSELDKAGFIKRQLVETRQITKHVAQILDSRMNTKYDENDKLIREVKVITLKSKLVSDFRKDFQFYKVREINNYHHAHDAYLNAVVGTALIKKYPKLESEFVYGDYKVYDVRKMIAKSEQEIGKATAKYFFYSNIMNFFKTEITLANGEIRKRPLIETNGETGEIVWDKGRDFATVRKVLSMPQVNIVKKTEVQTGGFSKESILPKRNSDKLIARKKDWDPKKYGGFDSPTVAYSVLVVAKVEKGKSKKLKSVKELLGITIMERSSFEKNPIDFLEAKGYKEVKKDLIIKLPKYSLFELENGRKRMLASAGELQKGNELALPSKYVNFLYLASHYEKLKGSPEDNEQKQLFVEQHKHYLDEIIEQISEFSKRVILADANLDKVLSAYNKHRDKPIREQAENIIHLFTLTNLGAPAAFKYFDTTIDRKRYTSTKEVLDATLIHQSITGLYETRIDLSQLGGDGGEAAAKEAAAKEAAAKEAAAKEAAAKGGTAPLEEEYRLFLEAPIQNVTLLEQWKREIPKVWAEINPPGLASTQAPIHVQLLSTALPVRVRQYPITLEAKRSLRETIRKFRAAGILRPVHSPWNTPLLPVRKSGTSEYRMVQDLREVNKRVETIHPTVPNPYTLLSLLPPDRIWYSVLDLKDAFFCIPLAPESQLIFAFEWADAEEGESGQLTWTRLPQGFKNSPTLFNEALNRDLQGFRLDHPSVSLLQYVDDLLIAADTQAACLSATRDLLMTLAELGYRVSGKKAQLCQEEVTYLGFKIHKGSRSLSNSRTQAILQIPVPKTKRQVREFLGTIGYCRLWIPGFAELAQPLYAATRPGNDPLVWGEKEEEAFQSLKLALTQPPALALPSLDKPFQLFVEETSGAAKGVLTQALGPWKRPVAYLSKRLDPVAAGWPRCLRAIAAAALLTREASKLTFGQDIEITSSHNLESLLRSPPDKWLTNARITQYQVLLLDPPRVRFKQTAALNPATLLPETDDTLPIHHCLDTLDSLTSTRPDLTDQPLAQAEATLFTDGSSYIRDGKRYAGAAVVTLDSVIWAEPLPIGTSAQKAELIALTKALEWSKDKSVNIYTDSRYAFATLHVHGMIYRERGWLTAGGKAIKNAPEILALLTAVWLPKRVAVMHCKGHQKDDAPTSTGNRRADEVAREVAIRPLSTQATISAGKRTADGSEFEKRTADGSEFESPKKKAKVE

SEQ ID NO: 6422 - protein, 2187 aa, synthetic construct
MPAAKRVKLDGGDKKYSIGLDIGTNSVGWAVITDEYKVPSKKFKVLGNTDRHSIKKNLIGALLFDSGETAEATRLKRTARRRYTRRKNRICYLQEIFSNEMAKVDDSFFHRLEESFLVEEDKKHERHPIFGNIVDEVAYHEKYPTIYHLRKKLVDSTDKADLRLIYLALAHMIKFRGHFLIEGDLNPDNSDVDKLFIQLVQTYNQLFEENPINASGVDAKAILSARLSKSRRLENLIAQLPGEKKNGLFGNLIALSLGLTPNFKSNFDLAEDAKLQLSKDTYDDDLDNLLAQIGDQYADLFLAAKNLSDAILLSDILRVNTEITKAPLSASMIKRYDEHHQDLTLLKALVRQQLPEKYKEIFFDQSKNGYAGYIDGGASQEEFYKFIKPILEKMDGTEELLVKLNREDLLRKQRTFDNGSIPHQIHLGELHAILRRQEDFYPFLKDNREKIEKILTFRIPYYVGPLARGNSRFAWMTRKSEETITPWNFEEVVDKGASAQSFIERMTNFDKNLPNEKVLPKHSLLYEYFTVYNELTKVKYVTEGMRKPAFLSGEQKKAIVDLLFKTNRKVTVKQLKEDYFKKIECFDSVEISGVEDRFNASLGTYHDLLKIIKDKDFLDNEENEDILEDIVLTLTLFEDREMIEERLKTYAHLFDDKVMKQLKRRRYTGWGRLSRKLINGIRDKQSGKTILDFLKSDGFANRNFMQLIHDDSLTFKEDIQKAQVSGQGDSLHEHIANLAGSPAIKKGILQTVKVVDELVKVMGRHKPENIVIEMARENQTTQKGQKNSRERMKRIEEGIKELGSQILKEHPVENTQLQNEKLYLYYLQNGRDMYVDQELDINRLSDYDVDHIVPQSFLKDDSIDNKVLTRSDKARGKSDNVPSEEVVKKMKNYWRQLLNAKLITQRKFDNLTKAERGGLSELDKAGFIKRQLVETRQITKHVAQILDSRMNTKYDENDKLIREVKVITLKSKLVSDFRKDFQFYKVREINNYHHAHDAYLNAVVGTALIKKYPKLESEFVYGDYKVYDVRKMIAKSEQEIGKATAKYFFYSNIMNFFKTEITLANGEIRKRPLIETNGETGEIVWDKGRDFATVRKVLSMPQVNIVKKTEVQTGGFSKESILPKRNSDKLIARKKDWDPKKYGGFDSPTVAYSVLVVAKVEKGKSKKLKSVKELLGITIMERSSFEKNPIDFLEAKGYKEVKKDLIIKLPKYSLFELENGRKRMLASAGELQKGNELALPSKYVNFLYLASHYEKLKGSPEDNEQKQLFVEQHKHYLDEIIEQISEFSKRVILADANLDKVLSAYNKHRDKPIREQAENIIHLFTLTNLGAPAAFKYFDTTIDRKRYTSTKEVLDATLIHQSITGLYETRIDLSQLGGDGGEAAAKEAAAKEAAAKEAAAKEAAAKGGMDLLKPLTVERKGVKIKGYWNSQADITCVPKDLLQGEEPVRQQNVTTIHGTQEGDVYYVNLKIDGRRINTEVIGTTLDYAIITPGDVPWILKKPLELTIKLDLEEQQGTLLNNSILSKKGKEELKQLFEKYSALWQSWENQVGHRRIRPHKIATGTVKPTPQKQYHINPKAKPDIQIVINDLLKQGVLIQKESTMNTPVYPVPKPNGRWRMVLDYRAVNKVTPLIAVQNQHSYGILGSLFKGRYKTTIDLSNGFWAHPIVPEDYWITAFTWQGKQYCWTVLPQGFLNSPGLFTGDVVDLLQGIPNVEVYVDDVYISHDSEKEHLEYLDILFNRLKEAGYIISLKKSNIANSIVDFLGFQITNEGRGLTDTFKEKLENITAPTTLKQLQSILGLLNFARNFIPDFTELIAPLYALIPKSTKNYVPWQIEHSTTLETLITKLNGAEYLQGRKGDKTLIMKVNASYTTGYIRYYNEGEKKPISYVSIVFSKTELKFTELEKLLTTVHKGLLKALDLSMGQNIHVYSPIVSMQNIQKTPQTAKKALASRWLSWLSYLEDPRIRFFYDPQMPALKDLPAVDTGKDNKKHPSNFQHIFYTDGSAITSPTKEGHLNAGMGIVYFINKDGNLQKQQEWSISLGNHTAQFAEIAAFEFALKKCLPLGGNILVVTDSNYVAKAYNEELDVWASNGFVNNRKKPLKHISKWKSVADLKRLRPDVVVTHEPGHQKLDSSPHAYGNNLADQLATQASFKVHAGKRTADGSEFEKRTADGSEFESPKKKAKVE

SEQ ID NO: 6423 - protein, 2101 aa, synthetic construct
MPAAKRVKLDGGDKKYSIGLDIGTNSVGWAVITDEYKVPSKKFKVLGNTDRHSIKKNLIGALLFDSGETAEATRLKRTARRRYTRRKNRICYLQEIFSNEMAKVDDSFFHRLEESFLVEEDKKHERHPIFGNIVDEVAYHEKYPTIYHLRKKLVDSTDKADLRLIYLALAHMIKFRGHFLIEGDLNPDNSDVDKLFIQLVQTYNQLFEENPINASGVDAKAILSARLSKSRRLENLIAQLPGEKKNGLFGNLIALSLGLTPNFKSNFDLAEDAKLQLSKDTYDDDLDNLLAQIGDQYADLFLAAKNLSDAILLSDILRVNTEITKAPLSASMIKRYDEHHQDLTLLKALVRQQLPEKYKEIFFDQSKNGYAGYIDGGASQEEFYKFIKPILEKMDGTEELLVKLNREDLLRKQRTFDNGSIPHQIHLGELHAILRRQEDFYPFLKDNREKIEKILTFRIPYYVGPLARGNSRFAWMTRKSEETITPWNFEEVVDKGASAQSFIERMTNFDKNLPNEKVLPKHSLLYEYFTVYNELTKVKYVTEGMRKPAFLSGEQKKAIVDLLFKTNRKVTVKQLKEDYFKKIECFDSVEISGVEDRFNASLGTYHDLLKIIKDKDFLDNEENEDILEDIVLTLTLFEDREMIEERLKTYAHLFDDKVMKQLKRRRYTGWGRLSRKLINGIRDKQSGKTILDFLKSDGFANRNFMQLIHDDSLTFKEDIQKAQVSGQGDSLHEHIANLAGSPAIKKGILQTVKVVDELVKVMGRHKPENIVIEMARENQTTQKGQKNSRERMKRIEEGIKELGSQILKEHPVENTQLQNEKLYLYYLQNGRDMYVDQELDINRLSDYDVDHIVPQSFLKDDSIDNKVLTRSDKARGKSDNVPSEEVVKKMKNYWRQLLNAKLITQRKFDNLTKAERGGLSELDKAGFIKRQLVETRQITKHVAQILDSRMNTKYDENDKLIREVKVITLKSKLVSDFRKDFQFYKVREINNYHHAHDAYLNAVVGTALIKKYPKLESEFVYGDYKVYDVRKMIAKSEQEIGKATAKYFFYSNIMNFFKTEITLANGEIRKRPLIETNGETGEIVWDKGRDFATVRKVLSMPQVNIVKKTEVQTGGFSKESILPKRNSDKLIARKKDWDPKKYGGFDSPTVAYSVLVVAKVEKGKSKKLKSVKELLGITIMERSSFEKNPIDFLEAKGYKEVKKDLIIKLPKYSLFELENGRKRMLASAGELQKGNELALPSKYVNFLYLASHYEKLKGSPEDNEQKQLFVEQHKHYLDEIIEQISEFSKRVILADANLDKVLSAYNKHRDKPIREQAENIIHLFTLTNLGAPAAFKYFDTTIDRKRYTSTKEVLDATLIHQSITGLYETRIDLSQLGGDGGEAAAKEAAAKEAAAKEAAAKEAAAKGGVPWILKKPLELTIKLDLEEQQGTLLNNSILSKKGKEELKQLFEKYSALWQSWENQVGHRRIRPHKIATGTVKPTPQKQYHINPKAKPDIQIVINDLLKQGVLIQKESTMNTPVYPVPKPNGRWRMVLDYRAVNKVTPLIAVQNQHSYGILGSLFKGRYKTTIDLSNGFWAHPIVPEDYWITAFTWQGKQYCWTVLPQGFLNSPGLFTGDVVDLLQGIPNVEVYVDDVYISHDSEKEHLEYLDILFNRLKEAGYIISLKKSNIANSIVDFLGFQITNEGRGLTDTFKEKLENITAPTTLKQLQSILGLLNFARNFIPDFTELIAPLYALIPKSTKNYVPWQIEHSTTLETLITKLNGAEYLQGRKGDKTLIMKVNASYTTGYIRYYNEGEKKPISYVSIVFSKTELKFTELEKLLTTVHKGLLKALDLSMGQNIHVYSPIVSMQNIQKTPQTAKKALASRWLSWLSYLEDPRIRFFYDPQMPALKDLPAVDTGKDNKKHPSNFQHIFYTDGSAITSPTKEGHLNAGMGIVYFINKDGNLQKQQEWSISLGNHTAQFAEIAAFEFALKKCLPLGGNILVVTDSNYVAKAYNEELDVWASNGFVNNRKKPLKHISKWKSVADLKRLRPDVVVTHEPGHQKLDSSPHAYGNNLADQLATQASFKVHAGKRTADGSEFEKRTADGSEFESPKKKAKVE

SEQ ID NO: 6424 - protein, 2101 aa, synthetic construct
MPAAKRVKLDGGDKKYSIGLDIGTNSVGWAVITDEYKVPSKKFKVLGNTDRHSIKKNLIGALLFDSGETAEATRLKRTARRRYTRRKNRICYLQEIFSNEMAKVDDSFFHRLEESFLVEEDKKHERHPIFGNIVDEVAYHEKYPTIYHLRKKLVDSTDKADLRLIYLALAHMIKFRGHFLIEGDLNPDNSDVDKLFIQLVQTYNQLFEENPINASGVDAKAILSARLSKSRRLENLIAQLPGEKKNGLFGNLIALSLGLTPNFKSNFDLAEDAKLQLSKDTYDDDLDNLLAQIGDQYADLFLAAKNLSDAILLSDILRVNTEITKAPLSASMIKRYDEHHQDLTLLKALVRQQLPEKYKEIFFDQSKNGYAGYIDGGASQEEFYKFIKPILEKMDGTEELLVKLNREDLLRKQRTFDNGSIPHQIHLGELHAILRRQEDFYPFLKDNREKIEKILTFRIPYYVGPLARGNSRFAWMTRKSEETITPWNFEEVVDKGASAQSFIERMTNFDKNLPNEKVLPKHSLLYEYFTVYNELTKVKYVTEGMRKPAFLSGEQKKAIVDLLFKTNRKVTVKQLKEDYFKKIECFDSVEISGVEDRFNASLGTYHDLLKIIKDKDFLDNEENEDILEDIVLTLTLFEDREMIEERLKTYAHLFDDKVMKQLKRRRYTGWGRLSRKLINGIRDKQSGKTILDFLKSDGFANRNFMQLIHDDSLTFKEDIQKAQVSGQGDSLHEHIANLAGSPAIKKGILQTVKVVDELVKVMGRHKPENIVIEMARENQTTQKGQKNSRERMKRIEEGIKELGSQILKEHPVENTQLQNEKLYLYYLQNGRDMYVDQELDINRLSDYDVDHIVPQSFLKDDSIDNKVLTRSDKARGKSDNVPSEEVVKKMKNYWRQLLNAKLITQRKFDNLTKAERGGLSELDKAGFIKRQLVETRQITKHVAQILDSRMNTKYDENDKLIREVKVITLKSKLVSDFRKDFQFYKVREINNYHHAHDAYLNAVVGTALIKKYPKLESEFVYGDYKVYDVRKMIAKSEQEIGKATAKYFFYSNIMNFFKTEITLANGEIRKRPLIETNGETGEIVWDKGRDFATVRKVLSMPQVNIVKKTEVQTGGFSKESILPKRNSDKLIARKKDWDPKKYGGFDSPTVAYSVLVVAKVEKGKSKKLKSVKELLGITIMERSSFEKNPIDFLEAKGYKEVKKDLIIKLPKYSLFELENGRKRMLASAGELQKGNELALPSKYVNFLYLASHYEKLKGSPEDNEQKQLFVEQHKHYLDEIIEQISEFSKRVILADANLDKVLSAYNKHRDKPIREQAENIIHLFTLTNLGAPAAFKYFDTTIDRKRYTSTKEVLDATLIHQSITGLYETRIDLSQLGGDGGEAAAKEAAAKEAAAKEAAAKEAAAKGGVPWILKKPLELTIKLDLEEQQGTLLNNSILSKKGKEELKQLFEKYSALWQSWENQVGHRRIRPHKIATGTVKPTPQKQYHINPKAKPDIQIVINDLLKQGVLIQKESTMNTPVYPVPKPNGRWRMVLDYRAVNKVTPLIAVQNQHSYGILGSLFKGRYKTTIDLSNGFWAHPIVPEDYWITAFTWQGKQYCWTVLPQGFLNSPGLFNGDVVDLLQGIPNVEVYVDDVYISHDSEKEHLEYLDILFNRLKEAGYIISLKKSNIANSIVDFLGFQITNEGRGLTDTFKEKLENITAPTTLKQLQSILGLLNFARNFIPDFTELIAPLYALIPKSPKNYVPWQIEHSTTLETLITKLNGAEYLQGRKGDKTLIMKVNASYTTGYIRYYNEGEKKPISYVSIVFSKTELKFTELEKLLTTVHKGLLKALDLSMGQNIHVYSPIVSMQNIQKTPQTAKKALASRWLSWLSYLEDPRIRFFYDPQMPALKDLPAVDTGKDNKKHPSNFQHIFYTDGSAITSPTKEGHLNAGMGIVYFINKDGNLQKQQEWSISLGNHTAQFAEIAAFEFALKKCLPLGGNILVVTDSNYVAKAYNEELDVWASNGFVNNRKKPLKHISKWKSVADLKRLRPDVVVTHEPGHQKLDSSPHAYGNNLADQLATQASFKVHAGKRTADGSEFEKRTADGSEFESPKKKAKVE

SEQ ID NO: 6425 - protein, 2109 aa, synthetic construct
MPAAKRVKLDGGDKKYSIGLDIGTNSVGWAVITDEYKVPSKKFKVLGNTDRHSIKKNLIGALLFDSGETAEATRLKRTARRRYTRRKNRICYLQEIFSNEMAKVDDSFFHRLEESFLVEEDKKHERHPIFGNIVDEVAYHEKYPTIYHLRKKLVDSTDKADLRLIYLALAHMIKFRGHFLIEGDLNPDNSDVDKLFIQLVQTYNQLFEENPINASGVDAKAILSARLSKSRRLENLIAQLPGEKKNGLFGNLIALSLGLTPNFKSNFDLAEDAKLQLSKDTYDDDLDNLLAQIGDQYADLFLAAKNLSDAILLSDILRVNTEITKAPLSASMIKRYDEHHQDLTLLKALVRQQLPEKYKEIFFDQSKNGYAGYIDGGASQEEFYKFIKPILEKMDGTEELLVKLNREDLLRKQRTFDNGSIPHQIHLGELHAILRRQEDFYPFLKDNREKIEKILTFRIPYYVGPLARGNSRFAWMTRKSEETITPWNFEEVVDKGASAQSFIERMTNFDKNLPNEKVLPKHSLLYEYFTVYNELTKVKYVTEGMRKPAFLSGEQKKAIVDLLFKTNRKVTVKQLKEDYFKKIECFDSVEISGVEDRFNASLGTYHDLLKIIKDKDFLDNEENEDILEDIVLTLTLFEDREMIEERLKTYAHLFDDKVMKQLKRRRYTGWGRLSRKLINGIRDKQSGKTILDFLKSDGFANRNFMQLIHDDSLTFKEDIQKAQVSGQGDSLHEHIANLAGSPAIKKGILQTVKVVDELVKVMGRHKPENIVIEMARENQTTQKGQKNSRERMKRIEEGIKELGSQILKEHPVENTQLQNEKLYLYYLQNGRDMYVDQELDINRLSDYDVDHIVPQSFLKDDSIDNKVLTRSDKARGKSDNVPSEEVVKKMKNYWRQLLNAKLITQRKFDNLTKAERGGLSELDKAGFIKRQLVETRQITKHVAQILDSRMNTKYDENDKLIREVKVITLKSKLVSDFRKDFQFYKVREINNYHHAHDAYLNAVVGTALIKKYPKLESEFVYGDYKVYDVRKMIAKSEQEIGKATAKYFFYSNIMNFFKTEITLANGEIRKRPLIETNGETGEIVWDKGRDFATVRKVLSMPQVNIVKKTEVQTGGFSKESILPKRNSDKLIARKKDWDPKKYGGFDSPTVAYSVLVVAKVEKGKSKKLKSVKELLGITIMERSSFEKNPIDFLEAKGYKEVKKDLIIKLPKYSLFELENGRKRMLASAGELQKGNELALPSKYVNFLYLASHYEKLKGSPEDNEQKQLFVEQHKHYLDEIIEQISEFSKRVILADANLDKVLSAYNKHRDKPIREQAENIIHLFTLTNLGAPAAFKYFDTTIDRKRYTSTKEVLDATLIHQSITGLYETRIDLSQLGGDGGEAAAKEAAAKEAAAKEAAAKEAAAKGGTLQLEEEYRLFEPESTQKQEMDIWLKNFPQAWAETGGMGTAHCQAPVLIQLKATATPISIRQYPMPHEAYQGIKPHIRRMLDQGILKPCQSPWNTPLLPVKKPGTEDYRPVQDLREVNKRVEDIHPTVPNPYNLLSTLPPSHPWYTVLDLKDAFFCLRLHSESQLLFAFEWRDPEIGLSGQLTWTRLPQGFKNSPTLFNEALHSDLADFRVRYPALVLLQYVDDLLLAAATRTECLEGTKALLETLGNKGYRASAKKAQICLQEVTYLGYSLKDGQRWLTKARKEAILSIPVPKNSRQVREFLGKAGYCRLFIPGFAELAAPLYPLTRPGTLFQWGTEQQLAFEDIKKALLSSPALGLPDITKPFELFIDENSGFAKGVLVQKLGPWKRPVAYLSKKLDTVASGWPPCLRMVAAIAILVKDAGKLTLGQPLTILTSHPVEALVRQPPNKWLSNARMTHYQAMLLDAERVHFGPTVSLNPATLLPLPSGGNHHDCLQILAETHGTRPDLTDQPLPDADLTWYTDGSSFIRNGEREAGAAVTTESEVIWAAPLPPGTSAQRAELIALTQALKMAEGKKLTVYTDSRYAFATTHVHGEIYRRRGWLTSEGKEIKNKNEILALLEALFLPKRLSIIHCPGHQKGDSPQAKGNRLADDTAKKAATETHSSLTVLPAGKRTADGSEFEKRTADGSEFESPKKKAKVE

SEQ ID NO: 6426 - protein, 2101 aa, synthetic construct
MPAAKRVKLDGGDKKYSIGLDIGTNSVGWAVITDEYKVPSKKFKVLGNTDRHSIKKNLIGALLFDSGETAEATRLKRTARRRYTRRKNRICYLQEIFSNEMAKVDDSFFHRLEESFLVEEDKKHERHPIFGNIVDEVAYHEKYPTIYHLRKKLVDSTDKADLRLIYLALAHMIKFRGHFLIEGDLNPDNSDVDKLFIQLVQTYNQLFEENPINASGVDAKAILSARLSKSRRLENLIAQLPGEKKNGLFGNLIALSLGLTPNFKSNFDLAEDAKLQLSKDTYDDDLDNLLAQIGDQYADLFLAAKNLSDAILLSDILRVNTEITKAPLSASMIKRYDEHHQDLTLLKALVRQQLPEKYKEIFFDQSKNGYAGYIDGGASQEEFYKFIKPILEKMDGTEELLVKLNREDLLRKQRTFDNGSIPHQIHLGELHAILRRQEDFYPFLKDNREKIEKILTFRIPYYVGPLARGNSRFAWMTRKSEETITPWNFEEVVDKGASAQSFIERMTNFDKNLPNEKVLPKHSLLYEYFTVYNELTKVKYVTEGMRKPAFLSGEQKKAIVDLLFKTNRKVTVKQLKEDYFKKIECFDSVEISGVEDRFNASLGTYHDLLKIIKDKDFLDNEENEDILEDIVLTLTLFEDREMIEERLKTYAHLFDDKVMKQLKRRRYTGWGRLSRKLINGIRDKQSGKTILDFLKSDGFANRNFMQLIHDDSLTFKEDIQKAQVSGQGDSLHEHIANLAGSPAIKKGILQTVKVVDELVKVMGRHKPENIVIEMARENQTTQKGQKNSRERMKRIEEGIKELGSQILKEHPVENTQLQNEKLYLYYLQNGRDMYVDQELDINRLSDYDVDHIVPQSFLKDDSIDNKVLTRSDKARGKSDNVPSEEVVKKMKNYWRQLLNAKLITQRKFDNLTKAERGGLSELDKAGFIKRQLVETRQITKHVAQILDSRMNTKYDENDKLIREVKVITLKSKLVSDFRKDFQFYKVREINNYHHAHDAYLNAVVGTALIKKYPKLESEFVYGDYKVYDVRKMIAKSEQEIGKATAKYFFYSNIMNFFKTEITLANGEIRKRPLIETNGETGEIVWDKGRDFATVRKVLSMPQVNIVKKTEVQTGGFSKESILPKRNSDKLIARKKDWDPKKYGGFDSPTVAYSVLVVAKVEKGKSKKLKSVKELLGITIMERSSFEKNPIDFLEAKGYKEVKKDLIIKLPKYSLFELENGRKRMLASAGELQKGNELALPSKYVNFLYLASHYEKLKGSPEDNEQKQLFVEQHKHYLDEIIEQISEFSKRVILADANLDKVLSAYNKHRDKPIREQAENIIHLFTLTNLGAPAAFKYFDTTIDRKRYTSTKEVLDATLIHQSITGLYETRIDLSQLGGDGGEAAAKEAAAKEAAAKEAAAKEAAAKGGVPWLTQQPLQLTILVPLQEYQEKILSKTALPEDQKQQLKTLFVKYDNLWQHWENQVGHRKIRPHNIATGDYPPRPQKQYPINPKAKPSIQIVIDDLLKQGVLTPQNSTMNTPVYPVPKPDGRWRMVLDYREVNKTIPLTAAQNQHSAGILATIVRQKYKTTLDLANGFWAHPITPESYWLTAFTWQGKQYCWTRLPQGFLNSPALFNADVVDLLKEIPNVQVYVDDIYLSHDDPKEHVQQLEKVFQILLQAGYVVSLKKSEIGQKTVEFLGFNITKEGRGLTDTFKTKLLNITPPKDLKQLQSILGLLNFARNFIPNFAELVQPLYNLIAPAKGKYIEWSEENTKQLNMVIEALNTASNLEERLPEQRLVIKVNTSPSAGYVRYYNETGKKPIMYLNYVFSKAELKFSMLEKLLTTMHKALIKAMDLAMGQEILVYSPIVSMTKIQKTPLPERKALPIRWITWMTYLEDPRIQFHYDKTLPELKHIPDVYTSSQSPVKHPSQYEGVFYTDGSAIKSPDPTKSNNAGMGIVHATYKPEYQVLNQWSIPLGNHTAQMAEIAAVEFACKKALKIPGPVLVITDSFYVAESANKELPYWKSNGFVNNKKKPLKHISKWKSIAECLSMKPDITIQHEKGISLQIPVFILKGNALADKLATQGSYVVNAGKRTADGSEFEKRTADGSEFESPKKKAKVE

SEQ ID NO: 6427 - protein, 2101 aa, synthetic construct
MPAAKRVKLDGGDKKYSIGLDIGTNSVGWAVITDEYKVPSKKFKVLGNTDRHSIKKNLIGALLFDSGETAEATRLKRTARRRYTRRKNRICYLQEIFSNEMAKVDDSFFHRLEESFLVEEDKKHERHPIFGNIVDEVAYHEKYPTIYHLRKKLVDSTDKADLRLIYLALAHMIKFRGHFLIEGDLNPDNSDVDKLFIQLVQTYNQLFEENPINASGVDAKAILSARLSKSRRLENLIAQLPGEKKNGLFGNLIALSLGLTPNFKSNFDLAEDAKLQLSKDTYDDDLDNLLAQIGDQYADLFLAAKNLSDAILLSDILRVNTEITKAPLSASMIKRYDEHHQDLTLLKALVRQQLPEKYKEIFFDQSKNGYAGYIDGGASQEEFYKFIKPILEKMDGTEELLVKLNREDLLRKQRTFDNGSIPHQIHLGELHAILRRQEDFYPFLKDNREKIEKILTFRIPYYVGPLARGNSRFAWMTRKSEETITPWNFEEVVDKGASAQSFIERMTNFDKNLPNEKVLPKHSLLYEYFTVYNELTKVKYVTEGMRKPAFLSGEQKKAIVDLLFKTNRKVTVKQLKEDYFKKIECFDSVEISGVEDRFNASLGTYHDLLKIIKDKDFLDNEENEDILEDIVLTLTLFEDREMIEERLKTYAHLFDDKVMKQLKRRRYTGWGRLSRKLINGIRDKQSGKTILDFLKSDGFANRNFMQLIHDDSLTFKEDIQKAQVSGQGDSLHEHIANLAGSPAIKKGILQTVKVVDELVKVMGRHKPENIVIEMARENQTTQKGQKNSRERMKRIEEGIKELGSQILKEHPVENTQLQNEKLYLYYLQNGRDMYVDQELDINRLSDYDVDHIVPQSFLKDDSIDNKVLTRSDKARGKSDNVPSEEVVKKMKNYWRQLLNAKLITQRKFDNLTKAERGGLSELDKAGFIKRQLVETRQITKHVAQILDSRMNTKYDENDKLIREVKVITLKSKLVSDFRKDFQFYKVREINNYHHAHDAYLNAVVGTALIKKYPKLESEFVYGDYKVYDVRKMIAKSEQEIGKATAKYFFYSNIMNFFKTEITLANGEIRKRPLIETNGETGEIVWDKGRDFATVRKVLSMPQVNIVKKTEVQTGGFSKESILPKRNSDKLIARKKDWDPKKYGGFDSPTVAYSVLVVAKVEKGKSKKLKSVKELLGITIMERSSFEKNPIDFLEAKGYKEVKKDLIIKLPKYSLFELENGRKRMLASAGELQKGNELALPSKYVNFLYLASHYEKLKGSPEDNEQKQLFVEQHKHYLDEIIEQISEFSKRVILADANLDKVLSAYNKHRDKPIREQAENIIHLFTLTNLGAPAAFKYFDTTIDRKRYTSTKEVLDATLIHQSITGLYETRIDLSQLGGDGGEAAAKEAAAKEAAAKEAAAKEAAAKGGVPWLTQQPLQLTILVPLQEYQEKILSKTALPEDQKQQLKTLFVKYDNLWQHWENQVGHRKIRPHNIATGDYPPRPQKQYPINPKAKPSIQIVIDDLLKQGVLTPQNSTMNTPVYPVPKPDGRWRMVLDYREVNKTIPLTAAQNQHSAGILATIVRQKYKTTLDLANGFWAHPITPESYWLTAFTWQGKQYCWTRLPQGFLNSPALFNADVVDLLKEIPNVQVYVDDIYLSHDDPKEHVQQLEKVFQILLQAGYVVSLKKSEIGQKTVEFLGFNITKEGRGLTDTFKTKLLNITPPKDLKQLQSILGKLNFARNFIPNFAELVQPLYNLIAPAKGKYIEWSEENTKQLNMVIEALNTASNLEERLPEQRLVIKVNTSPSAGYVRYYNETGKKPIMYLNYVFSKAELKFSMLEKLLTTMHKALIKAMDLAMGQEILVYSPIVSMTKIQKTPLPERKALPIRWITWMTYLEDPRIQFHYDKTLPELKHIPDVYTSSQSPVKHPSQYEGVFYTDGSAIKSPDPTKSNNAGMGIVHATYKPEYQVLNQWSIPLGNHTAQMAEIAAVEFACKKALKIPGPVLVITDSFYVAESANKELPYWKSNGFVNNKKKPLKHISKWKSIAECLSMKPDITIQHEKGISLQIPVFILKGNALADKLATQGSYVVNAGKRTADGSEFEKRTADGSEFESPKKKAKVE

SEQ ID NO: 6428 - protein, 2190 aa, synthetic construct
MPAAKRVKLDGGDKKYSIGLDIGTNSVGWAVITDEYKVPSKKFKVLGNTDRHSIKKNLIGALLFDSGETAEATRLKRTARRRYTRRKNRICYLQEIFSNEMAKVDDSFFHRLEESFLVEEDKKHERHPIFGNIVDEVAYHEKYPTIYHLRKKLVDSTDKADLRLIYLALAHMIKFRGHFLIEGDLNPDNSDVDKLFIQLVQTYNQLFEENPINASGVDAKAILSARLSKSRRLENLIAQLPGEKKNGLFGNLIALSLGLTPNFKSNFDLAEDAKLQLSKDTYDDDLDNLLAQIGDQYADLFLAAKNLSDAILLSDILRVNTEITKAPLSASMIKRYDEHHQDLTLLKALVRQQLPEKYKEIFFDQSKNGYAGYIDGGASQEEFYKFIKPILEKMDGTEELLVKLNREDLLRKQRTFDNGSIPHQIHLGELHAILRRQEDFYPFLKDNREKIEKILTFRIPYYVGPLARGNSRFAWMTRKSEETITPWNFEEVVDKGASAQSFIERMTNFDKNLPNEKVLPKHSLLYEYFTVYNELTKVKYVTEGMRKPAFLSGEQKKAIVDLLFKTNRKVTVKQLKEDYFKKIECFDSVEISGVEDRFNASLGTYHDLLKIIKDKDFLDNEENEDILEDIVLTLTLFEDREMIEERLKTYAHLFDDKVMKQLKRRRYTGWGRLSRKLINGIRDKQSGKTILDFLKSDGFANRNFMQLIHDDSLTFKEDIQKAQVSGQGDSLHEHIANLAGSPAIKKGILQTVKVVDELVKVMGRHKPENIVIEMARENQTTQKGQKNSRERMKRIEEGIKELGSQILKEHPVENTQLQNEKLYLYYLQNGRDMYVDQELDINRLSDYDVDHIVPQSFLKDDSIDNKVLTRSDKARGKSDNVPSEEVVKKMKNYWRQLLNAKLITQRKFDNLTKAERGGLSELDKAGFIKRQLVETRQITKHVAQILDSRMNTKYDENDKLIREVKVITLKSKLVSDFRKDFQFYKVREINNYHHAHDAYLNAVVGTALIKKYPKLESEFVYGDYKVYDVRKMIAKSEQEIGKATAKYFFYSNIMNFFKTEITLANGEIRKRPLIETNGETGEIVWDKGRDFATVRKVLSMPQVNIVKKTEVQTGGFSKESILPKRNSDKLIARKKDWDPKKYGGFDSPTVAYSVLVVAKVEKGKSKKLKSVKELLGITIMERSSFEKNPIDFLEAKGYKEVKKDLIIKLPKYSLFELENGRKRMLASAGELQKGNELALPSKYVNFLYLASHYEKLKGSPEDNEQKQLFVEQHKHYLDEIIEQISEFSKRVILADANLDKVLSAYNKHRDKPIREQAENIIHLFTLTNLGAPAAFKYFDTTIDRKRYTSTKEVLDATLIHQSITGLYETRIDLSQLGGDGGEAAAKEAAAKEAAAKEAAAKEAAAKGGMNPLQLLQPLPAEIKGTKLLAHWNSGATITCIPESFLEDEQPIKKTLIKTIHGEKQQNVYYVTFKVKGRKVEAEVIASPYEYILLSPTDVPWLTQQPLQLTILVPLQEYQEKILSKTALPEDQKQQLKTLFVKYDNLWQHWENQVGHRKIRPHNIATGDYPPRPQKQYPINPKAKPSIQIVIDDLLKQGVLTPQNSTMNTPVYPVPKPDGRWRMVLDYREVNKTIPLTAAQNQHSAGILATIVRQKYKTTLDLANGFWAHPITPESYWLTAFTWQGKQYCWTRLPQGFLNSPALFNADVVDLLKEIPNVQVYVDDIYLSHDDPKEHVQQLEKVFQILLQAGYVVSLKKSEIGQKTVEFLGFNITKEGRGLTDTFKTKLLNITPPKDLKQLQSILGLLNFARNFIPNFAELVQPLYNLIAPAKGKYIEWSEENTKQLNMVIEALNTASNLEERLPEQRLVIKVNTSPSAGYVRYYNETGKKPIMYLNYVFSKAELKFSMLEKLLTTMHKALIKAMDLAMGQEILVYSPIVSMTKIQKTPLPERKALPIRWITWMTYLEDPRIQFHYDKTLPELKHIPDVYTSSQSPVKHPSQYEGVFYTDGSAIKSPDPTKSNNAGMGIVHATYKPEYQVLNQWSIPLGNHTAQMAEIAAVEFACKKALKIPGPVLVITDSFYVAESANKELPYWKSNGFVNNKKKPLKHISKWKSIAECLSMKPDITIQHEKGISLQIPVFILKGNALADKLATQGSYVVNAGKRTADGSEFEKRTADGSEFESPKKKAKVE

SEQ ID NO: 6429 - protein, 2190 aa, synthetic construct
MPAAKRVKLDGGDKKYSIGLDIGTNSVGWAVITDEYKVPSKKFKVLGNTDRHSIKKNLIGALLFDSGETAEATRLKRTARRRYTRRKNRICYLQEIFSNEMAKVDDSFFHRLEESFLVEEDKKHERHPIFGNIVDEVAYHEKYPTIYHLRKKLVDSTDKADLRLIYLALAHMIKFRGHFLIEGDLNPDNSDVDKLFIQLVQTYNQLFEENPINASGVDAKAILSARLSKSRRLENLIAQLPGEKKNGLFGNLIALSLGLTPNFKSNFDLAEDAKLQLSKDTYDDDLDNLLAQIGDQYADLFLAAKNLSDAILLSDILRVNTEITKAPLSASMIKRYDEHHQDLTLLKALVRQQLPEKYKEIFFDQSKNGYAGYIDGGASQEEFYKFIKPILEKMDGTEELLVKLNREDLLRKQRTFDNGSIPHQIHLGELHAILRRQEDFYPFLKDNREKIEKILTFRIPYYVGPLARGNSRFAWMTRKSEETITPWNFEEVVDKGASAQSFIERMTNFDKNLPNEKVLPKHSLLYEYFTVYNELTKVKYVTEGMRKPAFLSGEQKKAIVDLLFKTNRKVTVKQLKEDYFKKIECFDSVEISGVEDRFNASLGTYHDLLKIIKDKDFLDNEENEDILEDIVLTLTLFEDREMIEERLKTYAHLFDDKVMKQLKRRRYTGWGRLSRKLINGIRDKQSGKTILDFLKSDGFANRNFMQLIHDDSLTFKEDIQKAQVSGQGDSLHEHIANLAGSPAIKKGILQTVKVVDELVKVMGRHKPENIVIEMARENQTTQKGQKNSRERMKRIEEGIKELGSQILKEHPVENTQLQNEKLYLYYLQNGRDMYVDQELDINRLSDYDVDHIVPQSFLKDDSIDNKVLTRSDKARGKSDNVPSEEVVKKMKNYWRQLLNAKLITQRKFDNLTKAERGGLSELDKAGFIKRQLVETRQITKHVAQILDSRMNTKYDENDKLIREVKVITLKSKLVSDFRKDFQFYKVREINNYHHAHDAYLNAVVGTALIKKYPKLESEFVYGDYKVYDVRKMIAKSEQEIGKATAKYFFYSNIMNFFKTEITLANGEIRKRPLIETNGETGEIVWDKGRDFATVRKVLSMPQVNIVKKTEVQTGGFSKESILPKRNSDKLIARKKDWDPKKYGGFDSPTVAYSVLVVAKVEKGKSKKLKSVKELLGITIMERSSFEKNPIDFLEAKGYKEVKKDLIIKLPKYSLFELENGRKRMLASAGELQKGNELALPSKYVNFLYLASHYEKLKGSPEDNEQKQLFVEQHKHYLDEIIEQISEFSKRVILADANLDKVLSAYNKHRDKPIREQAENIIHLFTLTNLGAPAAFKYFDTTIDRKRYTSTKEVLDATLIHQSITGLYETRIDLSQLGGDGGEAAAKEAAAKEAAAKEAAAKEAAAKGGMNPLQLLQPLPAEIKGTKLLAHWNSGATITCIPESFLEDEQPIKKTLIKTIHGEKQQNVYYVTFKVKGRKVEAEVIASPYEYILLSPTDVPWLTQQPLQLTILVPLQEYQEKILSKTALPEDQKQQLKTLFVKYDNLWQHWENQVGHRKIRPHNIATGDYPPRPQKQYPINPKAKPSIQIVIDDLLKQGVLTPQNSTMNTPVYPVPKPDGRWRMVLDYREVNKTIPLTAAQNQHSAGILATIVRQKYKTTLDLANGFWAHPITPESYWLTAFTWQGKQYCWTRLPQGFLNSPALFNADVVDLLKEIPNVQVYVDDIYLSHDDPKEHVQQLEKVFQILLQAGYVVSLKKSEIGQKTVEFLGFNITKEGRGLTDTFKTKLLNITPPKDLKQLQSILGKLNFARNFIPNFAELVQPLYNLIAPAKGKYIEWSEENTKQLNMVIEALNTASNLEERLPEQRLVIKVNTSPSAGYVRYYNETGKKPIMYLNYVFSKAELKFSMLEKLLTTMHKALIKAMDLAMGQEILVYSPIVSMTKIQKTPLPERKALPIRWITWMTYLEDPRIQFHYDKTLPELKHIPDVYTSSQSPVKHPSQYEGVFYTDGSAIKSPDPTKSNNAGMGIVHATYKPEYQVLNQWSIPLGNHTAQMAEIAAVEFACKKALKIPGPVLVITDSFYVAESANKELPYWKSNGFVNNKKKPLKHISKWKSIAECLSMKPDITIQHEKGISLQIPVFILKGNALADKLATQGSYVVNAGKRTADGSEFEKRTADGSEFESPKKKAKVE

SEQ ID NO: 6430 - protein, 2108 aa, synthetic construct
MPAAKRVKLDGGDKKYSIGLDIGTNSVGWAVITDEYKVPSKKFKVLGNTDRHSIKKNLIGALLFDSGETAEATRLKRTARRRYTRRKNRICYLQEIFSNEMAKVDDSFFHRLEESFLVEEDKKHERHPIFGNIVDEVAYHEKYPTIYHLRKKLVDSTDKADLRLIYLALAHMIKFRGHFLIEGDLNPDNSDVDKLFIQLVQTYNQLFEENPINASGVDAKAILSARLSKSRRLENLIAQLPGEKKNGLFGNLIALSLGLTPNFKSNFDLAEDAKLQLSKDTYDDDLDNLLAQIGDQYADLFLAAKNLSDAILLSDILRVNTEITKAPLSASMIKRYDEHHQDLTLLKALVRQQLPEKYKEIFFDQSKNGYAGYIDGGASQEEFYKFIKPILEKMDGTEELLVKLNREDLLRKQRTFDNGSIPHQIHLGELHAILRRQEDFYPFLKDNREKIEKILTFRIPYYVGPLARGNSRFAWMTRKSEETITPWNFEEVVDKGASAQSFIERMTNFDKNLPNEKVLPKHSLLYEYFTVYNELTKVKYVTEGMRKPAFLSGEQKKAIVDLLFKTNRKVTVKQLKEDYFKKIECFDSVEISGVEDRFNASLGTYHDLLKIIKDKDFLDNEENEDILEDIVLTLTLFEDREMIEERLKTYAHLFDDKVMKQLKRRRYTGWGRLSRKLINGIRDKQSGKTILDFLKSDGFANRNFMQLIHDDSLTFKEDIQKAQVSGQGDSLHEHIANLAGSPAIKKGILQTVKVVDELVKVMGRHKPENIVIEMARENQTTQKGQKNSRERMKRIEEGIKELGSQILKEHPVENTQLQNEKLYLYYLQNGRDMYVDQELDINRLSDYDVDHIVPQSFLKDDSIDNKVLTRSDKARGKSDNVPSEEVVKKMKNYWRQLLNAKLITQRKFDNLTKAERGGLSELDKAGFIKRQLVETRQITKHVAQILDSRMNTKYDENDKLIREVKVITLKSKLVSDFRKDFQFYKVREINNYHHAHDAYLNAVVGTALIKKYPKLESEFVYGDYKVYDVRKMIAKSEQEIGKATAKYFFYSNIMNFFKTEITLANGEIRKRPLIETNGETGEIVWDKGRDFATVRKVLSMPQVNIVKKTEVQTGGFSKESILPKRNSDKLIARKKDWDPKKYGGFDSPTVAYSVLVVAKVEKGKSKKLKSVKELLGITIMERSSFEKNPIDFLEAKGYKEVKKDLIIKLPKYSLFELENGRKRMLASAGELQKGNELALPSKYVNFLYLASHYEKLKGSPEDNEQKQLFVEQHKHYLDEIIEQISEFSKRVILADANLDKVLSAYNKHRDKPIREQAENIIHLFTLTNLGAPAAFKYFDTTIDRKRYTSTKEVLDATLIHQSITGLYETRIDLSQLGGDGGEAAAKEAAAKEAAAKEAAAKEAAAKGGVLNLEEEYRLHEKPVPSSIDPSWLQLFPTVWAERAGMGLANQVPPVVVELRSGASPVAVRQYPMSKEAREGIRPHIQKFLDLGVLVPCRSPWNTPLLPVKKPGTNDYRPVQDLREINKRVQDIHPTVPNPYNLLSSLPPSYTWYSVLDLKDAFFCLRLHPNSQPLFAFEWKDPEKGNTGQLTWTRLPQGFKNSPTLFNEALHRDLAPFRALNPQVVLLQYVDDLLVAAPTYEDCKKGTQKLLQELSKLGYRVSAKKAQLCQREVTYLGYLLKEGKRWLTPARKATVMKIPVPTTPRQVREFLGTAGFCRLWIPGFASLAAPLYPLTKPSIPFIWTEEHQQAFDHIKKALLSAPALALPDLTKPFTLYIDERAGVARGVLTQTLGPWRRPVAYLSKKLDPVASGWPTCLKAVAAVALLLKDADKLTLGQNVTVIASHSLESIVRQPPDRWMTNARMTHYQSLLLNERVSFAPPAVLNPATLLPVESEATPVHRCSEILAEETGTRRDLEDQPLPGVPTWYTDGSSFITEGKRRAGAPIVDGKRTVWASSLPEGTSAQKAELVALTQALRLAEGKNINIYTDSRYAFATAHIHGAIYKQRGWLTSAGKDIKNKEEILALLEAIHLPRRVAIIHCPGHQRGSNPVATGNRRADEAAKQAALSTRVLAGTTKPAGKRTADGSEFEKRTADGSEFESPKKKAKVE

SEQ ID NO: 6431 - protein, 2108 aa, synthetic construct
MPAAKRVKLDGGDKKYSIGLDIGTNSVGWAVITDEYKVPSKKFKVLGNTDRHSIKKNLIGALLFDSGETAEATRLKRTARRRYTRRKNRICYLQEIFSNEMAKVDDSFFHRLEESFLVEEDKKHERHPIFGNIVDEVAYHEKYPTIYHLRKKLVDSTDKADLRLIYLALAHMIKFRGHFLIEGDLNPDNSDVDKLFIQLVQTYNQLFEENPINASGVDAKAILSARLSKSRRLENLIAQLPGEKKNGLFGNLIALSLGLTPNFKSNFDLAEDAKLQLSKDTYDDDLDNLLAQIGDQYADLFLAAKNLSDAILLSDILRVNTEITKAPLSASMIKRYDEHHQDLTLLKALVRQQLPEKYKEIFFDQSKNGYAGYIDGGASQEEFYKFIKPILEKMDGTEELLVKLNREDLLRKQRTFDNGSIPHQIHLGELHAILRRQEDFYPFLKDNREKIEKILTFRIPYYVGPLARGNSRFAWMTRKSEETITPWNFEEVVDKGASAQSFIERMTNFDKNLPNEKVLPKHSLLYEYFTVYNELTKVKYVTEGMRKPAFLSGEQKKAIVDLLFKTNRKVTVKQLKEDYFKKIECFDSVEISGVEDRFNASLGTYHDLLKIIKDKDFLDNEENEDILEDIVLTLTLFEDREMIEERLKTYAHLFDDKVMKQLKRRRYTGWGRLSRKLINGIRDKQSGKTILDFLKSDGFANRNFMQLIHDDSLTFKEDIQKAQVSGQGDSLHEHIANLAGSPAIKKGILQTVKVVDELVKVMGRHKPENIVIEMARENQTTQKGQKNSRERMKRIEEGIKELGSQILKEHPVENTQLQNEKLYLYYLQNGRDMYVDQELDINRLSDYDVDHIVPQSFLKDDSIDNKVLTRSDKARGKSDNVPSEEVVKKMKNYWRQLLNAKLITQRKFDNLTKAERGGLSELDKAGFIKRQLVETRQITKHVAQILDSRMNTKYDENDKLIREVKVITLKSKLVSDFRKDFQFYKVREINNYHHAHDAYLNAVVGTALIKKYPKLESEFVYGDYKVYDVRKMIAKSEQEIGKATAKYFFYSNIMNFFKTEITLANGEIRKRPLIETNGETGEIVWDKGRDFATVRKVLSMPQVNIVKKTEVQTGGFSKESILPKRNSDKLIARKKDWDPKKYGGFDSPTVAYSVLVVAKVEKGKSKKLKSVKELLGITIMERSSFEKNPIDFLEAKGYKEVKKDLIIKLPKYSLFELENGRKRMLASAGELQKGNELALPSKYVNFLYLASHYEKLKGSPEDNEQKQLFVEQHKHYLDEIIEQISEFSKRVILADANLDKVLSAYNKHRDKPIREQAENIIHLFTLTNLGAPAAFKYFDTTIDRKRYTSTKEVLDATLIHQSITGLYETRIDLSQLGGDGGEAAAKEAAAKEAAAKEAAAKEAAAKGGVLNLEEEYRLHEKPVPSSIDPSWLQLFPTVWAERAGMGLANQVPPVVVELRSGASPVAVRQYPMSKEAREGIRPHIQKFLDLGVLVPCRSPWNTPLLPVKKPGTNDYRPVQDLREINKRVQDIHPTVPNPYNLLSSLPPSYTWYSVLDLKDAFFCLRLHPNSQPLFAFEWKDPEKGNTGQLTWTRLPQGFKNSPTLFNEALHRDLAPFRALNPQVVLLQYVDDLLVAAPTYEDCKKGTQKLLQELSKLGYRVSAKKAQLCQREVTYLGYLLKEGKRWLTPARKATVMKIPVPTTPRQVREFLGKAGFCRLFIPGFASLAAPLYPLTKPSIPFIWTEEHQQAFDHIKKALLSAPALALPDLTKPFTLYIDERAGVARGVLTQTLGPWRRPVAYLSKKLDPVASGWPTCLKAVAAVALLLKDADKLTLGQNVTVIASHSLESIVRQPPDRWMTNARMTHYQSLLLNERVSFAPPAVLNPATLLPVESEATPVHRCSEILAEETGTRRDLEDQPLPGVPTWYTDGSSFITEGKRRAGAPIVDGKRTVWASSLPEGTSAQKAELVALTQALRLAEGKNINIYTDSRYAFATAHIHGAIYKQRGWLTSAGKDIKNKEEILALLEAIHLPRRVAIIHCPGHQRGSNPVATGNRRADEAAKQAALSTRVLAGTTKPAGKRTADGSEFEKRTADGSEFESPKKKAKVE

SEQ ID NO: 6432 - protein, 2232 aa, synthetic construct
MPAAKRVKLDGGDKKYSIGLDIGTNSVGWAVITDEYKVPSKKFKVLGNTDRHSIKKNLIGALLFDSGETAEATRLKRTARRRYTRRKNRICYLQEIFSNEMAKVDDSFFHRLEESFLVEEDKKHERHPIFGNIVDEVAYHEKYPTIYHLRKKLVDSTDKADLRLIYLALAHMIKFRGHFLIEGDLNPDNSDVDKLFIQLVQTYNQLFEENPINASGVDAKAILSARLSKSRRLENLIAQLPGEKKNGLFGNLIALSLGLTPNFKSNFDLAEDAKLQLSKDTYDDDLDNLLAQIGDQYADLFLAAKNLSDAILLSDILRVNTEITKAPLSASMIKRYDEHHQDLTLLKALVRQQLPEKYKEIFFDQSKNGYAGYIDGGASQEEFYKFIKPILEKMDGTEELLVKLNREDLLRKQRTFDNGSIPHQIHLGELHAILRRQEDFYPFLKDNREKIEKILTFRIPYYVGPLARGNSRFAWMTRKSEETITPWNFEEVVDKGASAQSFIERMTNFDKNLPNEKVLPKHSLLYEYFTVYNELTKVKYVTEGMRKPAFLSGEQKKAIVDLLFKTNRKVTVKQLKEDYFKKIECFDSVEISGVEDRFNASLGTYHDLLKIIKDKDFLDNEENEDILEDIVLTLTLFEDREMIEERLKTYAHLFDDKVMKQLKRRRYTGWGRLSRKLINGIRDKQSGKTILDFLKSDGFANRNFMQLIHDDSLTFKEDIQKAQVSGQGDSLHEHIANLAGSPAIKKGILQTVKVVDELVKVMGRHKPENIVIEMARENQTTQKGQKNSRERMKRIEEGIKELGSQILKEHPVENTQLQNEKLYLYYLQNGRDMYVDQELDINRLSDYDVDHIVPQSFLKDDSIDNKVLTRSDKARGKSDNVPSEEVVKKMKNYWRQLLNAKLITQRKFDNLTKAERGGLSELDKAGFIKRQLVETRQITKHVAQILDSRMNTKYDENDKLIREVKVITLKSKLVSDFRKDFQFYKVREINNYHHAHDAYLNAVVGTALIKKYPKLESEFVYGDYKVYDVRKMIAKSEQEIGKATAKYFFYSNIMNFFKTEITLANGEIRKRPLIETNGETGEIVWDKGRDFATVRKVLSMPQVNIVKKTEVQTGGFSKESILPKRNSDKLIARKKDWDPKKYGGFDSPTVAYSVLVVAKVEKGKSKKLKSVKELLGITIMERSSFEKNPIDFLEAKGYKEVKKDLIIKLPKYSLFELENGRKRMLASAGELQKGNELALPSKYVNFLYLASHYEKLKGSPEDNEQKQLFVEQHKHYLDEIIEQISEFSKRVILADANLDKVLSAYNKHRDKPIREQAENIIHLFTLTNLGAPAAFKYFDTTIDRKRYTSTKEVLDATLIHQSITGLYETRIDLSQLGGDGGEAAAKEAAAKEAAAKEAAAKEAAAKGGTLGDQGSRGSDPLPEPRVTLTVEGIPTEFLVNTGAEHSVLTKPMGKMGSKRTVVAGATGSKVYPWTTKRLLKIGQKQVTHSFLVIPECPAPLLGRDLLTKLKAQIQFSTEGPQVTWEDRPAMCLVLNLEEEYRLHEKPVPPSIDPSWLQLFPMVWAEKAGMGLANQVPPVVVELKSDASPVAVRQYPMSKEAREGIRPHIQRFLDLGILVPCQSPWNTPLLPVKKPGTNDYRPVQDLREVNKRVQDIHPTVPNPYNLLSSLPPSHTWYSVLDLKDAFFCLKLHPNSQPLFAFEWRDPEKGNTGQLTWTRLPQGFKNSPTLFNEALHRDLASFRALNPQVVMLQYVDDLLVAAPTYRDCKEGTRRLLQELSKLGYRVSAKKAQLCREEVTYLGYLLKGGKRWLTPARKATVMKIPTPTTPRQVREFLGTAGFCRLWIPGFASLAAPLYPLTRPKVPFTWTEAHQEAFGRIKEALLSAPALALPDLTKPFALYVDEKEGVARGVLTQTLGPWRRPVAYLSKKLDPVASGWPTCLKAIAAVALLLKDADKLTLGQNVLVIAPHNLESIVRQPPDRWMTNARMTHYQSLLLNERVSFAPPAILNPATLLPVESDDTPIHICSEILAEETGTRPDLRDQPLPGVPAWYTDGSSFIMDGRRQAGAAIVDNKRTVWASNLPEGTSAQKAELIALTQALRLAEGKSINIYTDSRYAFATAHVHGAIYKQRGWLTSAGKDIKNKEEILALLEAIHLPKRVAIIHCPGHQRGTDPVATGNRKADEAAKQAAQSTRILTETTKNAGKRTADGSEFEKRTADGSEFESPKKKAKVE

SEQ ID NO: 6433 - protein, 2110 aa, synthetic construct
MPAAKRVKLDGGDKKYSIGLDIGTNSVGWAVITDEYKVPSKKFKVLGNTDRHSIKKNLIGALLFDSGETAEATRLKRTARRRYTRRKNRICYLQEIFSNEMAKVDDSFFHRLEESFLVEEDKKHERHPIFGNIVDEVAYHEKYPTIYHLRKKLVDSTDKADLRLIYLALAHMIKFRGHFLIEGDLNPDNSDVDKLFIQLVQTYNQLFEENPINASGVDAKAILSARLSKSRRLENLIAQLPGEKKNGLFGNLIALSLGLTPNFKSNFDLAEDAKLQLSKDTYDDDLDNLLAQIGDQYADLFLAAKNLSDAILLSDILRVNTEITKAPLSASMIKRYDEHHQDLTLLKALVRQQLPEKYKEIFFDQSKNGYAGYIDGGASQEEFYKFIKPILEKMDGTEELLVKLNREDLLRKQRTFDNGSIPHQIHLGELHAILRRQEDFYPFLKDNREKIEKILTFRIPYYVGPLARGNSRFAWMTRKSEETITPWNFEEVVDKGASAQSFIERMTNFDKNLPNEKVLPKHSLLYEYFTVYNELTKVKYVTEGMRKPAFLSGEQKKAIVDLLFKTNRKVTVKQLKEDYFKKIECFDSVEISGVEDRFNASLGTYHDLLKIIKDKDFLDNEENEDILEDIVLTLTLFEDREMIEERLKTYAHLFDDKVMKQLKRRRYTGWGRLSRKLINGIRDKQSGKTILDFLKSDGFANRNFMQLIHDDSLTFKEDIQKAQVSGQGDSLHEHIANLAGSPAIKKGILQTVKVVDELVKVMGRHKPENIVIEMARENQTTQKGQKNSRERMKRIEEGIKELGSQILKEHPVENTQLQNEKLYLYYLQNGRDMYVDQELDINRLSDYDVDHIVPQSFLKDDSIDNKVLTRSDKARGKSDNVPSEEVVKKMKNYWRQLLNAKLITQRKFDNLTKAERGGLSELDKAGFIKRQLVETRQITKHVAQILDSRMNTKYDENDKLIREVKVITLKSKLVSDFRKDFQFYKVREINNYHHAHDAYLNAVVGTALIKKYPKLESEFVYGDYKVYDVRKMIAKSEQEIGKATAKYFFYSNIMNFFKTEITLANGEIRKRPLIETNGETGEIVWDKGRDFATVRKVLSMPQVNIVKKTEVQTGGFSKESILPKRNSDKLIARKKDWDPKKYGGFDSPTVAYSVLVVAKVEKGKSKKLKSVKELLGITIMERSSFEKNPIDFLEAKGYKEVKKDLIIKLPKYSLFELENGRKRMLASAGELQKGNELALPSKYVNFLYLASHYEKLKGSPEDNEQKQLFVEQHKHYLDEIIEQISEFSKRVILADANLDKVLSAYNKHRDKPIREQAENIIHLFTLTNLGAPAAFKYFDTTIDRKRYTSTKEVLDATLIHQSITGLYETRIDLSQLGGDGGEAAAKEAAAKEAAAKEAAAKEAAAKGGTLNLEDEYRLYETSAEPEVSPGSTWLSDFPQAWAETGGMGLAVRQAPLIIPLKATSTPVSIKQYPMSQEAKLGIKPHIQRLLDQGILVPCQSPWNTPLLPVKKPGTNDYRPVQDLREVNKRVEDIHPTVPNPYNLLSGLPPSHRWYTVLDLKDAFFCLRLHPTSQPLFAFEWRDPGMGISGQLTWTRLPQGFKNSPTLFNEALHRDLADFRIQHPDLILLQYVDDILLAATSELDCQQGTRALLLTLGNLGYRASAKKAQLCQKQVKYLGYLLKEGQRWLTEARKETVMGQPTPKTPRQLREFLGTAGFCRLWIPGFAEMAAPLYPLTKPGTLFNWGPDQQKAYQEIKQALLTAPALGLPDLTKPFELFVDEKQGYAKGVLTQKLGPWRRPVAYLSKKLDPVAAGWPPCLRMVAAIAVLRKDAGKLTMGQPLVILAPHAVEALVKQPPDRWLSNARMTHYQAMLLDTDRVQFGPVVALNPATLLPLPEEGAPHDCLEILAETHGTRPDLTDQPIPDADHTWYTDGSSFLQEGQRKAGAAVTTETEVIWARALPAGTSAQRAELIALTQALKMAEGKRLNVYTDSRYAFATAHIHGEIYRRRGWLTSEGREIKNKSEILALLKALFLPKRLSIIHCLGHQKGDSAEARGNRLADQAAREAAIKTPPDTSTLLAGKRTADGSEFEKRTADGSEFESPKKKAKVE

SEQ ID NO: 6434 - protein, 2110 aa, synthetic construct; identical to SEQ ID NO: 4507

SEQ ID NO: 6435 - protein, 2110 aa, synthetic construct
MPAAKRVKLDGGDKKYSIGLDIGTNSVGWAVITDEYKVPSKKFKVLGNTDRHSIKKNLIGALLFDSGETAEATRLKRTARRRYTRRKNRICYLQEIFSNEMAKVDDSFFHRLEESFLVEEDKKHERHPIFGNIVDEVAYHEKYPTIYHLRKKLVDSTDKADLRLIYLALAHMIKFRGHFLIEGDLNPDNSDVDKLFIQLVQTYNQLFEENPINASGVDAKAILSARLSKSRRLENLIAQLPGEKKNGLFGNLIALSLGLTPNFKSNFDLAEDAKLQLSKDTYDDDLDNLLAQIGDQYADLFLAAKNLSDAILLSDILRVNTEITKAPLSASMIKRYDEHHQDLTLLKALVRQQLPEKYKEIFFDQSKNGYAGYIDGGASQEEFYKFIKPILEKMDGTEELLVKLNREDLLRKQRTFDNGSIPHQIHLGELHAILRRQEDFYPFLKDNREKIEKILTFRIPYYVGPLARGNSRFAWMTRKSEETITPWNFEEVVDKGASAQSFIERMTNFDKNLPNEKVLPKHSLLYEYFTVYNELTKVKYVTEGMRKPAFLSGEQKKAIVDLLFKTNRKVTVKQLKEDYFKKIECFDSVEISGVEDRFNASLGTYHDLLKIIKDKDFLDNEENEDILEDIVLTLTLFEDREMIEERLKTYAHLFDDKVMKQLKRRRYTGWGRLSRKLINGIRDKQSGKTILDFLKSDGFANRNFMQLIHDDSLTFKEDIQKAQVSGQGDSLHEHIANLAGSPAIKKGILQTVKVVDELVKVMGRHKPENIVIEMARENQTTQKGQKNSRERMKRIEEGIKELGSQILKEHPVENTQLQNEKLYLYYLQNGRDMYVDQELDINRLSDYDVDHIVPQSFLKDDSIDNKVLTRSDKARGKSDNVPSEEVVKKMKNYWRQLLNAKLITQRKFDNLTKAERGGLSELDKAGFIKRQLVETRQITKHVAQILDSRMNTKYDENDKLIREVKVITLKSKLVSDFRKDFQFYKVREINNYHHAHDAYLNAVVGTALIKKYPKLESEFVYGDYKVYDVRKMIAKSEQEIGKATAKYFFYSNIMNFFKTEITLANGEIRKRPLIETNGETGEIVWDKGRDFATVRKVLSMPQVNIVKKTEVQTGGFSKESILPKRNSDKLIARKKDWDPKKYGGFDSPTVAYSVLVVAKVEKGKSKKLKSVKELLGITIMERSSFEKNPIDFLEAKGYKEVKKDLIIKLPKYSLFELENGRKRMLASAGELQKGNELALPSKYVNFLYLASHYEKLKGSPEDNEQKQLFVEQHKHYLDEIIEQISEFSKRVILADANLDKVLSAYNKHRDKPIREQAENIIHLFTLTNLGAPAAFKYFDTTIDRKRYTSTKEVLDATLIHQSITGLYETRIDLSQLGGDGGEAAAKEAAAKEAAAKEAAAKEAAAKGGTLNIEDEYRLHETSKGPDVPLGSTWLSDFPQAWAETGGMGLAVRQAPLIIPLKATSTPVSIKQYPMSQEARLGIKPHIQRLLDQGILVPCQSPWNTPLLPVKKPGTNDYRPVQDLREVNKRVEDIHPTVPNPYNLLSGLPPSHQWYTVLDLKDAFFCLRLHPTSQSLFAFEWRDPEMGISGQLTWTRLPQGFKNSPTLFDEALHRDLADFRIQHPDLILLQYVDDLLLAATSELDCQQGTRALLQTLGDLGYRASAKKAQICQKQVKYLGYLLKEGQRWLTEARKETVMGQPTPKTPRQLREFLGTAGFCRLWIPGFAEMAAPLYPLTKTGTLFEWGPDQQKAYQEIKQALLTAPALGLPDLTKPFELFVDEKQGYAKGVLTQKLGPWRRPVAYLSKKLDPVAAGWPPCLRMVAAIAVLTKDAGKLTMGQPLVILAPHAVEALVKQPPDRWLSNARMTHYQALLLDTDRVQFGPIVALNPATLLPLPEEGLQHDCLDILAEAHGTRPDLTDQPLPDADHTWYTDGSSFLQEGQRKAGAAVTTETEVVWAKALPAGTSAQRAELIALTQALKMAEGKKLNVYTDSRYAFATAHIHGEIYRRRGLLTSEGKEIKNKDEILALLKALFLPKRLSIIHCPGHQKGNRAEARGNRMADQAAREVATRETPETSTLLAGKRTADGSEFEKRTADGSEFESPKKKAKVE

SEQ ID NO: 6436 - protein, 2110 aa, synthetic construct
MPAAKRVKLDGGDKKYSIGLDIGTNSVGWAVITDEYKVPSKKFKVLGNTDRHSIKKNLIGALLFDSGETAEATRLKRTARRRYTRRKNRICYLQEIFSNEMAKVDDSFFHRLEESFLVEEDKKHERHPIFGNIVDEVAYHEKYPTIYHLRKKLVDSTDKADLRLIYLALAHMIKFRGHFLIEGDLNPDNSDVDKLFIQLVQTYNQLFEENPINASGVDAKAILSARLSKSRRLENLIAQLPGEKKNGLFGNLIALSLGLTPNFKSNFDLAEDAKLQLSKDTYDDDLDNLLAQIGDQYADLFLAAKNLSDAILLSDILRVNTEITKAPLSASMIKRYDEHHQDLTLLKALVRQQLPEKYKEIFFDQSKNGYAGYIDGGASQEEFYKFIKPILEKMDGTEELLVKLNREDLLRKQRTFDNGSIPHQIHLGELHAILRRQEDFYPFLKDNREKIEKILTFRIPYYVGPLARGNSRFAWMTRKSEETITPWNFEEVVDKGASAQSFIERMTNFDKNLPNEKVLPKHSLLYEYFTVYNELTKVKYVTEGMRKPAFLSGEQKKAIVDLLFKTNRKVTVKQLKEDYFKKIECFDSVEISGVEDRFNASLGTYHDLLKIIKDKDFLDNEENEDILEDIVLTLTLFEDREMIEERLKTYAHLFDDKVMKQLKRRRYTGWGRLSRKLINGIRDKQSGKTILDFLKSDGFANRNFMQLIHDDSLTFKEDIQKAQVSGQGDSLHEHIANLAGSPAIKKGILQTVKVVDELVKVMGRHKPENIVIEMARENQTTQKGQKNSRERMKRIEEGIKELGSQILKEHPVENTQLQNEKLYLYYLQNGRDMYVDQELDINRLSDYDVDHIVPQSFLKDDSIDNKVLTRSDKARGKSDNVPSEEVVKKMKNYWRQLLNAKLITQRKFDNLTKAERGGLSELDKAGFIKRQLVETRQITKHVAQILDSRMNTKYDENDKLIREVKVITLKSKLVSDFRKDFQFYKVREINNYHHAHDAYLNAVVGTALIKKYPKLESEFVYGDYKVYDVRKMIAKSEQEIGKATAKYFFYSNIMNFFKTEITLANGEIRKRPLIETNGETGEIVWDKGRDFATVRKVLSMPQVNIVKKTEVQTGGFSKESILPKRNSDKLIARKKDWDPKKYGGFDSPTVAYSVLVVAKVEKGKSKKLKSVKELLGITIMERSSFEKNPIDFLEAKGYKEVKKDLIIKLPKYSLFELENGRKRMLASAGELQKGNELALPSKYVNFLYLASHYEKLKGSPEDNEQKQLFVEQHKHYLDEIIEQISEFSKRVILADANLDKVLSAYNKHRDKPIREQAENIIHLFTLTNLGAPAAFKYFDTTIDRKRYTSTKEVLDATLIHQSITGLYETRIDLSQLGGDGGEAAAKEAAAKEAAAKEAAAKEAAAKGGTLNIEDEHRLHETSKEPDVSLGSTWLSDFPQAWAETGGMGLAVRQAPLIIPLKATSTPVSIKQYPMSQEARLGIKPHIQRLLDQGILVPCQSPWNTPLLPVKKPGTNDYRPVQDLREVNKRVEDIHPTVPNPYNLLSGLPPSHQWYTVLDLKDAFFCLRLHPTSQPLFAFEWRDPEMGISGQLTWTRLPQGFKNSPTLFDEALHRDLADFRIQHPDLILLQYVDDLLLAATSELDCQQGTRALLQTLGNLGYRASAKKAQICQKQVKYLGYLLKEGQRWLTEARKETVMGQPTPKTPRQLREFLGTAGFCRLWIPGFAEMAAPLYPLTKTGTLFNWGPDQQKAYQEIKQALLTAPALGLPDLTKPFELFVDEKQGYAKGVLTQKLGPWRRPVAYLSKKLDPVAAGWPPCLRMVAAIAVLTKDAGKLTMGQPLVILAPHAVEALVKQPPDRWLSNARMTHYQALLLDTDRVQFGPVVALNPATLLPLPEEGLQHNCLDILAEAHGTRPDLTDQPLPDADHTWYTDGSSLLQEGQRKAGAAVTTETEVIWAKALPAGTSAQRAELIALTQALKMAEGKKLNVYTDSRYAFATAHIHGEIYRRRGLLTSEGKEIKNKDEILALLKALFLPKRLSIIHCPGHQKGHSAEARGNRMADQAARKAAITETPDTSTLLAGKRTADGSEFEKRTADGSEFESPKKKAKVE

SEQ ID NO: 6437 - protein, 2190 aa, synthetic construct
MPAAKRVKLDGGDKKYSIGLDIGTNSVGWAVITDEYKVPSKKFKVLGNTDRHSIKKNLIGALLFDSGETAEATRLKRTARRRYTRRKNRICYLQEIFSNEMAKVDDSFFHRLEESFLVEEDKKHERHPIFGNIVDEVAYHEKYPTIYHLRKKLVDSTDKADLRLIYLALAHMIKFRGHFLIEGDLNPDNSDVDKLFIQLVQTYNQLFEENPINASGVDAKAILSARLSKSRRLENLIAQLPGEKKNGLFGNLIALSLGLTPNFKSNFDLAEDAKLQLSKDTYDDDLDNLLAQIGDQYADLFLAAKNLSDAILLSDILRVNTEITKAPLSASMIKRYDEHHQDLTLLKALVRQQLPEKYKEIFFDQSKNGYAGYIDGGASQEEFYKFIKPILEKMDGTEELLVKLNREDLLRKQRTFDNGSIPHQIHLGELHAILRRQEDFYPFLKDNREKIEKILTFRIPYYVGPLARGNSRFAWMTRKSEETITPWNFEEVVDKGASAQSFIERMTNFDKNLPNEKVLPKHSLLYEYFTVYNELTKVKYVTEGMRKPAFLSGEQKKAIVDLLFKTNRKVTVKQLKEDYFKKIECFDSVEISGVEDRFNASLGTYHDLLKIIKDKDFLDNEENEDILEDIVLTLTLFEDREMIEERLKTYAHLFDDKVMKQLKRRRYTGWGRLSRKLINGIRDKQSGKTILDFLKSDGFANRNFMQLIHDDSLTFKEDIQKAQVSGQGDSLHEHIANLAGSPAIKKGILQTVKVVDELVKVMGRHKPENIVIEMARENQTTQKGQKNSRERMKRIEEGIKELGSQILKEHPVENTQLQNEKLYLYYLQNGRDMYVDQELDINRLSDYDVDHIVPQSFLKDDSIDNKVLTRSDKARGKSDNVPSEEVVKKMKNYWRQLLNAKLITQRKFDNLTKAERGGLSELDKAGFIKRQLVETRQITKHVAQILDSRMNTKYDENDKLIREVKVITLKSKLVSDFRKDFQFYKVREINNYHHAHDAYLNAVVGTALIKKYPKLESEFVYGDYKVYDVRKMIAKSEQEIGKATAKYFFYSNIMNFFKTEITLANGEIRKRPLIETNGETGEIVWDKGRDFATVRKVLSMPQVNIVKKTEVQTGGFSKESILPKRNSDKLIARKKDWDPKKYGGFDSPTVAYSVLVVAKVEKGKSKKLKSVKELLGITIMERSSFEKNPIDFLEAKGYKEVKKDLIIKLPKYSLFELENGRKRMLASAGELQKGNELALPSKYVNFLYLASHYEKLKGSPEDNEQKQLFVEQHKHYLDEIIEQISEFSKRVILADANLDKVLSAYNKHRDKPIREQAENIIHLFTLTNLGAPAAFKYFDTTIDRKRYTSTKEVLDATLIHQSITGLYETRIDLSQLGGDGGEAAAKEAAAKEAAAKEAAAKEAAAKGGMDPLQLLQPLEAEIKGTKLKAHWNSGATITCVPEAFLEDERPIQTMLIKTIHGEKQQDVYYLTFKVQGRKVEAEVLASPYDYILLNPSDVPWLMKKPLQLTVLVPLHEYQERLLQQTALPKEQKELLQKLFLKYDALWQHWENQVGHRRIKPHNIATGTLAPRPQKQYPINPKAKPSIQIVIDDLLKQGVLIQQNSTMNTPVYPVPKPDGKWRMVLDYREVNKTIPLIAAQNQHSAGILSSIYRGKYKTTLDLTNGFWAHPITPESYWLTAFTWQGKQYCWTRLPQGFLNSPALFTADVVDLLKEIPNVQAYVDDIYISHDDPQEHLEQLEKIFSILLNAGYVVSLKKSEIAQREVEFLGFNITKEGRGLTDTFKQKLLNITPPKDLKQLQSILGLLNFARNFIPNYSELVKPLYTIVANANGKFISWTEDNSNQLQHIISVLNQADNLEERNPETRLIIKVNSSPSAGYIRYYNEGSKRPIMYVNYIFSKAEAKFTQTEKLLTTMHKGLIKAMDLAMGQEILVYSPIVSMTKIQRTPLPERKALPVRWITWMTYLEDPRIQFHYDKSLPELQQIPNVTEDVIAKTKHPSEFAMVFYTDGSAIKHPDVNKSHSAGMGIAQVQFIPEYKIVHQWSIPLGDHTAQLAEIAAVEFACKKALKISGPVLIVTDSFYVAESANKELPYWKSNGFLNNKKKPLRHVSKWKSIAECLQLKPDIIIMHEKGHQQPMTTLHTEGNNLADKLATQGSYVVHAGKRTADGSEFEKRTADGSEFESPKKKAKVE

SEQ ID NO: 6438 - protein, 2110 aa, synthetic construct
MPAAKRVKLDGGDKKYSIGLDIGTNSVGWAVITDEYKVPSKKFKVLGNTDRHSIKKNLIGALLFDSGETAEATRLKRTARRRYTRRKNRICYLQEIFSNEMAKVDDSFFHRLEESFLVEEDKKHERHPIFGNIVDEVAYHEKYPTIYHLRKKLVDSTDKADLRLIYLALAHMIKFRGHFLIEGDLNPDNSDVDKLFIQLVQTYNQLFEENPINASGVDAKAILSARLSKSRRLENLIAQLPGEKKNGLFGNLIALSLGLTPNFKSNFDLAEDAKLQLSKDTYDDDLDNLLAQIGDQYADLFLAAKNLSDAILLSDILRVNTEITKAPLSASMIKRYDEHHQDLTLLKALVRQQLPEKYKEIFFDQSKNGYAGYIDGGASQEEFYKFIKPILEKMDGTEELLVKLNREDLLRKQRTFDNGSIPHQIHLGELHAILRRQEDFYPFLKDNREKIEKILTFRIPYYVGPLARGNSRFAWMTRKSEETITPWNFEEVVDKGASAQSFIERMTNFDKNLPNEKVLPKHSLLYEYFTVYNELTKVKYVTEGMRKPAFLSGEQKKAIVDLLFKTNRKVTVKQLKEDYFKKIECFDSVEISGVEDRFNASLGTYHDLLKIIKDKDFLDNEENEDILEDIVLTLTLFEDREMIEERLKTYAHLFDDKVMKQLKRRRYTGWGRLSRKLINGIRDKQSGKTILDFLKSDGFANRNFMQLIHDDSLTFKEDIQKAQVSGQGDSLHEHIANLAGSPAIKKGILQTVKVVDELVKVMGRHKPENIVIEMARENQTTQKGQKNSRERMKRIEEGIKELGSQILKEHPVENTQLQNEKLYLYYLQNGRDMYVDQELDINRLSDYDVDHIVPQSFLKDDSIDNKVLTRSDKARGKSDNVPSEEVVKKMKNYWRQLLNAKLITQRKFDNLTKAERGGLSELDKAGFIKRQLVETRQITKHVAQILDSRMNTKYDENDKLIREVKVITLKSKLVSDFRKDFQFYKVREINNYHHAHDAYLNAVVGTALIKKYPKLESEFVYGDYKVYDVRKMIAKSEQEIGKATAKYFFYSNIMNFFKTEITLANGEIRKRPLIETNGETGEIVWDKGRDFATVRKVLSMPQVNIVKKTEVQTGGFSKESILPKRNSDKLIARKKDWDPKKYGGFDSPTVAYSVLVVAKVEKGKSKKLKSVKELLGITIMERSSFEKNPIDFLEAKGYKEVKKDLIIKLPKYSLFELENGRKRMLASAGELQKGNELALPSKYVNFLYLASHYEKLKGSPEDNEQKQLFVEQHKHYLDEIIEQISEFSKRVILADANLDKVLSAYNKHRDKPIREQAENIIHLFTLTNLGAPAAFKYFDTTIDRKRYTSTKEVLDATLIHQSITGLYETRIDLSQLGGDGGEAAAKEAAAKEAAAKEAAAKEAAAKGGTLNIEDEYRLHETSKEPDVPLGSTWLSDFPQAWAETGGMGLAVRQAPLIIPLKATSTPVSIKQYPMSQEARLGIKPHIQRLLDQGILVPCQSPWNTPLLPVKKPGTNDYRPVQDLREVNKRVEDIHPTVPNPYNLLSGLPPSHQWYTVLDLKDAFFCLRLHPTSQPLFAFEWRDPEMGISGQLTWTRLPQGFKNSPTLFDEALHRDLADFRIQHPDLILLQYVDDLLLAATSEQDCQRGTRALLQTLGNLGYRASAKKAQICQKQVKYLGYLLKEGQRWLTEARKETVMGQPTPKTPRQLREFLGTAGFCRLWIPGFAEMAAPLYPLTKTGTLFNWGPDQQKAYQEIKQALLTAPALGLPDLTKPFELFVDEKQGYAKGVLTQKLGPWRRPVAYLSKKLDPVAAGWPPCLRMVAAIAVLTKDAGKLTMGQPLVILAPHAVEALVKQPPDRWLSNARMTHYQAMLLDTDRVQFGPVVALNPATLLPLPEKEAPHDCLEILAETHGTRPDLTDQPIPDADYTWYTDGSSFLQEGQRRAGAAVTTETEVIWARALPAGTSAQRAELIALTQALKMAEGKKLNVYTDSRYAFATAHVHGEIYRRRGLLTSEGREIKNKNEILALLKALFLPKRLSIIHCPGHQKGNSAEARGNRMADQAAREAAMKAVLETSTLLAGKRTADGSEFEKRTADGSEFESPKKKAKVE

SEQ ID NO: 6439 - protein, 2110 aa, synthetic construct
MPAAKRVKLDGGDKKYSIGLDIGTNSVGWAVITDEYKVPSKKFKVLGNTDRHSIKKNLIGALLFDSGETAEATRLKRTARRRYTRRKNRICYLQEIFSNEMAKVDDSFFHRLEESFLVEEDKKHERHPIFGNIVDEVAYHEKYPTIYHLRKKLVDSTDKADLRLIYLALAHMIKFRGHFLIEGDLNPDNSDVDKLFIQLVQTYNQLFEENPINASGVDAKAILSARLSKSRRLENLIAQLPGEKKNGLFGNLIALSLGLTPNFKSNFDLAEDAKLQLSKDTYDDDLDNLLAQIGDQYADLFLAAKNLSDAILLSDILRVNTEITKAPLSASMIKRYDEHHQDLTLLKALVRQQLPEKYKEIFFDQSKNGYAGYIDGGASQEEFYKFIKPILEKMDGTEELLVKLNREDLLRKQRTFDNGSIPHQIHLGELHAILRRQEDFYPFLKDNREKIEKILTFRIPYYVGPLARGNSRFAWMTRKSEETITPWNFEEVVDKGASAQSFIERMTNFDKNLPNEKVLPKHSLLYEYFTVYNELTKVKYVTEGMRKPAFLSGEQKKAIVDLLFKTNRKVTVKQLKEDYFKKIECFDSVEISGVEDRFNASLGTYHDLLKIIKDKDFLDNEENEDILEDIVLTLTLFEDREMIEERLKTYAHLFDDKVMKQLKRRRYTGWGRLSRKLINGIRDKQSGKTILDFLKSDGFANRNFMQLIHDDSLTFKEDIQKAQVSGQGDSLHEHIANLAGSPAIKKGILQTVKVVDELVKVMGRHKPENIVIEMARENQTTQKGQKNSRERMKRIEEGIKELGSQILKEHPVENTQLQNEKLYLYYLQNGRDMYVDQELDINRLSDYDVDHIVPQSFLKDDSIDNKVLTRSDKARGKSDNVPSEEVVKKMKNYWRQLLNAKLITQRKFDNLTKAERGGLSELDKAGFIKRQLVETRQITKHVAQILDSRMNTKYDENDKLIREVKVITLKSKLVSDFRKDFQFYKVREINNYHHAHDAYLNAVVGTALIKKYPKLESEFVYGDYKVYDVRKMIAKSEQEIGKATAKYFFYSNIMNFFKTEITLANGEIRKRPLIETNGETGEIVWDKGRDFATVRKVLSMPQVNIVKKTEVQTGGFSKESILPKRNSDKLIARKKDWDPKKYGGFDSPTVAYSVLVVAKVEKGKSKKLKSVKELLGITIMERSSFEKNPIDFLEAKGYKEVKKDLIIKLPKYSLFELENGRKRMLASAGELQKGNELALPSKYVNFLYLASHYEKLKGSPEDNEQKQLFVEQHKHYLDEIIEQISEFSKRVILADANLDKVLSAYNKHRDKPIREQAENIIHLFTLTNLGAPAAFKYFDTTIDRKRYTSTKEVLDATLIHQSITGLYETRIDLSQLGGDGGEAAAKEAAAKEAAAKEAAAKEAAAKGGTLNIEDEYRLHETSKEPDVPLGSTWLSDFPQAWAETGGMGLAVRQAPLIIPLKATSTPVSIKQYPMSQEARLGIKPHIQRLLDQGILVPCQSPWNTPLLPVKKPGTNDYRPVQDLREVNKRVEDIHPTVPNPYNLLSGLPPSHQWYTVLDLKDAFFCLRLHPTSQPLFAFEWRDPEMGISGQLTWTRLPQGFKNSPTLFNEALHRDLADFRIQHPDLILLQYVDDLLLAATSEQDCQRGTRALLQTLGNLGYRASAKKAQICQKQVKYLGYLLKEGQRWLTEARKETVMGQPTPKTPRQLREFLGTAGFCRLWIPGFAEMAAPLYPLTKPGTLFNWGPDQQKAYQEIKQALLTAPALGLPDLTKPFELFVDEKQGYAKGVLTQKLGPWRRPVAYLSKKLDPVAAGWPPCLRMVAAIAVLTKDAGKLTMGQPLVILAPHAVEALVKQPPDRWLSNARMTHYQAMLLDTDRVQFGPVVALNPATLLPLPEKEAPHDCLEILAETHGTRPDLTDQPIPDADYTWYTDGSSFLQEGQRRAGAAVTTETEVIWARALPAGTSAQRAELIALTQALKMAEGKKLNVYTDSRYAFATAHVHGEIYRRRGWLTSEGREIKNKNEILALLKALFLPKRLSIIHCPGHQKGNSAEARGNRMADQAAREAAMKAVLETSTLLAGKRTADGSEFEKRTADGSEFESPKKKAKVE

SEQ ID NO: 6440 - protein, 2117 aa, synthetic construct
MPAAKRVKLDGGDKKYSIGLDIGTNSVGWAVITDEYKVPSKKFKVLGNTDRHSIKKNLIGALLFDSGETAEATRLKRTARRRYTRRKNRICYLQEIFSNEMAKVDDSFFHRLEESFLVEEDKKHERHPIFGNIVDEVAYHEKYPTIYHLRKKLVDSTDKADLRLIYLALAHMIKFRGHFLIEGDLNPDNSDVDKLFIQLVQTYNQLFEENPINASGVDAKAILSARLSKSRRLENLIAQLPGEKKNGLFGNLIALSLGLTPNFKSNFDLAEDAKLQLSKDTYDDDLDNLLAQIGDQYADLFLAAKNLSDAILLSDILRVNTEITKAPLSASMIKRYDEHHQDLTLLKALVRQQLPEKYKEIFFDQSKNGYAGYIDGGASQEEFYKFIKPILEKMDGTEELLVKLNREDLLRKQRTFDNGSIPHQIHLGELHAILRRQEDFYPFLKDNREKIEKILTFRIPYYVGPLARGNSRFAWMTRKSEETITPWNFEEVVDKGASAQSFIERMTNFDKNLPNEKVLPKHSLLYEYFTVYNELTKVKYVTEGMRKPAFLSGEQKKAIVDLLFKTNRKVTVKQLKEDYFKKIECFDSVEISGVEDRFNASLGTYHDLLKIIKDKDFLDNEENEDILEDIVLTLTLFEDREMIEERLKTYAHLFDDKVMKQLKRRRYTGWGRLSRKLINGIRDKQSGKTILDFLKSDGFANRNFMQLIHDDSLTFKEDIQKAQVSGQGDSLHEHIANLAGSPAIKKGILQTVKVVDELVKVMGRHKPENIVIEMARENQTTQKGQKNSRERMKRIEEGIKELGSQILKEHPVENTQLQNEKLYLYYLQNGRDMYVDQELDINRLSDYDVDHIVPQSFLKDDSIDNKVLTRSDKARGKSDNVPSEEVVKKMKNYWRQLLNAKLITQRKFDNLTKAERGGLSELDKAGFIKRQLVETRQITKHVAQILDSRMNTKYDENDKLIREVKVITLKSKLVSDFRKDFQFYKVREINNYHHAHDAYLNAVVGTALIKKYPKLESEFVYGDYKVYDVRKMIAKSEQEIGKATAKYFFYSNIMNFFKTEITLANGEIRKRPLIETNGETGEIVWDKGRDFATVRKVLSMPQVNIVKKTEVQTGGFSKESILPKRNSDKLIARKKDWDPKKYGGFDSPTVAYSVLVVAKVEKGKSKKLKSVKELLGITIMERSSFEKNPIDFLEAKGYKEVKKDLIIKLPKYSLFELENGRKRMLASAGELQKGNELALPSKYVNFLYLASHYEKLKGSPEDNEQKQLFVEQHKHYLDEIIEQISEFSKRVILADANLDKVLSAYNKHRDKPIREQAENIIHLFTLTNLGAPAAFKYFDTTIDRKRYTSTKEVLDATLIHQSITGLYETRIDLSQLGGDGGEAAAKEAAAKEAAAKEAAAKEAAAKEAAAKGGTAPLEEEYRLFLEAPIQNVTLLEQWKREIPKVWAEINPPGLASTQAPIHVQLLSTALPVRVRQYPITLEAKRSLRETIRKFRAAGILRPVHSPWNTPLLPVRKSGTSEYRMVQDLREVNKRVETIHPTVPNPYTLLSLLPPDRIWYSVLDLKDAFFCIPLAPESQLIFAFEWADAEEGESGQLTWTRLPQGFKNSPTLFDEALNRDLQGFRLDHPSVSLLQYVDDLLIAADTQAACLSATRDLLMTLAELGYRVSGKKAQLCQEEVTYLGFKIHKGSRSLSNSRTQAILQIPVPKTKRQVREFLGTIGYCRLWIPGFAELAQPLYAATRGGNDPLVWGEKEEEAFQSLKLALTQPPALALPSLDKPFQLFVEETSGAAKGVLTQALGPWKRPVAYLSKRLDPVAAGWPRCLRAIAAAALLTREASKLTFGQDIEITSSHNLESLLRSPPDKWLTNARITQYQVLLLDPPRVRFKQTAALNPATLLPETDDTLPIHHCLDTLDSLTSTRPDLTDQPLAQAEATLFTDGSSYIRDGKRYAGAAVVTLDSVIWAEPLPIGTSAQKAELIALTKALEWSKDKSVNIYTDSRYAFATLHVHGMIYRERGLLTAGGKAIKNAPEILALLTAVWLPKRVAVMHCKGHQKDDAPTSTGNRRADEVAREVAIRPLSTQATISAGKRTADGSEFEKRTADGSEFESPKKKAKVE

SEQ ID NO: 6441 - protein, 2117 aa, synthetic construct
MPAAKRVKLDGGDKKYSIGLDIGTNSVGWAVITDEYKVPSKKFKVLGNTDRHSIKKNLIGALLFDSGETAEATRLKRTARRRYTRRKNRICYLQEIFSNEMAKVDDSFFHRLEESFLVEEDKKHERHPIFGNIVDEVAYHEKYPTIYHLRKKLVDSTDKADLRLIYLALAHMIKFRGHFLIEGDLNPDNSDVDKLFIQLVQTYNQLFEENPINASGVDAKAILSARLSKSRRLENLIAQLPGEKKNGLFGNLIALSLGLTPNFKSNFDLAEDAKLQLSKDTYDDDLDNLLAQIGDQYADLFLAAKNLSDAILLSDILRVNTEITKAPLSASMIKRYDEHHQDLTLLKALVRQQLPEKYKEIFFDQSKNGYAGYIDGGASQEEFYKFIKPILEKMDGTEELLVKLNREDLLRKQRTFDNGSIPHQIHLGELHAILRRQEDFYPFLKDNREKIEKILTFRIPYYVGPLARGNSRFAWMTRKSEETITPWNFEEVVDKGASAQSFIERMTNFDKNLPNEKVLPKHSLLYEYFTVYNELTKVKYVTEGMRKPAFLSGEQKKAIVDLLFKTNRKVTVKQLKEDYFKKIECFDSVEISGVEDRFNASLGTYHDLLKIIKDKDFLDNEENEDILEDIVLTLTLFEDREMIEERLKTYAHLFDDKVMKQLKRRRYTGWGRLSRKLINGIRDKQSGKTILDFLKSDGFANRNFMQLIHDDSLTFKEDIQKAQVSGQGDSLHEHIANLAGSPAIKKGILQTVKVVDELVKVMGRHKPENIVIEMARENQTTQKGQKNSRERMKRIEEGIKELGSQILKEHPVENTQLQNEKLYLYYLQNGRDMYVDQELDINRLSDYDVDHIVPQSFLKDDSIDNKVLTRSDKARGKSDNVPSEEVVKKMKNYWRQLLNAKLITQRKFDNLTKAERGGLSELDKAGFIKRQLVETRQITKHVAQILDSRMNTKYDENDKLIREVKVITLKSKLVSDFRKDFQFYKVREINNYHHAHDAYLNAVVGTALIKKYPKLESEFVYGDYKVYDVRKMIAKSEQEIGKATAKYFFYSNIMNFFKTEITLANGEIRKRPLIETNGETGEIVWDKGRDFATVRKVLSMPQVNIVKKTEVQTGGFSKESILPKRNSDKLIARKKDWDPKKYGGFDSPTVAYSVLVVAKVEKGKSKKLKSVKELLGITIMERSSFEKNPIDFLEAKGYKEVKKDLIIKLPKYSLFELENGRKRMLASAGELQKGNELALPSKYVNFLYLASHYEKLKGSPEDNEQKQLFVEQHKHYLDEIIEQISEFSKRVILADANLDKVLSAYNKHRDKPIREQAENIIHLFTLTNLGAPAAFKYFDTTIDRKRYTSTKEVLDATLIHQSITGLYETRIDLSQLGGDGGEAAAKEAAAKEAAAKEAAAKEAAAKEAAAKGGTAPLEEEYRLFLEAPIQNVTLLEQWKREIPKVWAEINPPGLASTQAPIHVQLLSTALPVRVRQYPITLEAKRSLRETIRKFRAAGILRPVHSPWNTPLLPVRKSGTSEYRMVQDLREVNKRVETIHPTVPNPYTLLSLLPPDRIWYSVLDLKDAFFCIPLAPESQLIFAFEWADAEEGESGQLTWTRLPQGFKNSPTLFNEALNRDLQGFRLDHPSVSLLQYVDDLLIAADTQAACLSATRDLLMTLAELGYRVSGKKAQLCQEEVTYLGFKIHKGSRSLSNSRTQAILQIPVPKTKRQVREFLGTIGYCRLWIPGFAELAQPLYAATRPGNDPLVWGEKEEEAFQSLKLALTQPPALALPSLDKPFQLFVEETSGAAKGVLTQALGPWKRPVAYLSKRLDPVAAGWPRCLRAIAAAALLTREASKLTFGQDIEITSSHNLESLLRSPPDKWLTNARITQYQVLLLDPPRVRFKQTAALNPATLLPETDDTLPIHHCLDTLDSLTSTRPDLTDQPLAQAEATLFTDGSSYIRDGKRYAGAAVVTLDSVIWAEPLPIGTSAQKAELIALTKALEWSKDKSVNIYTDSRYAFATLHVHGMIYRERGWLTAGGKAIKNAPEILALLTAVWLPKRVAVMHCKGHQKDDAPTSTGNRRADEVAREVAIRPLSTQATISAGKRTADGSEFEKRTADGSEFESPKKKAKVE

SEQ ID NO: 6442 - protein, 2121 aa, synthetic construct
MPAAKRVKLDGGDKKYSIGLDIGTNSVGWAVITDEYKVPSKKFKVLGNTDRHSIKKNLIGALLFDSGETAEATRLKRTARRRYTRRKNRICYLQEIFSNEMAKVDDSFFHRLEESFLVEEDKKHERHPIFGNIVDEVAYHEKYPTIYHLRKKLVDSTDKADLRLIYLALAHMIKFRGHFLIEGDLNPDNSDVDKLFIQLVQTYNQLFEENPINASGVDAKAILSARLSKSRRLENLIAQLPGEKKNGLFGNLIALSLGLTPNFKSNFDLAEDAKLQLSKDTYDDDLDNLLAQIGDQYADLFLAAKNLSDAILLSDILRVNTEITKAPLSASMIKRYDEHHQDLTLLKALVRQQLPEKYKEIFFDQSKNGYAGYIDGGASQEEFYKFIKPILEKMDGTEELLVKLNREDLLRKQRTFDNGSIPHQIHLGELHAILRRQEDFYPFLKDNREKIEKILTFRIPYYVGPLARGNSRFAWMTRKSEETITPWNFEEVVDKGASAQSFIERMTNFDKNLPNEKVLPKHSLLYEYFTVYNELTKVKYVTEGMRKPAFLSGEQKKAIVDLLFKTNRKVTVKQLKEDYFKKIECFDSVEISGVEDRFNASLGTYHDLLKIIKDKDFLDNEENEDILEDIVLTLTLFEDREMIEERLKTYAHLFDDKVMKQLKRRRYTGWGRLSRKLINGIRDKQSGKTILDFLKSDGFANRNFMQLIHDDSLTFKEDIQKAQVSGQGDSLHEHIANLAGSPAIKKGILQTVKVVDELVKVMGRHKPENIVIEMARENQTTQKGQKNSRERMKRIEEGIKELGSQILKEHPVENTQLQNEKLYLYYLQNGRDMYVDQELDINRLSDYDVDHIVPQSFLKDDSIDNKVLTRSDKARGKSDNVPSEEVVKKMKNYWRQLLNAKLITQRKFDNLTKAERGGLSELDKAGFIKRQLVETRQITKHVAQILDSRMNTKYDENDKLIREVKVITLKSKLVSDFRKDFQFYKVREINNYHHAHDAYLNAVVGTALIKKYPKLESEFVYGDYKVYDVRKMIAKSEQEIGKATAKYFFYSNIMNFFKTEITLANGEIRKRPLIETNGETGEIVWDKGRDFATVRKVLSMPQVNIVKKTEVQTGGFSKESILPKRNSDKLIARKKDWDPKKYGGFDSPTVAYSVLVVAKVEKGKSKKLKSVKELLGITIMERSSFEKNPIDFLEAKGYKEVKKDLIIKLPKYSLFELENGRKRMLASAGELQKGNELALPSKYVNFLYLASHYEKLKGSPEDNEQKQLFVEQHKHYLDEIIEQISEFSKRVILADANLDKVLSAYNKHRDKPIREQAENIIHLFTLTNLGAPAAFKYFDTTIDRKRYTSTKEVLDATLIHQSITGLYETRIDLSQLGGDGGEAAAKEAAAKEAAAKEAAAKEAAAKEAAAKGGTVSLQDEHRLFDIPVTTSLPDVWLQDFPQAWAETGGLGRAKCQAPIIIDLKPTAVPVSIKQYPMSLEAHMGIRQHIIKFLELGVLRPCRSPWNTPLLPVKKPGTQDYRPVQDLREINKRTVDIHPTVPNPYNLLSTLKPDYSWYTVLDLKDAFFCLPLAPQSQELFAFEWKDPERGISGQLTWTRLPQGFKNSPTLFDEALHRDLTDFRTQHPEVTLLQYVDDLLLAAPTKKACTQGTRHLLQELGEKGYRASAKKAQICQTKVTYLGYILSEGKRWLTPGRIETVARIPPPRNPREVREFLGTAGFCRLWIPGFAELAAPLYALTKESTPFTWQTEHQLAFEALKKALLSAPALGLPDTSKPFTLFLDERQGIAKGVLTQKLGPWKRPVAYLSKKLDPVAAGWPPCLRIMAATAMLVKDSAKLTLGQPLTVITPHTLEAIVRQPPDRWITNARLTHYQALLLDTDRVQFGPPVTLNPATLLPVPENQPSPHDCRQVLAETHGTREDLKDQELPDADHTWYTDGSSYLDSGTRRAGAAVVDGHNTIWAQSLPPGTSAQKAELIALTKALELSKGKKANIYTDSRYAFATAHTHGSIYERRGLLTSEGKEIKNKAEIIALLKALFLPQEVAIIHCPGHQKGQDPVAVGNRQADRVARQAAMAEVLTLATEPDNTSHITAGKRTADGSEFEKRTADGSEFESPKKKAKVE

SEQ ID NO: 6443 - protein, 2192 aa, synthetic construct
MPAAKRVKLDGGDKKYSIGLDIGTNSVGWAVITDEYKVPSKKFKVLGNTDRHSIKKNLIGALLFDSGETAEATRLKRTARRRYTRRKNRICYLQEIFSNEMAKVDDSFFHRLEESFLVEEDKKHERHPIFGNIVDEVAYHEKYPTIYHLRKKLVDSTDKADLRLIYLALAHMIKFRGHFLIEGDLNPDNSDVDKLFIQLVQTYNQLFEENPINASGVDAKAILSARLSKSRRLENLIAQLPGEKKNGLFGNLIALSLGLTPNFKSNFDLAEDAKLQLSKDTYDDDLDNLLAQIGDQYADLFLAAKNLSDAILLSDILRVNTEITKAPLSASMIKRYDEHHQDLTLLKALVRQQLPEKYKEIFFDQSKNGYAGYIDGGASQEEFYKFIKPILEKMDGTEELLVKLNREDLLRKQRTFDNGSIPHQIHLGELHAILRRQEDFYPFLKDNREKIEKILTFRIPYYVGPLARGNSRFAWMTRKSEETITPWNFEEVVDKGASAQSFIERMTNFDKNLPNEKVLPKHSLLYEYFTVYNELTKVKYVTEGMRKPAFLSGEQKKAIVDLLFKTNRKVTVKQLKEDYFKKIECFDSVEISGVEDRFNASLGTYHDLLKIIKDKDFLDNEENEDILEDIVLTLTLFEDREMIEERLKTYAHLFDDKVMKQLKRRRYTGWGRLSRKLINGIRDKQSGKTILDFLKSDGFANRNFMQLIHDDSLTFKEDIQKAQVSGQGDSLHEHIANLAGSPAIKKGILQTVKVVDELVKVMGRHKPENIVIEMARENQTTQKGQKNSRERMKRIEEGIKELGSQILKEHPVENTQLQNEKLYLYYLQNGRDMYVDQELDINRLSDYDVDHIVPQSFLKDDSIDNKVLTRSDKARGKSDNVPSEEVVKKMKNYWRQLLNAKLITQRKFDNLTKAERGGLSELDKAGFIKRQLVETRQITKHVAQILDSRMNTKYDENDKLIREVKVITLKSKLVSDFRKDFQFYKVREINNYHHAHDAYLNAVVGTALIKKYPKLESEFVYGDYKVYDVRKMIAKSEQEIGKATAKYFFYSNIMNFFKTEITLANGEIRKRPLIETNGETGEIVWDKGRDFATVRKVLSMPQVNIVKKTEVQTGGFSKESILPKRNSDKLIARKKDWDPKKYGGFDSPTVAYSVLVVAKVEKGKSKKLKSVKELLGITIMERSSFEKNPIDFLEAKGYKEVKKDLIIKLPKYSLFELENGRKRMLASAGELQKGNELALPSKYVNFLYLASHYEKLKGSPEDNEQKQLFVEQHKHYLDEIIEQISEFSKRVILADANLDKVLSAYNKHRDKPIREQAENIIHLFTLTNLGAPAAFKYFDTTIDRKRYTSTKEVLDATLIHQSITGLYETRIDLSQLGGDGGEAAAKEAAAKEAAAKEAAAKEAAAKEAAAKGGMDLLKPLTVERKGVKIKGYWNSQADITCVPKDLLQGEEPVRQQNVTTIHGTQEGDVYYVNLKIDGRRINTEVIGTTLDYAIITPGDVPWILKKPLELTIKLDLEEQQGTLLNNSILSKKGKEELKQLFEKYSALWQSWENQVGHRRIRPHKIATGTVKPTPQKQYHINPKAKPDIQIVINDLLKQGVLIQKESTMNTPVYPVPKPNGRWRMVLDYRAVNKVTPLIAVQNQHSYGILGSLFKGRYKTTIDLSNGFWAHPIVPEDYWITAFTWQGKQYCWTVLPQGFLNSPGLFTGDVVDLLQGIPNVEVYVDDVYISHDSEKEHLEYLDILFNRLKEAGYIISLKKSNIANSIVDFLGFQITNEGRGLTDTFKEKLENITAPTTLKQLQSILGLLNFARNFIPDFTELIAPLYALIPKSTKNYVPWQIEHSTTLETLITKLNGAEYLQGRKGDKTLIMKVNASYTTGYIRYYNEGEKKPISYVSIVFSKTELKFTELEKLLTTVHKGLLKALDLSMGQNIHVYSPIVSMQNIQKTPQTAKKALASRWLSWLSYLEDPRIRFFYDPQMPALKDLPAVDTGKDNKKHPSNFQHIFYTDGSAITSPTKEGHLNAGMGIVYFINKDGNLQKQQEWSISLGNHTAQFAEIAAFEFALKKCLPLGGNILVVTDSNYVAKAYNEELDVWASNGFVNNRKKPLKHISKWKSVADLKRLRPDVVVTHEPGHQKLDSSPHAYGNNLADQLATQASFKVHAGKRTADGSEFEKRTADGSEFESPKKKAKVE

SEQ ID NO: 6444 - protein, 2106 aa, synthetic construct
MPAAKRVKLDGGDKKYSIGLDIGTNSVGWAVITDEYKVPSKKFKVLGNTDRHSIKKNLIGALLFDSGETAEATRLKRTARRRYTRRKNRICYLQEIFSNEMAKVDDSFFHRLEESFLVEEDKKHERHPIFGNIVDEVAYHEKYPTIYHLRKKLVDSTDKADLRLIYLALAHMIKFRGHFLIEGDLNPDNSDVDKLFIQLVQTYNQLFEENPINASGVDAKAILSARLSKSRRLENLIAQLPGEKKNGLFGNLIALSLGLTPNFKSNFDLAEDAKLQLSKDTYDDDLDNLLAQIGDQYADLFLAAKNLSDAILLSDILRVNTEITKAPLSASMIKRYDEHHQDLTLLKALVRQQLPEKYKEIFFDQSKNGYAGYIDGGASQEEFYKFIKPILEKMDGTEELLVKLNREDLLRKQRTFDNGSIPHQIHLGELHAILRRQEDFYPFLKDNREKIEKILTFRIPYYVGPLARGNSRFAWMTRKSEETITPWNFEEVVDKGASAQSFIERMTNFDKNLPNEKVLPKHSLLYEYFTVYNELTKVKYVTEGMRKPAFLSGEQKKAIVDLLFKTNRKVTVKQLKEDYFKKIECFDSVEISGVEDRFNASLGTYHDLLKIIKDKDFLDNEENEDILEDIVLTLTLFEDREMIEERLKTYAHLFDDKVMKQLKRRRYTGWGRLSRKLINGIRDKQSGKTILDFLKSDGFANRNFMQLIHDDSLTFKEDIQKAQVSGQGDSLHEHIANLAGSPAIKKGILQTVKVVDELVKVMGRHKPENIVIEMARENQTTQKGQKNSRERMKRIEEGIKELGSQILKEHPVENTQLQNEKLYLYYLQNGRDMYVDQELDINRLSDYDVDHIVPQSFLKDDSIDNKVLTRSDKARGKSDNVPSEEVVKKMKNYWRQLLNAKLITQRKFDNLTKAERGGLSELDKAGFIKRQLVETRQITKHVAQILDSRMNTKYDENDKLIREVKVITLKSKLVSDFRKDFQFYKVREINNYHHAHDAYLNAVVGTALIKKYPKLESEFVYGDYKVYDVRKMIAKSEQEIGKATAKYFFYSNIMNFFKTEITLANGEIRKRPLIETNGETGEIVWDKGRDFATVRKVLSMPQVNIVKKTEVQTGGFSKESILPKRNSDKLIARKKDWDPKKYGGFDSPTVAYSVLVVAKVEKGKSKKLKSVKELLGITIMERSSFEKNPIDFLEAKGYKEVKKDLIIKLPKYSLFELENGRKRMLASAGELQKGNELALPSKYVNFLYLASHYEKLKGSPEDNEQKQLFVEQHKHYLDEIIEQISEFSKRVILADANLDKVLSAYNKHRDKPIREQAENIIHLFTLTNLGAPAAFKYFDTTIDRKRYTSTKEVLDATLIHQSITGLYETRIDLSQLGGDGGEAAAKEAAAKEAAAKEAAAKEAAAKEAAAKGGVPWILKKPLELTIKLDLEEQQGTLLNNSILSKKGKEELKQLFEKYSALWQSWENQVGHRRIRPHKIATGTVKPTPQKQYHINPKAKPDIQIVINDLLKQGVLIQKESTMNTPVYPVPKPNGRWRMVLDYRAVNKVTPLIAVQNQHSYGILGSLFKGRYKTTIDLSNGFWAHPIVPEDYWITAFTWQGKQYCWTVLPQGFLNSPGLFTGDVVDLLQGIPNVEVYVDDVYISHDSEKEHLEYLDILFNRLKEAGYIISLKKSNIANSIVDFLGFQITNEGRGLTDTFKEKLENITAPTTLKQLQSILGLLNFARNFIPDFTELIAPLYALIPKSTKNYVPWQIEHSTTLETLITKLNGAEYLQGRKGDKTLIMKVNASYTTGYIRYYNEGEKKPISYVSIVFSKTELKFTELEKLLTTVHKGLLKALDLSMGQNIHVYSPIVSMQNIQKTPQTAKKALASRWLSWLSYLEDPRIRFFYDPQMPALKDLPAVDTGKDNKKHPSNFQHIFYTDGSAITSPTKEGHLNAGMGIVYFINKDGNLQKQQEWSISLGNHTAQFAEIAAFEFALKKCLPLGGNILVVTDSNYVAKAYNEELDVWASNGFVNNRKKPLKHISKWKSVADLKRLRPDVVVTHEPGHQKLDSSPHAYGNNLADQLATQASFKVHAGKRTADGSEFEKRTADGSEFESPKKKAKVE

SEQ ID NO: 6445 - protein, 2192 aa, synthetic construct
MPAAKRVKLDGGDKKYSIGLDIGTNSVGWAVITDEYKVPSKKFKVLGNTDRHSIKKNLIGALLFDSGETAEATRLKRTARRRYTRRKNRICYLQEIFSNEMAKVDDSFFHRLEESFLVEEDKKHERHPIFGNIVDEVAYHEKYPTIYHLRKKLVDSTDKADLRLIYLALAHMIKFRGHFLIEGDLNPDNSDVDKLFIQLVQTYNQLFEENPINASGVDAKAILSARLSKSRRLENLIAQLPGEKKNGLFGNLIALSLGLTPNFKSNFDLAEDAKLQLSKDTYDDDLDNLLAQIGDQYADLFLAAKNLSDAILLSDILRVNTEITKAPLSASMIKRYDEHHQDLTLLKALVRQQLPEKYKEIFFDQSKNGYAGYIDGGASQEEFYKFIKPILEKMDGTEELLVKLNREDLLRKQRTFDNGSIPHQIHLGELHAILRRQEDFYPFLKDNREKIEKILTFRIPYYVGPLARGNSRFAWMTRKSEETITPWNFEEVVDKGASAQSFIERMTNFDKNLPNEKVLPKHSLLYEYFTVYNELTKVKYVTEGMRKPAFLSGEQKKAIVDLLFKTNRKVTVKQLKEDYFKKIECFDSVEISGVEDRFNASLGTYHDLLKIIKDKDFLDNEENEDILEDIVLTLTLFEDREMIEERLKTYAHLFDDKVMKQLKRRRYTGWGRLSRKLINGIRDKQSGKTILDFLKSDGFANRNFMQLIHDDSLTFKEDIQKAQVSGQGDSLHEHIANLAGSPAIKKGILQTVKVVDELVKVMGRHKPENIVIEMARENQTTQKGQKNSRERMKRIEEGIKELGSQILKEHPVENTQLQNEKLYLYYLQNGRDMYVDQELDINRLSDYDVDHIVPQSFLKDDSIDNKVLTRSDKARGKSDNVPSEEVVKKMKNYWRQLLNAKLITQRKFDNLTKAERGGLSELDKAGFIKRQLVETRQITKHVAQILDSRMNTKYDENDKLIREVKVITLKSKLVSDFRKDFQFYKVREINNYHHAHDAYLNAVVGTALIKKYPKLESEFVYGDYKVYDVRKMIAKSEQEIGKATAKYFFYSNIMNFFKTEITLANGEIRKRPLIETNGETGEIVWDKGRDFATVRKVLSMPQVNIVKKTEVQTGGFSKESILPKRNSDKLIARKKDWDPKKYGGFDSPTVAYSVLVVAKVEKGKSKKLKSVKELLGITIMERSSFEKNPIDFLEAKGYKEVKKDLIIKLPKYSLFELENGRKRMLASAGELQKGNELALPSKYVNFLYLASHYEKLKGSPEDNEQKQLFVEQHKHYLDEIIEQISEFSKRVILADANLDKVLSAYNKHRDKPIREQAENIIHLFTLTNLGAPAAFKYFDTTIDRKRYTSTKEVLDATLIHQSITGLYETRIDLSQLGGDGGEAAAKEAAAKEAAAKEAAAKEAAAKEAAAKGGMDLLKPLTVERKGVKIKGYWNSQADITCVPKDLLQGEEPVRQQNVTTIHGTQEGDVYYVNLKIDGRRINTEVIGTTLDYAIITPGDVPWILKKPLELTIKLDLEEQQGTLLNNSILSKKGKEELKQLFEKYSALWQSWENQVGHRRIRPHKIATGTVKPTPQKQYHINPKAKPDIQIVINDLLKQGVLIQKESTMNTPVYPVPKPNGRWRMVLDYRAVNKVTPLIAVQNQHSYGILGSLFKGRYKTTIDLSNGFWAHPIVPEDYWITAFTWQGKQYCWTVLPQGFLNSPGLFNGDVVDLLQGIPNVEVYVDDVYISHDSEKEHLEYLDILFNRLKEAGYIISLKKSNIANSIVDFLGFQITNEGRGLTDTFKEKLENITAPTTLKQLQSILGLLNFARNFIPDFTELIAPLYALIPKSPKNYVPWQIEHSTTLETLITKLNGAEYLQGRKGDKTLIMKVNASYTTGYIRYYNEGEKKPISYVSIVFSKTELKFTELEKLLTTVHKGLLKALDLSMGQNIHVYSPIVSMQNIQKTPQTAKKALASRWLSWLSYLEDPRIRFFYDPQMPALKDLPAVDTGKDNKKHPSNFQHIFYTDGSAITSPTKEGHLNAGMGIVYFINKDGNLQKQQEWSISLGNHTAQFAEIAAFEFALKKCLPLGGNILVVTDSNYVAKAYNEELDVWASNGFVNNRKKPLKHISKWKSVADLKRLRPDVVVTHEPGHQKLDSSPHAYGNNLADQLATQASFKVHAGKRTADGSEFEKRTADGSEFESPKKKAKVE

SEQ ID NO: 6446 - protein, 2192 aa, synthetic construct
MPAAKRVKLDGGDKKYSIGLDIGTNSVGWAVITDEYKVPSKKFKVLGNTDRHSIKKNLIGALLFDSGETAEATRLKRTARRRYTRRKNRICYLQEIFSNEMAKVDDSFFHRLEESFLVEEDKKHERHPIFGNIVDEVAYHEKYPTIYHLRKKLVDSTDKADLRLIYLALAHMIKFRGHFLIEGDLNPDNSDVDKLFIQLVQTYNQLFEENPINASGVDAKAILSARLSKSRRLENLIAQLPGEKKNGLFGNLIALSLGLTPNFKSNFDLAEDAKLQLSKDTYDDDLDNLLAQIGDQYADLFLAAKNLSDAILLSDILRVNTEITKAPLSASMIKRYDEHHQDLTLLKALVRQQLPEKYKEIFFDQSKNGYAGYIDGGASQEEFYKFIKPILEKMDGTEELLVKLNREDLLRKQRTFDNGSIPHQIHLGELHAILRRQEDFYPFLKDNREKIEKILTFRIPYYVGPLARGNSRFAWMTRKSEETITPWNFEEVVDKGASAQSFIERMTNFDKNLPNEKVLPKHSLLYEYFTVYNELTKVKYVTEGMRKPAFLSGEQKKAIVDLLFKTNRKVTVKQLKEDYFKKIECFDSVEISGVEDRFNASLGTYHDLLKIIKDKDFLDNEENEDILEDIVLTLTLFEDREMIEERLKTYAHLFDDKVMKQLKRRRYTGWGRLSRKLINGIRDKQSGKTILDFLKSDGFANRNFMQLIHDDSLTFKEDIQKAQVSGQGDSLHEHIANLAGSPAIKKGILQTVKVVDELVKVMGRHKPENIVIEMARENQTTQKGQKNSRERMKRIEEGIKELGSQILKEHPVENTQLQNEKLYLYYLQNGRDMYVDQELDINRLSDYDVDHIVPQSFLKDDSIDNKVLTRSDKARGKSDNVPSEEVVKKMKNYWRQLLNAKLITQRKFDNLTKAERGGLSELDKAGFIKRQLVETRQITKHVAQILDSRMNTKYDENDKLIREVKVITLKSKLVSDFRKDFQFYKVREINNYHHAHDAYLNAVVGTALIKKYPKLESEFVYGDYKVYDVRKMIAKSEQEIGKATAKYFFYSNIMNFFKTEITLANGEIRKRPLIETNGETGEIVWDKGRDFATVRKVLSMPQVNIVKKTEVQTGGFSKESILPKRNSDKLIARKKDWDPKKYGGFDSPTVAYSVLVVAKVEKGKSKKLKSVKELLGITIMERSSFEKNPIDFLEAKGYKEVKKDLIIKLPKYSLFELENGRKRMLASAGELQKGNELALPSKYVNFLYLASHYEKLKGSPEDNEQKQLFVEQHKHYLDEIIEQISEFSKRVILADANLDKVLSAYNKHRDKPIREQAENIIHLFTLTNLGAPAAFKYFDTTIDRKRYTSTKEVLDATLIHQSITGLYETRIDLSQLGGDGGEAAAKEAAAKEAAAKEAAAKEAAAKEAAAKGGMDLLKPLTVERKGVKIKGYWNSQADITCVPKDLLQGEEPVRQQNVTTIHGTQEGDVYYVNLKIDGRRINTEVIGTTLDYAIITPGDVPWILKKPLELTIKLDLEEQQGTLLNNSILSKKGKEELKQLFEKYSALWQSWENQVGHRRIRPHKIATGTVKPTPQKQYHINPKAKPDIQIVINDLLKQGVLIQKESTMNTPVYPVPKPNGRWRMVLDYRAVNKVTPLIAVQNQHSYGILGSLFKGRYKTTIDLSNGFWAHPIVPEDYWITAFTWQGKQYCWTVLPQGFLNSPGLFNGDVVDLLQGIPNVEVYVDDVYISHDSEKEHLEYLDILFNRLKEAGYIISLKKSNIANSIVDFLGFQITNEGRGLTDTFKEKLENITAPTTLKQLQSILGKLNFARNFIPDFTELIAPLYALIPKSPKNYVPWQIEHSTTLETLITKLNGAEYLQGRKGDKTLIMKVNASYTTGYIRYYNEGEKKPISYVSIVFSKTELKFTELEKLLTTVHKGLLKALDLSMGQNIHVYSPIVSMQNIQKTPQTAKKALASRWLSWLSYLEDPRIRFFYDPQMPALKDLPAVDTGKDNKKHPSNFQHIFYTDGSAITSPTKEGHLNAGMGIVYFINKDGNLQKQQEWSISLGNHTAQFAEIAAFEFALKKCLPLGGNILVVTDSNYVAKAYNEELDVWASNGFVNNRKKPLKHISKWKSVADLKRLRPDVVVTHEPGHQKLDSSPHAYGNNLADQLATQASFKVHAGKRTADGSEFEKRTADGSEFESPKKKAKVE

SEQ ID NO: 6447 - protein, 2195 aa, synthetic construct
MPAAKRVKLDGGDKKYSIGLDIGTNSVGWAVITDEYKVPSKKFKVLGNTDRHSIKKNLIGALLFDSGETAEATRLKRTARRRYTRRKNRICYLQEIFSNEMAKVDDSFFHRLEESFLVEEDKKHERHPIFGNIVDEVAYHEKYPTIYHLRKKLVDSTDKADLRLIYLALAHMIKFRGHFLIEGDLNPDNSDVDKLFIQLVQTYNQLFEENPINASGVDAKAILSARLSKSRRLENLIAQLPGEKKNGLFGNLIALSLGLTPNFKSNFDLAEDAKLQLSKDTYDDDLDNLLAQIGDQYADLFLAAKNLSDAILLSDILRVNTEITKAPLSASMIKRYDEHHQDLTLLKALVRQQLPEKYKEIFFDQSKNGYAGYIDGGASQEEFYKFIKPILEKMDGTEELLVKLNREDLLRKQRTFDNGSIPHQIHLGELHAILRRQEDFYPFLKDNREKIEKILTFRIPYYVGPLARGNSRFAWMTRKSEETITPWNFEEVVDKGASAQSFIERMTNFDKNLPNEKVLPKHSLLYEYFTVYNELTKVKYVTEGMRKPAFLSGEQKKAIVDLLFKTNRKVTVKQLKEDYFKKIECFDSVEISGVEDRFNASLGTYHDLLKIIKDKDFLDNEENEDILEDIVLTLTLFEDREMIEERLKTYAHLFDDKVMKQLKRRRYTGWGRLSRKLINGIRDKQSGKTILDFLKSDGFANRNFMQLIHDDSLTFKEDIQKAQVSGQGDSLHEHIANLAGSPAIKKGILQTVKVVDELVKVMGRHKPENIVIEMARENQTTQKGQKNSRERMKRIEEGIKELGSQILKEHPVENTQLQNEKLYLYYLQNGRDMYVDQELDINRLSDYDVDHIVPQSFLKDDSIDNKVLTRSDKARGKSDNVPSEEVVKKMKNYWRQLLNAKLITQRKFDNLTKAERGGLSELDKAGFIKRQLVETRQITKHVAQILDSRMNTKYDENDKLIREVKVITLKSKLVSDFRKDFQFYKVREINNYHHAHDAYLNAVVGTALIKKYPKLESEFVYGDYKVYDVRKMIAKSEQEIGKATAKYFFYSNIMNFFKTEITLANGEIRKRPLIETNGETGEIVWDKGRDFATVRKVLSMPQVNIVKKTEVQTGGFSKESILPKRNSDKLIARKKDWDPKKYGGFDSPTVAYSVLVVAKVEKGKSKKLKSVKELLGITIMERSSFEKNPIDFLEAKGYKEVKKDLIIKLPKYSLFELENGRKRMLASAGELQKGNELALPSKYVNFLYLASHYEKLKGSPEDNEQKQLFVEQHKHYLDEIIEQISEFSKRVILADANLDKVLSAYNKHRDKPIREQAENIIHLFTLTNLGAPAAFKYFDTTIDRKRYTSTKEVLDATLIHQSITGLYETRIDLSQLGGDGGEAAAKEAAAKEAAAKEAAAKEAAAKEAAAKGGMNPLQLLQPLPAEIKGTKLLAHWNSGATITCIPESFLEDEQPIKKTLIKTIHGEKQQNVYYVTFKVKGRKVEAEVIASPYEYILLSPTDVPWLTQQPLQLTILVPLQEYQEKILSKTALPEDQKQQLKTLFVKYDNLWQHWENQVGHRKIRPHNIATGDYPPRPQKQYPINPKAKPSIQIVIDDLLKQGVLTPQNSTMNTPVYPVPKPDGRWRMVLDYREVNKTIPLTAAQNQHSAGILATIVRQKYKTTLDLANGFWAHPITPESYWLTAFTWQGKQYCWTRLPQGFLNSPALFTADVVDLLKEIPNVQVYVDDIYLSHDDPKEHVQQLEKVFQILLQAGYVVSLKKSEIGQKTVEFLGFNITKEGRGLTDTFKTKLLNITPPKDLKQLQSILGLLNFARNFIPNFAELVQPLYNLIASAKGKYIEWSEENTKQLNMVIEALNTASNLEERLPEQRLVIKVNTSPSAGYVRYYNETGKKPIMYLNYVFSKAELKFSMLEKLLTTMHKALIKAMDLAMGQEILVYSPIVSMTKIQKTPLPERKALPIRWITWMTYLEDPRIQFHYDKTLPELKHIPDVYTSSQSPVKHPSQYEGVFYTDGSAIKSPDPTKSNNAGMGIVHATYKPEYQVLNQWSIPLGNHTAQMAEIAAVEFACKKALKIPGPVLVITDSFYVAESANKELPYWKSNGFVNNKKKPLKHISKWKSIAECLSMKPDITIQHEKGISLQIPVFILKGNALADKLATQGSYVVNAGKRTADGSEFEKRTADGSEFESPKKKAKVE

SEQ ID NO: 6448 - protein, 2106 aa, synthetic construct
MPAAKRVKLDGGDKKYSIGLDIGTNSVGWAVITDEYKVPSKKFKVLGNTDRHSIKKNLIGALLFDSGETAEATRLKRTARRRYTRRKNRICYLQEIFSNEMAKVDDSFFHRLEESFLVEEDKKHERHPIFGNIVDEVAYHEKYPTIYHLRKKLVDSTDKADLRLIYLALAHMIKFRGHFLIEGDLNPDNSDVDKLFIQLVQTYNQLFEENPINASGVDAKAILSARLSKSRRLENLIAQLPGEKKNGLFGNLIALSLGLTPNFKSNFDLAEDAKLQLSKDTYDDDLDNLLAQIGDQYADLFLAAKNLSDAILLSDILRVNTEITKAPLSASMIKRYDEHHQDLTLLKALVRQQLPEKYKEIFFDQSKNGYAGYIDGGASQEEFYKFIKPILEKMDGTEELLVKLNREDLLRKQRTFDNGSIPHQIHLGELHAILRRQEDFYPFLKDNREKIEKILTFRIPYYVGPLARGNSRFAWMTRKSEETITPWNFEEVVDKGASAQSFIERMTNFDKNLPNEKVLPKHSLLYEYFTVYNELTKVKYVTEGMRKPAFLSGEQKKAIVDLLFKTNRKVTVKQLKEDYFKKIECFDSVEISGVEDRFNASLGTYHDLLKIIKDKDFLDNEENEDILEDIVLTLTLFEDREMIEERLKTYAHLFDDKVMKQLKRRRYTGWGRLSRKLINGIRDKQSGKTILDFLKSDGFANRNFMQLIHDDSLTFKEDIQKAQVSGQGDSLHEHIANLAGSPAIKKGILQTVKVVDELVKVMGRHKPENIVIEMARENQTTQKGQKNSRERMKRIEEGIKELGSQILKEHPVENTQLQNEKLYLYYLQNGRDMYVDQELDINRLSDYDVDHIVPQSFLKDDSIDNKVLTRSDKARGKSDNVPSEEVVKKMKNYWRQLLNAKLITQRKFDNLTKAERGGLSELDKAGFIKRQLVETRQITKHVAQILDSRMNTKYDENDKLIREVKVITLKSKLVSDFRKDFQFYKVREINNYHHAHDAYLNAVVGTALIKKYPKLESEFVYGDYKVYDVRKMIAKSEQEIGKATAKYFFYSNIMNFFKTEITLANGEIRKRPLIETNGETGEIVWDKGRDFATVRKVLSMPQVNIVKKTEVQTGGFSKESILPKRNSDKLIARKKDWDPKKYGGFDSPTVAYSVLVVAKVEKGKSKKLKSVKELLGITIMERSSFEKNPIDFLEAKGYKEVKKDLIIKLPKYSLFELENGRKRMLASAGELQKGNELALPSKYVNFLYLASHYEKLKGSPEDNEQKQLFVEQHKHYLDEIIEQISEFSKRVILADANLDKVLSAYNKHRDKPIREQAENIIHLFTLTNLGAPAAFKYFDTTIDRKRYTSTKEVLDATLIHQSITGLYETRIDLSQLGGDGGEAAAKEAAAKEAAAKEAAAKEAAAKEAAAKGGVPWLTQQPLQLTILVPLQEYQEKILSKTALPEDQKQQLKTLFVKYDNLWQHWENQVGHRKIRPHNIATGDYPPRPQKQYPINPKAKPSIQIVIDDLLKQGVLTPQNSTMNTPVYPVPKPDGRWRMVLDYREVNKTIPLTAAQNQHSAGILATIVRQKYKTTLDLANGFWAHPITPESYWLTAFTWQGKQYCWTRLPQGFLNSPALFNADVVDLLKEIPNVQVYVDDIYLSHDDPKEHVQQLEKVFQILLQAGYVVSLKKSEIGQKTVEFLGFNITKEGRGLTDTFKTKLLNITPPKDLKQLQSILGKLNFARNFIPNFAELVQPLYNLIAPAKGKYIEWSEENTKQLNMVIEALNTASNLEERLPEQRLVIKVNTSPSAGYVRYYNETGKKPIMYLNYVFSKAELKFSMLEKLLTTMHKALIKAMDLAMGQEILVYSPIVSMTKIQKTPLPERKALPIRWITWMTYLEDPRIQFHYDKTLPELKHIPDVYTSSQSPVKHPSQYEGVFYTDGSAIKSPDPTKSNNAGMGIVHATYKPEYQVLNQWSIPLGNHTAQMAEIAAVEFACKKALKIPGPVLVITDSFYVAESANKELPYWKSNGFVNNKKKPLKHISKWKSIAECLSMKPDITIQHEKGISLQIPVFILKGNALADKLATQGSYVVNAGKRTADGSEFEKRTADGSEFESPKKKAKVE

SEQ ID NO: 6449 - protein, 2195 aa, synthetic construct
MPAAKRVKLDGGDKKYSIGLDIGTNSVGWAVITDEYKVPSKKFKVLGNTDRHSIKKNLIGALLFDSGETAEATRLKRTARRRYTRRKNRICYLQEIFSNEMAKVDDSFFHRLEESFLVEEDKKHERHPIFGNIVDEVAYHEKYPTIYHLRKKLVDSTDKADLRLIYLALAHMIKFRGHFLIEGDLNPDNSDVDKLFIQLVQTYNQLFEENPINASGVDAKAILSARLSKSRRLENLIAQLPGEKKNGLFGNLIALSLGLTPNFKSNFDLAEDAKLQLSKDTYDDDLDNLLAQIGDQYADLFLAAKNLSDAILLSDILRVNTEITKAPLSASMIKRYDEHHQDLTLLKALVRQQLPEKYKEIFFDQSKNGYAGYIDGGASQEEFYKFIKPILEKMDGTEELLVKLNREDLLRKQRTFDNGSIPHQIHLGELHAILRRQEDFYPFLKDNREKIEKILTFRIPYYVGPLARGNSRFAWMTRKSEETITPWNFEEVVDKGASAQSFIERMTNFDKNLPNEKVLPKHSLLYEYFTVYNELTKVKYVTEGMRKPAFLSGEQKKAIVDLLFKTNRKVTVKQLKEDYFKKIECFDSVEISGVEDRFNASLGTYHDLLKIIKDKDFLDNEENEDILEDIVLTLTLFEDREMIEERLKTYAHLFDDKVMKQLKRRRYTGWGRLSRKLINGIRDKQSGKTILDFLKSDGFANRNFMQLIHDDSLTFKEDIQKAQVSGQGDSLHEHIANLAGSPAIKKGILQTVKVVDELVKVMGRHKPENIVIEMARENQTTQKGQKNSRERMKRIEEGIKELGSQILKEHPVENTQLQNEKLYLYYLQNGRDMYVDQELDINRLSDYDVDHIVPQSFLKDDSIDNKVLTRSDKARGKSDNVPSEEVVKKMKNYWRQLLNAKLITQRKFDNLTKAERGGLSELDKAGFIKRQLVETRQITKHVAQILDSRMNTKYDENDKLIREVKVITLKSKLVSDFRKDFQFYKVREINNYHHAHDAYLNAVVGTALIKKYPKLESEFVYGDYKVYDVRKMIAKSEQEIGKATAKYFFYSNIMNFFKTEITLANGEIRKRPLIETNGETGEIVWDKGRDFATVRKVLSMPQVNIVKKTEVQTGGFSKESILPKRNSDKLIARKKDWDPKKYGGFDSPTVAYSVLVVAKVEKGKSKKLKSVKELLGITIMERSSFEKNPIDFLEAKGYKEVKKDLIIKLPKYSLFELENGRKRMLASAGELQKGNELALPSKYVNFLYLASHYEKLKGSPEDNEQKQLFVEQHKHYLDEIIEQISEFSKRVILADANLDKVLSAYNKHRDKPIREQAENIIHLFTLTNLGAPAAFKYFDTTIDRKRYTSTKEVLDATLIHQSITGLYETRIDLSQLGGDGGEAAAKEAAAKEAAAKEAAAKEAAAKEAAAKGGMNPLQLLQPLPAEIKGTKLLAHWNSGATITCIPESFLEDEQPIKKTLIKTIHGEKQQNVYYVTFKVKGRKVEAEVIASPYEYILLSPTDVPWLTQQPLQLTILVPLQEYQEKILSKTALPEDQKQQLKTLFVKYDNLWQHWENQVGHRKIRPHNIATGDYPPRPQKQYPINPKAKPSIQIVIDDLLKQGVLTPQNSTMNTPVYPVPKPDGRWRMVLDYREVNKTIPLTAAQNQHSAGILATIVRQKYKTTLDLANGFWAHPITPESYWLTAFTWQGKQYCWTRLPQGFLNSPALFNADVVDLLKEIPNVQVYVDDIYLSHDDPKEHVQQLEKVFQILLQAGYVVSLKKSEIGQKTVEFLGFNITKEGRGLTDTFKTKLLNITPPKDLKQLQSILGLLNFARNFIPNFAELVQPLYNLIAPAKGKYIEWSEENTKQLNMVIEALNTASNLEERLPEQRLVIKVNTSPSAGYVRYYNETGKKPIMYLNYVFSKAELKFSMLEKLLTTMHKALIKAMDLAMGQEILVYSPIVSMTKIQKTPLPERKALPIRWITWMTYLEDPRIQFHYDKTLPELKHIPDVYTSSQSPVKHPSQYEGVFYTDGSAIKSPDPTKSNNAGMGIVHATYKPEYQVLNQWSIPLGNHTAQMAEIAAVEFACKKALKIPGPVLVITDSFYVAESANKELPYWKSNGFVNNKKKPLKHISKWKSIAECLSMKPDITIQHEKGISLQIPVFILKGNALADKLATQGSYVVNAGKRTADGSEFEKRTADGSEFESPKKKAKVE

SEQ ID NO: 6450 - protein, 2113 aa, synthetic construct
MPAAKRVKLDGGDKKYSIGLDIGTNSVGWAVITDEYKVPSKKFKVLGNTDRHSIKKNLIGALLFDSGETAEATRLKRTARRRYTRRKNRICYLQEIFSNEMAKVDDSFFHRLEESFLVEEDKKHERHPIFGNIVDEVAYHEKYPTIYHLRKKLVDSTDKADLRLIYLALAHMIKFRGHFLIEGDLNPDNSDVDKLFIQLVQTYNQLFEENPINASGVDAKAILSARLSKSRRLENLIAQLPGEKKNGLFGNLIALSLGLTPNFKSNFDLAEDAKLQLSKDTYDDDLDNLLAQIGDQYADLFLAAKNLSDAILLSDILRVNTEITKAPLSASMIKRYDEHHQDLTLLKALVRQQLPEKYKEIFFDQSKNGYAGYIDGGASQEEFYKFIKPILEKMDGTEELLVKLNREDLLRKQRTFDNGSIPHQIHLGELHAILRRQEDFYPFLKDNREKIEKILTFRIPYYVGPLARGNSRFAWMTRKSEETITPWNFEEVVDKGASAQSFIERMTNFDKNLPNEKVLPKHSLLYEYFTVYNELTKVKYVTEGMRKPAFLSGEQKKAIVDLLFKTNRKVTVKQLKEDYFKKIECFDSVEISGVEDRFNASLGTYHDLLKIIKDKDFLDNEENEDILEDIVLTLTLFEDREMIEERLKTYAHLFDDKVMKQLKRRRYTGWGRLSRKLINGIRDKQSGKTILDFLKSDGFANRNFMQLIHDDSLTFKEDIQKAQVSGQGDSLHEHIANLAGSPAIKKGILQTVKVVDELVKVMGRHKPENIVIEMARENQTTQKGQKNSRERMKRIEEGIKELGSQILKEHPVENTQLQNEKLYLYYLQNGRDMYVDQELDINRLSDYDVDHIVPQSFLKDDSIDNKVLTRSDKARGKSDNVPSEEVVKKMKNYWRQLLNAKLITQRKFDNLTKAERGGLSELDKAGFIKRQLVETRQITKHVAQILDSRMNTKYDENDKLIREVKVITLKSKLVSDFRKDFQFYKVREINNYHHAHDAYLNAVVGTALIKKYPKLESEFVYGDYKVYDVRKMIAKSEQEIGKATAKYFFYSNIMNFFKTEITLANGEIRKRPLIETNGETGEIVWDKGRDFATVRKVLSMPQVNIVKKTEVQTGGFSKESILPKRNSDKLIARKKDWDPKKYGGFDSPTVAYSVLVVAKVEKGKSKKLKSVKELLGITIMERSSFEKNPIDFLEAKGYKEVKKDLIIKLPKYSLFELENGRKRMLASAGELQKGNELALPSKYVNFLYLASHYEKLKGSPEDNEQKQLFVEQHKHYLDEIIEQISEFSKRVILADANLDKVLSAYNKHRDKPIREQAENIIHLFTLTNLGAPAAFKYFDTTIDRKRYTSTKEVLDATLIHQSITGLYETRIDLSQLGGDGGEAAAKEAAAKEAAAKEAAAKEAAAKEAAAKGGVLNLEEEYRLHEKPVPSSIDPSWLQLFPTVWAERAGMGLANQVPPVVVELRSGASPVAVRQYPMSKEAREGIRPHIQKFLDLGVLVPCRSPWNTPLLPVKKPGTNDYRPVQDLREINKRVQDIHPTVPNPYNLLSSLPPSYTWYSVLDLKDAFFCLRLHPNSQPLFAFEWKDPEKGNTGQLTWTRLPQGFKNSPTLFDEALHRDLAPFRALNPQVVLLQYVDDLLVAAPTYEDCKKGTQKLLQELSKLGYRVSAKKAQLCQREVTYLGYLLKEGKRWLTPARKATVMKIPVPTTPRQVREFLGTAGFCRLWIPGFASLAAPLYPLTKESIPFIWTEEHQQAFDHIKKALLSAPALALPDLTKPFTLYIDERAGVARGVLTQTLGPWRRPVAYLSKKLDPVASGWPTCLKAVAAVALLLKDADKLTLGQNVTVIASHSLESIVRQPPDRWMTNARMTHYQSLLLNERVSFAPPAVLNPATLLPVESEATPVHRCSEILAEETGTRRDLEDQPLPGVPTWYTDGSSFITEGKRRAGAPIVDGKRTVWASSLPEGTSAQKAELVALTQALRLAEGKNINIYTDSRYAFATAHIHGAIYKQRGLLTSAGKDIKNKEEILALLEAIHLPRRVAIIHCPGHQRGSNPVATGNRRADEAAKQAALSTRVLAGTTKPAGKRTADGSEFEKRTADGSEFESPKKKAKVE

SEQ ID NO: 6451 - protein, 2113 aa, synthetic construct
MPAAKRVKLDGGDKKYSIGLDIGTNSVGWAVITDEYKVPSKKFKVLGNTDRHSIKKNLIGALLFDSGETAEATRLKRTARRRYTRRKNRICYLQEIFSNEMAKVDDSFFHRLEESFLVEEDKKHERHPIFGNIVDEVAYHEKYPTIYHLRKKLVDSTDKADLRLIYLALAHMIKFRGHFLIEGDLNPDNSDVDKLFIQLVQTYNQLFEENPINASGVDAKAILSARLSKSRRLENLIAQLPGEKKNGLFGNLIALSLGLTPNFKSNFDLAEDAKLQLSKDTYDDDLDNLLAQIGDQYADLFLAAKNLSDAILLSDILRVNTEITKAPLSASMIKRYDEHHQDLTLLKALVRQQLPEKYKEIFFDQSKNGYAGYIDGGASQEEFYKFIKPILEKMDGTEELLVKLNREDLLRKQRTFDNGSIPHQIHLGELHAILRRQEDFYPFLKDNREKIEKILTFRIPYYVGPLARGNSRFAWMTRKSEETITPWNFEEVVDKGASAQSFIERMTNFDKNLPNEKVLPKHSLLYEYFTVYNELTKVKYVTEGMRKPAFLSGEQKKAIVDLLFKTNRKVTVKQLKEDYFKKIECFDSVEISGVEDRFNASLGTYHDLLKIIKDKDFLDNEENEDILEDIVLTLTLFEDREMIEERLKTYAHLFDDKVMKQLKRRRYTGWGRLSRKLINGIRDKQSGKTILDFLKSDGFANRNFMQLIHDDSLTFKEDIQKAQVSGQGDSLHEHIANLAGSPAIKKGILQTVKVVDELVKVMGRHKPENIVIEMARENQTTQKGQKNSRERMKRIEEGIKELGSQILKEHPVENTQLQNEKLYLYYLQNGRDMYVDQELDINRLSDYDVDHIVPQSFLKDDSIDNKVLTRSDKARGKSDNVPSEEVVKKMKNYWRQLLNAKLITQRKFDNLTKAERGGLSELDKAGFIKRQLVETRQITKHVAQILDSRMNTKYDENDKLIREVKVITLKSKLVSDFRKDFQFYKVREINNYHHAHDAYLNAVVGTALIKKYPKLESEFVYGDYKVYDVRKMIAKSEQEIGKATAKYFFYSNIMNFFKTEITLANGEIRKRPLIETNGETGEIVWDKGRDFATVRKVLSMPQVNIVKKTEVQTGGFSKESILPKRNSDKLIARKKDWDPKKYGGFDSPTVAYSVLVVAKVEKGKSKKLKSVKELLGITIMERSSFEKNPIDFLEAKGYKEVKKDLIIKLPKYSLFELENGRKRMLASAGELQKGNELALPSKYVNFLYLASHYEKLKGSPEDNEQKQLFVEQHKHYLDEIIEQISEFSKRVILADANLDKVLSAYNKHRDKPIREQAENIIHLFTLTNLGAPAAFKYFDTTIDRKRYTSTKEVLDATLIHQSITGLYETRIDLSQLGGDGGEAAAKEAAAKEAAAKEAAAKEAAAKEAAAKGGVLNLEEEYRLHEKPVPSSIDPSWLQLFPTVWAERAGMGLANQVPPVVVELRSGASPVAVRQYPMSKEAREGIRPHIQKFLDLGVLVPCRSPWNTPLLPVKKPGTNDYRPVQDLREINKRVQDIHPTVPNPYNLLSSLPPSYTWYSVLDLKDAFFCLRLHPNSQPLFAFEWKDPEKGNTGQLTWTRLPQGFKNSPTLFNEALHRDLAPFRALNPQVVLLQYVDDLLVAAPTYEDCKKGTQKLLQELSKLGYRVSAKKAQLCQREVTYLGYLLKEGKRWLTPARKATVMKIPVPTTPRQVREFLGTAGFCRLWIPGFASLAAPLYPLTKPSIPFIWTEEHQQAFDHIKKALLSAPALALPDLTKPFTLYIDERAGVARGVLTQTLGPWRRPVAYLSKKLDPVASGWPTCLKAVAAVALLLKDADKLTLGQNVTVIASHSLESIVRQPPDRWMTNARMTHYQSLLLNERVSFAPPAVLNPATLLPVESEATPVHRCSEILAEETGTRRDLEDQPLPGVPTWYTDGSSFITEGKRRAGAPIVDGKRTVWASSLPEGTSAQKAELVALTQALRLAEGKNINIYTDSRYAFATAHIHGAIYKQRGWLTSAGKDIKNKEEILALLEAIHLPRRVAIIHCPGHQRGSNPVATGNRRADEAAKQAALSTRVLAGTTKPAGKRTADGSEFEKRTADGSEFESPKKKAKVE

SEQ ID NO: 6452 - protein, 2237 aa, synthetic construct
MPAAKRVKLDGGDKKYSIGLDIGTNSVGWAVITDEYKVPSKKFKVLGNTDRHSIKKNLIGALLFDSGETAEATRLKRTARRRYTRRKNRICYLQEIFSNEMAKVDDSFFHRLEESFLVEEDKKHERHPIFGNIVDEVAYHEKYPTIYHLRKKLVDSTDKADLRLIYLALAHMIKFRGHFLIEGDLNPDNSDVDKLFIQLVQTYNQLFEENPINASGVDAKAILSARLSKSRRLENLIAQLPGEKKNGLFGNLIALSLGLTPNFKSNFDLAEDAKLQLSKDTYDDDLDNLLAQIGDQYADLFLAAKNLSDAILLSDILRVNTEITKAPLSASMIKRYDEHHQDLTLLKALVRQQLPEKYKEIFFDQSKNGYAGYIDGGASQEEFYKFIKPILEKMDGTEELLVKLNREDLLRKQRTFDNGSIPHQIHLGELHAILRRQEDFYPFLKDNREKIEKILTFRIPYYVGPLARGNSRFAWMTRKSEETITPWNFEEVVDKGASAQSFIERMTNFDKNLPNEKVLPKHSLLYEYFTVYNELTKVKYVTEGMRKPAFLSGEQKKAIVDLLFKTNRKVTVKQLKEDYFKKIECFDSVEISGVEDRFNASLGTYHDLLKIIKDKDFLDNEENEDILEDIVLTLTLFEDREMIEERLKTYAHLFDDKVMKQLKRRRYTGWGRLSRKLINGIRDKQSGKTILDFLKSDGFANRNFMQLIHDDSLTFKEDIQKAQVSGQGDSLHEHIANLAGSPAIKKGILQTVKVVDELVKVMGRHKPENIVIEMARENQTTQKGQKNSRERMKRIEEGIKELGSQILKEHPVENTQLQNEKLYLYYLQNGRDMYVDQELDINRLSDYDVDHIVPQSFLKDDSIDNKVLTRSDKARGKSDNVPSEEVVKKMKNYWRQLLNAKLITQRKFDNLTKAERGGLSELDKAGFIKRQLVETRQITKHVAQILDSRMNTKYDENDKLIREVKVITLKSKLVSDFRKDFQFYKVREINNYHHAHDAYLNAVVGTALIKKYPKLESEFVYGDYKVYDVRKMIAKSEQEIGKATAKYFFYSNIMNFFKTEITLANGEIRKRPLIETNGETGEIVWDKGRDFATVRKVLSMPQVNIVKKTEVQTGGFSKESILPKRNSDKLIARKKDWDPKKYGGFDSPTVAYSVLVVAKVEKGKSKKLKSVKELLGITIMERSSFEKNPIDFLEAKGYKEVKKDLIIKLPKYSLFELENGRKRMLASAGELQKGNELALPSKYVNFLYLASHYEKLKGSPEDNEQKQLFVEQHKHYLDEIIEQISEFSKRVILADANLDKVLSAYNKHRDKPIREQAENIIHLFTLTNLGAPAAFKYFDTTIDRKRYTSTKEVLDATLIHQSITGLYETRIDLSQLGGDGGEAAAKEAAAKEAAAKEAAAKEAAAKEAAAKGGTLGDQGSRGSDPLPEPRVTLTVEGIPTEFLVNTGAEHSVLTKPMGKMGSKRTVVAGATGSKVYPWTTKRLLKIGQKQVTHSFLVIPECPAPLLGRDLLTKLKAQIQFSTEGPQVTWEDRPAMCLVLNLEEEYRLHEKPVPPSIDPSWLQLFPMVWAEKAGMGLANQVPPVVVELKSDASPVAVRQYPMSKEAREGIRPHIQRFLDLGILVPCQSPWNTPLLPVKKPGTNDYRPVQDLREVNKRVQDIHPTVPNPYNLLSSLPPSHTWYSVLDLKDAFFCLKLHPNSQPLFAFEWRDPEKGNTGQLTWTRLPQGFKNSPTLFDEALHRDLASFRALNPQVVMLQYVDDLLVAAPTYRDCKEGTRRLLQELSKLGYRVSAKKAQLCREEVTYLGYLLKGGKRWLTPARKATVMKIPTPTTPRQVREFLGTAGFCRLWIPGFASLAAPLYPLTREKVPFTWTEAHQEAFGRIKEALLSAPALALPDLTKPFALYVDEKEGVARGVLTQTLGPWRRPVAYLSKKLDPVASGWPTCLKAIAAVALLLKDADKLTLGQNVLVIAPHNLESIVRQPPDRWMTNARMTHYQSLLLNERVSFAPPAILNPATLLPVESDDTPIHICSEILAEETGTRPDLRDQPLPGVPAWYTDGSSFIMDGRRQAGAAIVDNKRTVWASNLPEGTSAQKAELIALTQALRLAEGKSINIYTDSRYAFATAHVHGAIYKQRGLLTSAGKDIKNKEEILALLEAIHLPKRVAIIHCPGHQRGTDPVATGNRKADEAAKQAAQSTRILTETTKNAGKRTADGSEFEKRTADGSEFESPKKKAKVE

SEQ ID NO: 6453 - protein, 2237 aa, synthetic construct
MPAAKRVKLDGGDKKYSIGLDIGTNSVGWAVITDEYKVPSKKFKVLGNTDRHSIKKNLIGALLFDSGETAEATRLKRTARRRYTRRKNRICYLQEIFSNEMAKVDDSFFHRLEESFLVEEDKKHERHPIFGNIVDEVAYHEKYPTIYHLRKKLVDSTDKADLRLIYLALAHMIKFRGHFLIEGDLNPDNSDVDKLFIQLVQTYNQLFEENPINASGVDAKAILSARLSKSRRLENLIAQLPGEKKNGLFGNLIALSLGLTPNFKSNFDLAEDAKLQLSKDTYDDDLDNLLAQIGDQYADLFLAAKNLSDAILLSDILRVNTEITKAPLSASMIKRYDEHHQDLTLLKALVRQQLPEKYKEIFFDQSKNGYAGYIDGGASQEEFYKFIKPILEKMDGTEELLVKLNREDLLRKQRTFDNGSIPHQIHLGELHAILRRQEDFYPFLKDNREKIEKILTFRIPYYVGPLARGNSRFAWMTRKSEETITPWNFEEVVDKGASAQSFIERMTNFDKNLPNEKVLPKHSLLYEYFTVYNELTKVKYVTEGMRKPAFLSGEQKKAIVDLLFKTNRKVTVKQLKEDYFKKIECFDSVEISGVEDRFNASLGTYHDLLKIIKDKDFLDNEENEDILEDIVLTLTLFEDREMIEERLKTYAHLFDDKVMKQLKRRRYTGWGRLSRKLINGIRDKQSGKTILDFLKSDGFANRNFMQLIHDDSLTFKEDIQKAQVSGQGDSLHEHIANLAGSPAIKKGILQTVKVVDELVKVMGRHKPENIVIEMARENQTTQKGQKNSRERMKRIEEGIKELGSQILKEHPVENTQLQNEKLYLYYLQNGRDMYVDQELDINRLSDYDVDHIVPQSFLKDDSIDNKVLTRSDKARGKSDNVPSEEVVKKMKNYWRQLLNAKLITQRKFDNLTKAERGGLSELDKAGFIKRQLVETRQITKHVAQILDSRMNTKYDENDKLIREVKVITLKSKLVSDFRKDFQFYKVREINNYHHAHDAYLNAVVGTALIKKYPKLESEFVYGDYKVYDVRKMIAKSEQEIGKATAKYFFYSNIMNFFKTEITLANGEIRKRPLIETNGETGEIVWDKGRDFATVRKVLSMPQVNIVKKTEVQTGGFSKESILPKRNSDKLIARKKDWDPKKYGGFDSPTVAYSVLVVAKVEKGKSKKLKSVKELLGITIMERSSFEKNPIDFLEAKGYKEVKKDLIIKLPKYSLFELENGRKRMLASAGELQKGNELALPSKYVNFLYLASHYEKLKGSPEDNEQKQLFVEQHKHYLDEIIEQISEFSKRVILADANLDKVLSAYNKHRDKPIREQAENIIHLFTLTNLGAPAAFKYFDTTIDRKRYTSTKEVLDATLIHQSITGLYETRIDLSQLGGDGGEAAAKEAAAKEAAAKEAAAKEAAAKEAAAKGGTLGDQGSRGSDPLPEPRVTLTVEGIPTEFLVNTGAEHSVLTKPMGKMGSKRTVVAGATGSKVYPWTTKRLLKIGQKQVTHSFLVIPECPAPLLGRDLLTKLKAQIQFSTEGPQVTWEDRPAMCLVLNLEEEYRLHEKPVPPSIDPSWLQLFPMVWAEKAGMGLANQVPPVVVELKSDASPVAVRQYPMSKEAREGIRPHIQRFLDLGILVPCQSPWNTPLLPVKKPGTNDYRPVQDLREVNKRVQDIHPTVPNPYNLLSSLPPSHTWYSVLDLKDAFFCLKLHPNSQPLFAFEWRDPEKGNTGQLTWTRLPQGFKNSPTLFNEALHRDLASFRALNPQVVMLQYVDDLLVAAPTYRDCKEGTRRLLQELSKLGYRVSAKKAQLCREEVTYLGYLLKGGKRWLTPARKATVMKIPTPTTPRQVREFLGTAGFCRLWIPGFASLAAPLYPLTRPKVPFTWTEAHQEAFGRIKEALLSAPALALPDLTKPFALYVDEKEGVARGVLTQTLGPWRRPVAYLSKKLDPVASGWPTCLKAIAAVALLLKDADKLTLGQNVLVIAPHNLESIVRQPPDRWMTNARMTHYQSLLLNERVSFAPPAILNPATLLPVESDDTPIHICSEILAEETGTRPDLRDQPLPGVPAWYTDGSSFIMDGRRQAGAAIVDNKRTVWASNLPEGTSAQKAELIALTQALRLAEGKSINIYTDSRYAFATAHVHGAIYKQRGWLTSAGKDIKNKEEILALLEAIHLPKRVAIIHCPGHQRGTDPVATGNRKADEAAKQAAQSTRILTETTKNAGKRTADGSEFEKRTADGSEFESPKKKAKVE

SEQ ID NO: 6454 - protein, 2115 aa, synthetic construct
MPAAKRVKLDGGDKKYSIGLDIGTNSVGWAVITDEYKVPSKKFKVLGNTDRHSIKKNLIGALLFDSGETAEATRLKRTARRRYTRRKNRICYLQEIFSNEMAKVDDSFFHRLEESFLVEEDKKHERHPIFGNIVDEVAYHEKYPTIYHLRKKLVDSTDKADLRLIYLALAHMIKFRGHFLIEGDLNPDNSDVDKLFIQLVQTYNQLFEENPINASGVDAKAILSARLSKSRRLENLIAQLPGEKKNGLFGNLIALSLGLTPNFKSNFDLAEDAKLQLSKDTYDDDLDNLLAQIGDQYADLFLAAKNLSDAILLSDILRVNTEITKAPLSASMIKRYDEHHQDLTLLKALVRQQLPEKYKEIFFDQSKNGYAGYIDGGASQEEFYKFIKPILEKMDGTEELLVKLNREDLLRKQRTFDNGSIPHQIHLGELHAILRRQEDFYPFLKDNREKIEKILTFRIPYYVGPLARGNSRFAWMTRKSEETITPWNFEEVVDKGASAQSFIERMTNFDKNLPNEKVLPKHSLLYEYFTVYNELTKVKYVTEGMRKPAFLSGEQKKAIVDLLFKTNRKVTVKQLKEDYFKKIECFDSVEISGVEDRFNASLGTYHDLLKIIKDKDFLDNEENEDILEDIVLTLTLFEDREMIEERLKTYAHLFDDKVMKQLKRRRYTGWGRLSRKLINGIRDKQSGKTILDFLKSDGFANRNFMQLIHDDSLTFKEDIQKAQVSGQGDSLHEHIANLAGSPAIKKGILQTVKVVDELVKVMGRHKPENIVIEMARENQTTQKGQKNSRERMKRIEEGIKELGSQILKEHPVENTQLQNEKLYLYYLQNGRDMYVDQELDINRLSDYDVDHIVPQSFLKDDSIDNKVLTRSDKARGKSDNVPSEEVVKKMKNYWRQLLNAKLITQRKFDNLTKAERGGLSELDKAGFIKRQLVETRQITKHVAQILDSRMNTKYDENDKLIREVKVITLKSKLVSDFRKDFQFYKVREINNYHHAHDAYLNAVVGTALIKKYPKLESEFVYGDYKVYDVRKMIAKSEQEIGKATAKYFFYSNIMNFFKTEITLANGEIRKRPLIETNGETGEIVWDKGRDFATVRKVLSMPQVNIVKKTEVQTGGFSKESILPKRNSDKLIARKKDWDPKKYGGFDSPTVAYSVLVVAKVEKGKSKKLKSVKELLGITIMERSSFEKNPIDFLEAKGYKEVKKDLIIKLPKYSLFELENGRKRMLASAGELQKGNELALPSKYVNFLYLASHYEKLKGSPEDNEQKQLFVEQHKHYLDEIIEQISEFSKRVILADANLDKVLSAYNKHRDKPIREQAENIIHLFTLTNLGAPAAFKYFDTTIDRKRYTSTKEVLDATLIHQSITGLYETRIDLSQLGGDGGEAAAKEAAAKEAAAKEAAAKEAAAKEAAAKGGTLNLEDEYRLYETSAEPEVSPGSTWLSDFPQAWAETGGMGLAVRQAPLIIPLKATSTPVSIKQYPMSQEAKLGIKPHIQRLLDQGILVPCQSPWNTPLLPVKKPGTNDYRPVQDLREVNKRVEDIHPTVPNPYNLLSGLPPSHRWYTVLDLKDAFFCLRLHPTSQPLFAFEWRDPGMGISGQLTWTRLPQGFKNSPTLFNEALHRDLADFRIQHPDLILLQYVDDILLAATSELDCQQGTRALLLTLGNLGYRASAKKAQLCQKQVKYLGYLLKEGQRWLTEARKETVMGQPTPKTPRQLREFLGTAGFCRLWIPGFAEMAAPLYPLTKPGTLFNWGPDQQKAYQEIKQALLTAPALGLPDLTKPFELFVDEKQGYAKGVLTQKLGPWRRPVAYLSKKLDPVAAGWPPCLRMVAAIAVLRKDAGKLTMGQPLVILAPHAVEALVKQPPDRWLSNARMTHYQAMLLDTDRVQFGPVVALNPATLLPLPEEGAPHDCLEILAETHGTRPDLTDQPIPDADHTWYTDGSSFLQEGQRKAGAAVTTETEVIWARALPAGTSAQRAELIALTQALKMAEGKRLNVYTDSRYAFATAHIHGEIYRRRGWLTSEGREIKNKSEILALLKALFLPKRLSIIHCLGHQKGDSAEARGNRLADQAAREAAIKTPPDTSTLLAGKRTADGSEFEKRTADGSEFESPKKKAKVE

SEQ ID NO: 6455 - protein, 2115 aa, synthetic construct
MPAAKRVKLDGGDKKYSIGLDIGTNSVGWAVITDEYKVPSKKFKVLGNTDRHSIKKNLIGALLFDSGETAEATRLKRTARRRYTRRKNRICYLQEIFSNEMAKVDDSFFHRLEESFLVEEDKKHERHPIFGNIVDEVAYHEKYPTIYHLRKKLVDSTDKADLRLIYLALAHMIKFRGHFLIEGDLNPDNSDVDKLFIQLVQTYNQLFEENPINASGVDAKAILSARLSKSRRLENLIAQLPGEKKNGLFGNLIALSLGLTPNFKSNFDLAEDAKLQLSKDTYDDDLDNLLAQIGDQYADLFLAAKNLSDAILLSDILRVNTEITKAPLSASMIKRYDEHHQDLTLLKALVRQQLPEKYKEIFFDQSKNGYAGYIDGGASQEEFYKFIKPILEKMDGTEELLVKLNREDLLRKQRTFDNGSIPHQIHLGELHAILRRQEDFYPFLKDNREKIEKILTFRIPYYVGPLARGNSRFAWMTRKSEETITPWNFEEVVDKGASAQSFIERMTNFDKNLPNEKVLPKHSLLYEYFTVYNELTKVKYVTEGMRKPAFLSGEQKKAIVDLLFKTNRKVTVKQLKEDYFKKIECFDSVEISGVEDRFNASLGTYHDLLKIIKDKDFLDNEENEDILEDIVLTLTLFEDREMIEERLKTYAHLFDDKVMKQLKRRRYTGWGRLSRKLINGIRDKQSGKTILDFLKSDGFANRNFMQLIHDDSLTFKEDIQKAQVSGQGDSLHEHIANLAGSPAIKKGILQTVKVVDELVKVMGRHKPENIVIEMARENQTTQKGQKNSRERMKRIEEGIKELGSQILKEHPVENTQLQNEKLYLYYLQNGRDMYVDQELDINRLSDYDVDHIVPQSFLKDDSIDNKVLTRSDKARGKSDNVPSEEVVKKMKNYWRQLLNAKLITQRKFDNLTKAERGGLSELDKAGFIKRQLVETRQITKHVAQILDSRMNTKYDENDKLIREVKVITLKSKLVSDFRKDFQFYKVREINNYHHAHDAYLNAVVGTALIKKYPKLESEFVYGDYKVYDVRKMIAKSEQEIGKATAKYFFYSNIMNFFKTEITLANGEIRKRPLIETNGETGEIVWDKGRDFATVRKVLSMPQVNIVKKTEVQTGGFSKESILPKRNSDKLIARKKDWDPKKYGGFDSPTVAYSVLVVAKVEKGKSKKLKSVKELLGITIMERSSFEKNPIDFLEAKGYKEVKKDLIIKLPKYSLFELENGRKRMLASAGELQKGNELALPSKYVNFLYLASHYEKLKGSPEDNEQKQLFVEQHKHYLDEIIEQISEFSKRVILADANLDKVLSAYNKHRDKPIREQAENIIHLFTLTNLGAPAAFKYFDTTIDRKRYTSTKEVLDATLIHQSITGLYETRIDLSQLGGDGGEAAAKEAAAKEAAAKEAAAKEAAAKEAAAKGGTLGIEDEYRLHETSTEPDVSLGSTWLSDFPQAWAETGGMGLAVRQAPLIIPLKATSTPVSIQQYPMSHEARLGIKPHIQRLLDQGILVPCQSPWNTPLLPVKKPGTNDYRPVQDLREVNKRVEDIHPTVPNPYNLLSGLPPSHQWYTVLDLKDAFFCLRLHPTSQPLFAFEWRDPGMGISGQLTWTRLPQGFKNSPTLFDEALHRDLADFRIQHPDLILLQYVDDILLAATSELDCQQGTRALLQTLGDLGYRASAKKAQICQKQVKYLGYLLREGQRWLTEARKETVMGQPVPKTPRQLREFLGTAGFCRLWIPGFAEMAAPLYPLTKTGTLFSWGPDQQKAYQEIKQALLTAPALGLPDLTKPFELFVDEKQGYAKGVLTQKLGPWRRPVAYLSKKLDPVAAGWPPCLRMVAAIAVLTKDAGKLTMGQPLVILAPHAVEALVKQPPDRWLSNARMTHYQAMLLDTDRVQFGPVVALNPATLLPLPEEGAPHDCLEILAETHGTRPDLTDQPIPDADHTWYTDGSSFLQEGQRKAGAAVTTETEVIWAGALPAGTSAQRAELIALTQALKMAEGKRLNVYTDSRYAFATAHIHGEIYRRRGLLTSEGREIKNKSEILALLKALFLPKRLSIIHCLGHQKGDSAEARGNRLADQAAREAAIKTPPDTSTLLAGKRTADGSEFEKRTADGSEFESPKKKAKVE

SEQ ID NO: 6456 - protein, 2115 aa, synthetic construct; identical to SEQ ID NO: 6455

SEQ ID NO: 6457 - protein, 2115 aa, synthetic construct
MPAAKRVKLDGGDKKYSIGLDIGTNSVGWAVITDEYKVPSKKFKVLGNTDRHSIKKNLIGALLFDSGETAEATRLKRTARRRYTRRKNRICYLQEIFSNEMAKVDDSFFHRLEESFLVEEDKKHERHPIFGNIVDEVAYHEKYPTIYHLRKKLVDSTDKADLRLIYLALAHMIKFRGHFLIEGDLNPDNSDVDKLFIQLVQTYNQLFEENPINASGVDAKAILSARLSKSRRLENLIAQLPGEKKNGLFGNLIALSLGLTPNFKSNFDLAEDAKLQLSKDTYDDDLDNLLAQIGDQYADLFLAAKNLSDAILLSDILRVNTEITKAPLSASMIKRYDEHHQDLTLLKALVRQQLPEKYKEIFFDQSKNGYAGYIDGGASQEEFYKFIKPILEKMDGTEELLVKLNREDLLRKQRTFDNGSIPHQIHLGELHAILRRQEDFYPFLKDNREKIEKILTFRIPYYVGPLARGNSRFAWMTRKSEETITPWNFEEVVDKGASAQSFIERMTNFDKNLPNEKVLPKHSLLYEYFTVYNELTKVKYVTEGMRKPAFLSGEQKKAIVDLLFKTNRKVTVKQLKEDYFKKIECFDSVEISGVEDRFNASLGTYHDLLKIIKDKDFLDNEENEDILEDIVLTLTLFEDREMIEERLKTYAHLFDDKVMKQLKRRRYTGWGRLSRKLINGIRDKQSGKTILDFLKSDGFANRNFMQLIHDDSLTFKEDIQKAQVSGQGDSLHEHIANLAGSPAIKKGILQTVKVVDELVKVMGRHKPENIVIEMARENQTTQKGQKNSRERMKRIEEGIKELGSQILKEHPVENTQLQNEKLYLYYLQNGRDMYVDQELDINRLSDYDVDHIVPQSFLKDDSIDNKVLTRSDKARGKSDNVPSEEVVKKMKNYWRQLLNAKLITQRKFDNLTKAERGGLSELDKAGFIKRQLVETRQITKHVAQILDSRMNTKYDENDKLIREVKVITLKSKLVSDFRKDFQFYKVREINNYHHAHDAYLNAVVGTALIKKYPKLESEFVYGDYKVYDVRKMIAKSEQEIGKATAKYFFYSNIMNFFKTEITLANGEIRKRPLIETNGETGEIVWDKGRDFATVRKVLSMPQVNIVKKTEVQTGGFSKESILPKRNSDKLIARKKDWDPKKYGGFDSPTVAYSVLVVAKVEKGKSKKLKSVKELLGITIMERSSFEKNPIDFLEAKGYKEVKKDLIIKLPKYSLFELENGRKRMLASAGELQKGNELALPSKYVNFLYLASHYEKLKGSPEDNEQKQLFVEQHKHYLDEIIEQISEFSKRVILADANLDKVLSAYNKHRDKPIREQAENIIHLFTLTNLGAPAAFKYFDTTIDRKRYTSTKEVLDATLIHQSITGLYETRIDLSQLGGDGGEAAAKEAAAKEAAAKEAAAKEAAAKEAAAKGGTLNIEDEYRLHETSKEPDVSLGSTWLSDFPQAWAETGGMGLAVRQAPLIIPLKATSTPVSIKQYPMSQEARLGIKPHIQRLLDQGILVPCQSPWNTPLLPVKKPGTNDYRPVQDLREVNKRVEDIHPTVPNPYNLLSGLPPSHQWYTVLDLKDAFFCLRLHPTSQPLFAFEWRDPEMGISGQLTWTRLPQGFKNSPTLFDEALHRDLAGFRIQHPDLILLQYVDDLLLAATSELDCQQGTRALLQTLGDLGYRASAKKAQICQKQVKYLGYLLKEGQRWLTEARKETVMGQPIPKTPRQLREFLGTAGFCRLWIPGFAEMAAPLYPLTKTGTLFNWGPDQQKAFQEIKQALLTAPALGLPDLTKPFELFVDEKQGYAKGVLTQKLGPWRRPVAYLSKKLDPVAAGWPPCLRMVAAIAVLTKDAGKLTMGQPLVILAPHAVEALVKQPPDRWLSNARMTHYQALLLDTDRVQFGPVVALNPATLLPLPEEGLQHDCLDILAEAHGTRSDLMDQPLPDADHTWYTDGSSFLQEGQRKAGAAVTTETEVIWARALPAGTSAQRAELIALTQALKMAEGKKLNVYTDSRYAFATAHIHGEIYRRRGLLTSEGKEIKNKDEILALLKALFLPKRLSIIHCPGHQKGNSAEARGNRMADQAAREVATRETPETSTLLAGKRTADGSEFEKRTADGSEFESPKKKAKVE

SEQ ID NO: 6458 - protein, 2115 aa, synthetic construct
MPAAKRVKLDGGDKKYSIGLDIGTNSVGWAVITDEYKVPSKKFKVLGNTDRHSIKKNLIGALLFDSGETAEATRLKRTARRRYTRRKNRICYLQEIFSNEMAKVDDSFFHRLEESFLVEEDKKHERHPIFGNIVDEVAYHEKYPTIYHLRKKLVDSTDKADLRLIYLALAHMIKFRGHFLIEGDLNPDNSDVDKLFIQLVQTYNQLFEENPINASGVDAKAILSARLSKSRRLENLIAQLPGEKKNGLFGNLIALSLGLTPNFKSNFDLAEDAKLQLSKDTYDDDLDNLLAQIGDQYADLFLAAKNLSDAILLSDILRVNTEITKAPLSASMIKRYDEHHQDLTLLKALVRQQLPEKYKEIFFDQSKNGYAGYIDGGASQEEFYKFIKPILEKMDGTEELLVKLNREDLLRKQRTFDNGSIPHQIHLGELHAILRRQEDFYPFLKDNREKIEKILTFRIPYYVGPLARGNSRFAWMTRKSEETITPWNFEEVVDKGASAQSFIERMTNFDKNLPNEKVLPKHSLLYEYFTVYNELTKVKYVTEGMRKPAFLSGEQKKAIVDLLFKTNRKVTVKQLKEDYFKKIECFDSVEISGVEDRFNASLGTYHDLLKIIKDKDFLDNEENEDILEDIVLTLTLFEDREMIEERLKTYAHLFDDKVMKQLKRRRYTGWGRLSRKLINGIRDKQSGKTILDFLKSDGFANRNFMQLIHDDSLTFKEDIQKAQVSGQGDSLHEHIANLAGSPAIKKGILQTVKVVDELVKVMGRHKPENIVIEMARENQTTQKGQKNSRERMKRIEEGIKELGSQILKEHPVENTQLQNEKLYLYYLQNGRDMYVDQELDINRLSDYDVDHIVPQSFLKDDSIDNKVLTRSDKARGKSDNVPSEEVVKKMKNYWRQLLNAKLITQRKFDNLTKAERGGLSELDKAGFIKRQLVETRQITKHVAQILDSRMNTKYDENDKLIREVKVITLKSKLVSDFRKDFQFYKVREINNYHHAHDAYLNAVVGTALIKKYPKLESEFVYGDYKVYDVRKMIAKSEQEIGKATAKYFFYSNIMNFFKTEITLANGEIRKRPLIETNGETGEIVWDKGRDFATVRKVLSMPQVNIVKKTEVQTGGFSKESILPKRNSDKLIARKKDWDPKKYGGFDSPTVAYSVLVVAKVEKGKSKKLKSVKELLGITIMERSSFEKNPIDFLEAKGYKEVKKDLIIKLPKYSLFELENGRKRMLASAGELQKGNELALPSKYVNFLYLASHYEKLKGSPEDNEQKQLFVEQHKHYLDEIIEQISEFSKRVILADANLDKVLSAYNKHRDKPIREQAENIIHLFTLTNLGAPAAFKYFDTTIDRKRYTSTKEVLDATLIHQSITGLYETRIDLSQLGGDGGEAAAKEAAAKEAAAKEAAAKEAAAKEAAAKGGTLNIEDEHRLHETSKEPDVSLGSTWLSDFPQAWAETGGMGLAVRQAPLIIPLKATSTPVSIKQYPMSQEARLGIKPHIQRLLDQGILVPCQSPWNTPLLPVKKPGTNDYRPVQDLREVNKRVEDIHPTVPNPYNLLSGLPPSHQWYTVLDLKDAFFCLRLHPTSQPLFAFEWRDPEMGISGQLTWTRLPQGFKNSPTLFDEALHRDLADFRIQHPDLILLQYVDDLLLAATSELDCQQGTRALLQTLGNLGYRASAKKAQICQKQVKYLGYLLKEGQRWLTEARKETVMGQPTPKTPRQLREFLGTAGFCRLWIPGFAEMAAPLYPLTKTGTLFNWGPDQQKAYQEIKQALLTAPALGLPDLTKPFELFVDEKQGYAKGVLTQKLGPWRRPVAYLSKKLDPVAAGWPPCLRMVAAIAVLTKDAGKLTMGQPLVILAPHAVEALVKQPPDRWLSNARMTHYQALLLDTDRVQFGPVVALNPATLLPLPEEGLQHNCLDILAEAHGTRPDLTDQPLPDADHTWYTDGSSLLQEGQRKAGAAVTTETEVIWAKALPAGTSAQRAELIALTQALKMAEGKKLNVYTDSRYAFATAHIHGEIYRRRGLLTSEGKEIKNKDEILALLKALFLPKRLSIIHCPGHQKGHSAEARGNRMADQAARKAAITETPDTSTLLAGKRTADGSEFEKRTADGSEFESPKKKAKVE

SEQ ID NO: 6459 - protein, 2115 aa, synthetic construct; identical to SEQ ID NO: 6458

SEQ ID NO: 6460 - protein, 2115 aa, synthetic construct
MPAAKRVKLDGGDKKYSIGLDIGTNSVGWAVITDEYKVPSKKFKVLGNTDRHSIKKNLIGALLFDSGETAEATRLKRTARRRYTRRKNRICYLQEIFSNEMAKVDDSFFHRLEESFLVEEDKKHERHPIFGNIVDEVAYHEKYPTIYHLRKKLVDSTDKADLRLIYLALAHMIKFRGHFLIEGDLNPDNSDVDKLFIQLVQTYNQLFEENPINASGVDAKAILSARLSKSRRLENLIAQLPGEKKNGLFGNLIALSLGLTPNFKSNFDLAEDAKLQLSKDTYDDDLDNLLAQIGDQYADLFLAAKNLSDAILLSDILRVNTEITKAPLSASMIKRYDEHHQDLTLLKALVRQQLPEKYKEIFFDQSKNGYAGYIDGGASQEEFYKFIKPILEKMDGTEELLVKLNREDLLRKQRTFDNGSIPHQIHLGELHAILRRQEDFYPFLKDNREKIEKILTFRIPYYVGPLARGNSRFAWMTRKSEETITPWNFEEVVDKGASAQSFIERMTNFDKNLPNEKVLPKHSLLYEYFTVYNELTKVKYVTEGMRKPAFLSGEQKKAIVDLLFKTNRKVTVKQLKEDYFKKIECFDSVEISGVEDRFNASLGTYHDLLKIIKDKDFLDNEENEDILEDIVLTLTLFEDREMIEERLKTYAHLFDDKVMKQLKRRRYTGWGRLSRKLINGIRDKQSGKTILDFLKSDGFANRNFMQLIHDDSLTFKEDIQKAQVSGQGDSLHEHIANLAGSPAIKKGILQTVKVVDELVKVMGRHKPENIVIEMARENQTTQKGQKNSRERMKRIEEGIKELGSQILKEHPVENTQLQNEKLYLYYLQNGRDMYVDQELDINRLSDYDVDHIVPQSFLKDDSIDNKVLTRSDKARGKSDNVPSEEVVKKMKNYWRQLLNAKLITQRKFDNLTKAERGGLSELDKAGFIKRQLVETRQITKHVAQILDSRMNTKYDENDKLIREVKVITLKSKLVSDFRKDFQFYKVREINNYHHAHDAYLNAVVGTALIKKYPKLESEFVYGDYKVYDVRKMIAKSEQEIGKATAKYFFYSNIMNFFKTEITLANGEIRKRPLIETNGETGEIVWDKGRDFATVRKVLSMPQVNIVKKTEVQTGGFSKESILPKRNSDKLIARKKDWDPKKYGGFDSPTVAYSVLVVAKVEKGKSKKLKSVKELLGITIMERSSFEKNPIDFLEAKGYKEVKKDLIIKLPKYSLFELENGRKRMLASAGELQKGNELALPSKYVNFLYLASHYEKLKGSPEDNEQKQLFVEQHKHYLDEIIEQISEFSKRVILADANLDKVLSAYNKHRDKPIREQAENIIHLFTLTNLGAPAAFKYFDTTIDRKRYTSTKEVLDATLIHQSITGLYETRIDLSQLGGDGGEAAAKEAAAKEAAAKEAAAKEAAAKEAAAKGGTLNIEDEYRLHEISTEPDVSPGSTWLSDFPQAWAETGGMGLAVRQAPLIIPLKATSTPVSIKQYPMSQEAKLGIKPHIQRLLDQGILVPCQSPWNTPLLPVKKPGTNDYRPVQGLREVNKRVEDIHPTVPNPYNLLSGLPTSHRWYTVLDLKDAFFCLRLHPTSQPLFASEWRDPGMGISGQLTWTRLPQGFKNSPTLFDEALHRGLADFRIQHPDLILLQYVDDLLLAATSELDCQQGTRALLKTLGNLGYRASAKKAQICQKQVKYLGYLLREGQRWLTEARKETVMGQPTPKTPRQLREFLGTAGFCRLWIPRFAEMAAPLYPLTKTGTLFNWGPDQQKAYHEIKQALLTAPALGLPDLTKPFELFVDEKQGYAKGVLTQKLGPWRRPVAYLSKKLDPVAAGWPPCLRMVAAIAVLTKDAGKLTMGQPLVILAPHAVEALVKQPPDRWLSNARMTHYQAMLLDTDRVQFGPVVALNPATLLPLPEEGAPHDCLEILAETHGTEPDLTDQPIPDADHTWYTDGSSFLQEGQRKAGAAVTTETEVIWARALPAGTSAQRAELIALTQALKMAEGKRLNVYTDSRYAFATAHIHGEIYKRRGLLTSEGREIKNKSEILALLKALFLPKRLSIIHCLGHQKGDSAEARGNRLADQAAREAAIKTPPDTSTLLAGKRTADGSEFEKRTADGSEFESPKKKAKVE

SEQ ID NO: 6461 - protein, 2115 aa, synthetic construct
MPAAKRVKLDGGDKKYSIGLDIGTNSVGWAVITDEYKVPSKKFKVLGNTDRHSIKKNLIGALLFDSGETAEATRLKRTARRRYTRRKNRICYLQEIFSNEMAKVDDSFFHRLEESFLVEEDKKHERHPIFGNIVDEVAYHEKYPTIYHLRKKLVDSTDKADLRLIYLALAHMIKFRGHFLIEGDLNPDNSDVDKLFIQLVQTYNQLFEENPINASGVDAKAILSARLSKSRRLENLIAQLPGEKKNGLFGNLIALSLGLTPNFKSNFDLAEDAKLQLSKDTYDDDLDNLLAQIGDQYADLFLAAKNLSDAILLSDILRVNTEITKAPLSASMIKRYDEHHQDLTLLKALVRQQLPEKYKEIFFDQSKNGYAGYIDGGASQEEFYKFIKPILEKMDGTEELLVKLNREDLLRKQRTFDNGSIPHQIHLGELHAILRRQEDFYPFLKDNREKIEKILTFRIPYYVGPLARGNSRFAWMTRKSEETITPWNFEEVVDKGASAQSFIERMTNFDKNLPNEKVLPKHSLLYEYFTVYNELTKVKYVTEGMRKPAFLSGEQKKAIVDLLFKTNRKVTVKQLKEDYFKKIECFDSVEISGVEDRFNASLGTYHDLLKIIKDKDFLDNEENEDILEDIVLTLTLFEDREMIEERLKTYAHLFDDKVMKQLKRRRYTGWGRLSRKLINGIRDKQSGKTILDFLKSDGFANRNFMQLIHDDSLTFKEDIQKAQVSGQGDSLHEHIANLAGSPAIKKGILQTVKVVDELVKVMGRHKPENIVIEMARENQTTQKGQKNSRERMKRIEEGIKELGSQILKEHPVENTQLQNEKLYLYYLQNGRDMYVDQELDINRLSDYDVDHIVPQSFLKDDSIDNKVLTRSDKARGKSDNVPSEEVVKKMKNYWRQLLNAKLITQRKFDNLTKAERGGLSELDKAGFIKRQLVETRQITKHVAQILDSRMNTKYDENDKLIREVKVITLKSKLVSDFRKDFQFYKVREINNYHHAHDAYLNAVVGTALIKKYPKLESEFVYGDYKVYDVRKMIAKSEQEIGKATAKYFFYSNIMNFFKTEITLANGEIRKRPLIETNGETGEIVWDKGRDFATVRKVLSMPQVNIVKKTEVQTGGFSKESILPKRNSDKLIARKKDWDPKKYGGFDSPTVAYSVLVVAKVEKGKSKKLKSVKELLGITIMERSSFEKNPIDFLEAKGYKEVKKDLIIKLPKYSLFELENGRKRMLASAGELQKGNELALPSKYVNFLYLASHYEKLKGSPEDNEQKQLFVEQHKHYLDEIIEQISEFSKRVILADANLDKVLSAYNKHRDKPIREQAENIIHLFTLTNLGAPAAFKYFDTTIDRKRYTSTKEVLDATLIHQSITGLYETRIDLSQLGGDGGEAAAKEAAAKEAAAKEAAAKEAAAKEAAAKGGTLNIEDEYRLHEISTEPDVSPGSTWLSDFPQAWAETGGMGLAVRQAPLIIPLKATSTPVSIKQYPMSQEAKLGIKPHIQRLLDQGILVPCQSPWNTPLLPVKKPGTNDYRPVQGLREVNKRVEDIHPTVPNPYNLLSGLPTSHRWYTVLDLKDAFFCLRLHPTSQPLFASEWRDPGMGISGQLTWTRLPQGFKNSPTLFNEALHRGLADFRIQHPDLILLQYVDDLLLAATSELDCQQGTRALLKTLGNLGYRASAKKAQICQKQVKYLGYLLREGQRWLTEARKETVMGQPTPKTPRQLREFLGKAGFCRLFIPRFAEMAAPLYPLTKPGTLFNWGPDQQKAYHEIKQALLTAPALGLPDLTKPFELFVDEKQGYAKGVLTQKLGPWRRPVAYLSKKLDPVAAGWPPCLRMVAAIAVLTKDAGKLTMGQPLVILAPHAVEALVKQPPDRWLSNARMTHYQAMLLDTDRVQFGPVVALNPATLLPLPEEGAPHDCLEILAETHGTEPDLTDQPIPDADHTWYTDGSSFLQEGQRKAGAAVTTETEVIWARALPAGTSAQRAELIALTQALKMAEGKRLNVYTDSRYAFATAHIHGEIYKRRGWLTSEGREIKNKSEILALLKALFLPKRLSIIHCLGHQKGDSAEARGNRLADQAAREAAIKTPPDTSTLLAGKRTADGSEFEKRTADGSEFESPKKKAKVE

SEQ ID NO: 6462 - protein, 2195 aa, synthetic construct
MPAAKRVKLDGGDKKYSIGLDIGTNSVGWAVITDEYKVPSKKFKVLGNTDRHSIKKNLIGALLFDSGETAEATRLKRTARRRYTRRKNRICYLQEIFSNEMAKVDDSFFHRLEESFLVEEDKKHERHPIFGNIVDEVAYHEKYPTIYHLRKKLVDSTDKADLRLIYLALAHMIKFRGHFLIEGDLNPDNSDVDKLFIQLVQTYNQLFEENPINASGVDAKAILSARLSKSRRLENLIAQLPGEKKNGLFGNLIALSLGLTPNFKSNFDLAEDAKLQLSKDTYDDDLDNLLAQIGDQYADLFLAAKNLSDAILLSDILRVNTEITKAPLSASMIKRYDEHHQDLTLLKALVRQQLPEKYKEIFFDQSKNGYAGYIDGGASQEEFYKFIKPILEKMDGTEELLVKLNREDLLRKQRTFDNGSIPHQIHLGELHAILRRQEDFYPFLKDNREKIEKILTFRIPYYVGPLARGNSRFAWMTRKSEETITPWNFEEVVDKGASAQSFIERMTNFDKNLPNEKVLPKHSLLYEYFTVYNELTKVKYVTEGMRKPAFLSGEQKKAIVDLLFKTNRKVTVKQLKEDYFKKIECFDSVEISGVEDRFNASLGTYHDLLKIIKDKDFLDNEENEDILEDIVLTLTLFEDREMIEERLKTYAHLFDDKVMKQLKRRRYTGWGRLSRKLINGIRDKQSGKTILDFLKSDGFANRNFMQLIHDDSLTFKEDIQKAQVSGQGDSLHEHIANLAGSPAIKKGILQTVKVVDELVKVMGRHKPENIVIEMARENQTTQKGQKNSRERMKRIEEGIKELGSQILKEHPVENTQLQNEKLYLYYLQNGRDMYVDQELDINRLSDYDVDHIVPQSFLKDDSIDNKVLTRSDKARGKSDNVPSEEVVKKMKNYWRQLLNAKLITQRKFDNLTKAERGGLSELDKAGFIKRQLVETRQITKHVAQILDSRMNTKYDENDKLIREVKVITLKSKLVSDFRKDFQFYKVREINNYHHAHDAYLNAVVGTALIKKYPKLESEFVYGDYKVYDVRKMIAKSEQEIGKATAKYFFYSNIMNFFKTEITLANGEIRKRPLIETNGETGEIVWDKGRDFATVRKVLSMPQVNIVKKTEVQTGGFSKESILPKRNSDKLIARKKDWDPKKYGGFDSPTVAYSVLVVAKVEKGKSKKLKSVKELLGITIMERSSFEKNPIDFLEAKGYKEVKKDLIIKLPKYSLFELENGRKRMLASAGELQKGNELALPSKYVNFLYLASHYEKLKGSPEDNEQKQLFVEQHKHYLDEIIEQISEFSKRVILADANLDKVLSAYNKHRDKPIREQAENIIHLFTLTNLGAPAAFKYFDTTIDRKRYTSTKEVLDATLIHQSITGLYETRIDLSQLGGDGGEAAAKEAAAKEAAAKEAAAKEAAAKEAAAKGGMDPLQLLQPLEAEIKGTKLKAHWNSGATITCVPEAFLEDERPIQTMLIKTIHGEKQQDVYYLTFKVQGRKVEAEVLASPYDYILLNPSDVPWLMKKPLQLTVLVPLHEYQERLLQQTALPKEQKELLQKLFLKYDALWQHWENQVGHRRIKPHNIATGTLAPRPQKQYPINPKAKPSIQIVIDDLLKQGVLIQQNSTMNTPVYPVPKPDGKWRMVLDYREVNKTIPLIAAQNQHSAGILSSIYRGKYKTTLDLTNGFWAHPITPESYWLTAFTWQGKQYCWTRLPQGFLNSPALFTADVVDLLKEIPNVQAYVDDIYISHDDPQEHLEQLEKIFSILLNAGYVVSLKKSEIAQREVEFLGFNITKEGRGLTDTFKQKLLNITPPKDLKQLQSILGLLNFARNFIPNYSELVKPLYTIVANANGKFISWTEDNSNQLQHIISVLNQADNLEERNPETRLIIKVNSSPSAGYIRYYNEGSKRPIMYVNYIFSKAEAKFTQTEKLLTTMHKGLIKAMDLAMGQEILVYSPIVSMTKIQRTPLPERKALPVRWITWMTYLEDPRIQFHYDKSLPELQQIPNVTEDVIAKTKHPSEFAMVFYTDGSAIKHPDVNKSHSAGMGIAQVQFIPEYKIVHQWSIPLGDHTAQLAEIAAVEFACKKALKISGPVLIVTDSFYVAESANKELPYWKSNGFLNNKKKPLRHVSKWKSIAECLQLKPDIIIMHEKGHQQPMTTLHTEGNNLADKLATQGSYVVHAGKRTADGSEFEKRTADGSEFESPKKKAKVE

SEQ ID NO: 6463 - protein, 2106 aa, synthetic construct
MPAAKRVKLDGGDKKYSIGLDIGTNSVGWAVITDEYKVPSKKFKVLGNTDRHSIKKNLIGALLFDSGETAEATRLKRTARRRYTRRKNRICYLQEIFSNEMAKVDDSFFHRLEESFLVEEDKKHERHPIFGNIVDEVAYHEKYPTIYHLRKKLVDSTDKADLRLIYLALAHMIKFRGHFLIEGDLNPDNSDVDKLFIQLVQTYNQLFEENPINASGVDAKAILSARLSKSRRLENLIAQLPGEKKNGLFGNLIALSLGLTPNFKSNFDLAEDAKLQLSKDTYDDDLDNLLAQIGDQYADLFLAAKNLSDAILLSDILRVNTEITKAPLSASMIKRYDEHHQDLTLLKALVRQQLPEKYKEIFFDQSKNGYAGYIDGGASQEEFYKFIKPILEKMDGTEELLVKLNREDLLRKQRTFDNGSIPHQIHLGELHAILRRQEDFYPFLKDNREKIEKILTFRIPYYVGPLARGNSRFAWMTRKSEETITPWNFEEVVDKGASAQSFIERMTNFDKNLPNEKVLPKHSLLYEYFTVYNELTKVKYVTEGMRKPAFLSGEQKKAIVDLLFKTNRKVTVKQLKEDYFKKIECFDSVEISGVEDRFNASLGTYHDLLKIIKDKDFLDNEENEDILEDIVLTLTLFEDREMIEERLKTYAHLFDDKVMKQLKRRRYTGWGRLSRKLINGIRDKQSGKTILDFLKSDGFANRNFMQLIHDDSLTFKEDIQKAQVSGQGDSLHEHIANLAGSPAIKKGILQTVKVVDELVKVMGRHKPENIVIEMARENQTTQKGQKNSRERMKRIEEGIKELGSQILKEHPVENTQLQNEKLYLYYLQNGRDMYVDQELDINRLSDYDVDHIVPQSFLKDDSIDNKVLTRSDKARGKSDNVPSEEVVKKMKNYWRQLLNAKLITQRKFDNLTKAERGGLSELDKAGFIKRQLVETRQITKHVAQILDSRMNTKYDENDKLIREVKVITLKSKLVSDFRKDFQFYKVREINNYHHAHDAYLNAVVGTALIKKYPKLESEFVYGDYKVYDVRKMIAKSEQEIGKATAKYFFYSNIMNFFKTEITLANGEIRKRPLIETNGETGEIVWDKGRDFATVRKVLSMPQVNIVKKTEVQTGGFSKESILPKRNSDKLIARKKDWDPKKYGGFDSPTVAYSVLVVAKVEKGKSKKLKSVKELLGITIMERSSFEKNPIDFLEAKGYKEVKKDLIIKLPKYSLFELENGRKRMLASAGELQKGNELALPSKYVNFLYLASHYEKLKGSPEDNEQKQLFVEQHKHYLDEIIEQISEFSKRVILADANLDKVLSAYNKHRDKPIREQAENIIHLFTLTNLGAPAAFKYFDTTIDRKRYTSTKEVLDATLIHQSITGLYETRIDLSQLGGDGGEAAAKEAAAKEAAAKEAAAKEAAAKEAAAKGGVPWLMKKPLQLTVLVPLHEYQERLLQQTALPKEQKELLQKLFLKYDALWQHWENQVGHRRIKPHNIATGTLAPRPQKQYPINPKAKPSIQIVIDDLLKQGVLIQQNSTMNTPVYPVPKPDGKWRMVLDYREVNKTIPLIAAQNQHSAGILSSIYRGKYKTTLDLTNGFWAHPITPESYWLTAFTWQGKQYCWTRLPQGFLNSPALFTADVVDLLKEIPNVQAYVDDIYISHDDPQEHLEQLEKIFSILLNAGYVVSLKKSEIAQREVEFLGFNITKEGRGLTDTFKQKLLNITPPKDLKQLQSILGLLNFARNFIPNYSELVKPLYTIVANANGKFISWTEDNSNQLQHIISVLNQADNLEERNPETRLIIKVNSSPSAGYIRYYNEGSKRPIMYVNYIFSKAEAKFTQTEKLLTTMHKGLIKAMDLAMGQEILVYSPIVSMTKIQRTPLPERKALPVRWITWMTYLEDPRIQFHYDKSLPELQQIPNVTEDVIAKTKHPSEFAMVFYTDGSAIKHPDVNKSHSAGMGIAQVQFIPEYKIVHQWSIPLGDHTAQLAEIAAVEFACKKALKISGPVLIVTDSFYVAESANKELPYWKSNGFLNNKKKPLRHVSKWKSIAECLQLKPDIIIMHEKGHQQPMTTLHTEGNNLADKLATQGSYVVHAGKRTADGSEFEKRTADGSEFESPKKKAKVE

SEQ ID NO: 6464 - protein, 2106 aa, synthetic construct
MPAAKRVKLDGGDKKYSIGLDIGTNSVGWAVITDEYKVPSKKFKVLGNTDRHSIKKNLIGALLFDSGETAEATRLKRTARRRYTRRKNRICYLQEIFSNEMAKVDDSFFHRLEESFLVEEDKKHERHPIFGNIVDEVAYHEKYPTIYHLRKKLVDSTDKADLRLIYLALAHMIKFRGHFLIEGDLNPDNSDVDKLFIQLVQTYNQLFEENPINASGVDAKAILSARLSKSRRLENLIAQLPGEKKNGLFGNLIALSLGLTPNFKSNFDLAEDAKLQLSKDTYDDDLDNLLAQIGDQYADLFLAAKNLSDAILLSDILRVNTEITKAPLSASMIKRYDEHHQDLTLLKALVRQQLPEKYKEIFFDQSKNGYAGYIDGGASQEEFYKFIKPILEKMDGTEELLVKLNREDLLRKQRTFDNGSIPHQIHLGELHAILRRQEDFYPFLKDNREKIEKILTFRIPYYVGPLARGNSRFAWMTRKSEETITPWNFEEVVDKGASAQSFIERMTNFDKNLPNEKVLPKHSLLYEYFTVYNELTKVKYVTEGMRKPAFLSGEQKKAIVDLLFKTNRKVTVKQLKEDYFKKIECFDSVEISGVEDRFNASLGTYHDLLKIIKDKDFLDNEENEDILEDIVLTLTLFEDREMIEERLKTYAHLFDDKVMKQLKRRRYTGWGRLSRKLINGIRDKQSGKTILDFLKSDGFANRNFMQLIHDDSLTFKEDIQKAQVSGQGDSLHEHIANLAGSPAIKKGILQTVKVVDELVKVMGRHKPENIVIEMARENQTTQKGQKNSRERMKRIEEGIKELGSQILKEHPVENTQLQNEKLYLYYLQNGRDMYVDQELDINRLSDYDVDHIVPQSFLKDDSIDNKVLTRSDKARGKSDNVPSEEVVKKMKNYWRQLLNAKLITQRKFDNLTKAERGGLSELDKAGFIKRQLVETRQITKHVAQILDSRMNTKYDENDKLIREVKVITLKSKLVSDFRKDFQFYKVREINNYHHAHDAYLNAVVGTALIKKYPKLESEFVYGDYKVYDVRKMIAKSEQEIGKATAKYFFYSNIMNFFKTEITLANGEIRKRPLIETNGETGEIVWDKGRDFATVRKVLSMPQVNIVKKTEVQTGGFSKESILPKRNSDKLIARKKDWDPKKYGGFDSPTVAYSVLVVAKVEKGKSKKLKSVKELLGITIMERSSFEKNPIDFLEAKGYKEVKKDLIIKLPKYSLFELENGRKRMLASAGELQKGNELALPSKYVNFLYLASHYEKLKGSPEDNEQKQLFVEQHKHYLDEIIEQISEFSKRVILADANLDKVLSAYNKHRDKPIREQAENIIHLFTLTNLGAPAAFKYFDTTIDRKRYTSTKEVLDATLIHQSITGLYETRIDLSQLGGDGGEAAAKEAAAKEAAAKEAAAKEAAAKEAAAKGGVPWLMKKPLQLTVLVPLHEYQERLLQQTALPKEQKELLQKLFLKYDALWQHWENQVGHRRIKPHNIATGTLAPRPQKQYPINPKAKPSIQIVIDDLLKQGVLIQQNSTMNTPVYPVPKPDGKWRMVLDYREVNKTIPLIAAQNQHSAGILSSIYRGKYKTTLDLTNGFWAHPITPESYWLTAFTWQGKQYCWTRLPQGFLNSPALFNADVVDLLKEIPNVQAYVDDIYISHDDPQEHLEQLEKIFSILLNAGYVVSLKKSEIAQREVEFLGFNITKEGRGLTDTFKQKLLNITPPKDLKQLQSILGKLNFARNFIPNYSELVKPLYTIVAPANGKFISWTEDNSNQLQHIISVLNQADNLEERNPETRLIIKVNSSPSAGYIRYYNEGSKRPIMYVNYIFSKAEAKFTQTEKLLTTMHKGLIKAMDLAMGQEILVYSPIVSMTKIQRTPLPERKALPVRWITWMTYLEDPRIQFHYDKSLPELQQIPNVTEDVIAKTKHPSEFAMVFYTDGSAIKHPDVNKSHSAGMGIAQVQFIPEYKIVHQWSIPLGDHTAQLAEIAAVEFACKKALKISGPVLIVTDSFYVAESANKELPYWKSNGFLNNKKKPLRHVSKWKSIAECLQLKPDIIIMHEKGHQQPMTTLHTEGNNLADKLATQGSYVVHAGKRTADGSEFEKRTADGSEFESPKKKAKVE

SEQ ID NO: 6465 - protein, 2195 aa, synthetic construct
MPAAKRVKLDGGDKKYSIGLDIGTNSVGWAVITDEYKVPSKKFKVLGNTDRHSIKKNLIGALLFDSGETAEATRLKRTARRRYTRRKNRICYLQEIFSNEMAKVDDSFFHRLEESFLVEEDKKHERHPIFGNIVDEVAYHEKYPTIYHLRKKLVDSTDKADLRLIYLALAHMIKFRGHFLIEGDLNPDNSDVDKLFIQLVQTYNQLFEENPINASGVDAKAILSARLSKSRRLENLIAQLPGEKKNGLFGNLIALSLGLTPNFKSNFDLAEDAKLQLSKDTYDDDLDNLLAQIGDQYADLFLAAKNLSDAILLSDILRVNTEITKAPLSASMIKRYDEHHQDLTLLKALVRQQLPEKYKEIFFDQSKNGYAGYIDGGASQEEFYKFIKPILEKMDGTEELLVKLNREDLLRKQRTFDNGSIPHQIHLGELHAILRRQEDFYPFLKDNREKIEKILTFRIPYYVGPLARGNSRFAWMTRKSEETITPWNFEEVVDKGASAQSFIERMTNFDKNLPNEKVLPKHSLLYEYFTVYNELTKVKYVTEGMRKPAFLSGEQKKAIVDLLFKTNRKVTVKQLKEDYFKKIECFDSVEISGVEDRFNASLGTYHDLLKIIKDKDFLDNEENEDILEDIVLTLTLFEDREMIEERLKTYAHLFDDKVMKQLKRRRYTGWGRLSRKLINGIRDKQSGKTILDFLKSDGFANRNFMQLIHDDSLTFKEDIQKAQVSGQGDSLHEHIANLAGSPAIKKGILQTVKVVDELVKVMGRHKPENIVIEMARENQTTQKGQKNSRERMKRIEEGIKELGSQILKEHPVENTQLQNEKLYLYYLQNGRDMYVDQELDINRLSDYDVDHIVPQSFLKDDSIDNKVLTRSDKARGKSDNVPSEEVVKKMKNYWRQLLNAKLITQRKFDNLTKAERGGLSELDKAGFIKRQLVETRQITKHVAQILDSRMNTKYDENDKLIREVKVITLKSKLVSDFRKDFQFYKVREINNYHHAHDAYLNAVVGTALIKKYPKLESEFVYGDYKVYDVRKMIAKSEQEIGKATAKYFFYSNIMNFFKTEITLANGEIRKRPLIETNGETGEIVWDKGRDFATVRKVLSMPQVNIVKKTEVQTGGFSKESILPKRNSDKLIARKKDWDPKKYGGFDSPTVAYSVLVVAKVEKGKSKKLKSVKELLGITIMERSSFEKNPIDFLEAKGYKEVKKDLIIKLPKYSLFELENGRKRMLASAGELQKGNELALPSKYVNFLYLASHYEKLKGSPEDNEQKQLFVEQHKHYLDEIIEQISEFSKRVILADANLDKVLSAYNKHRDKPIREQAENIIHLFTLTNLGAPAAFKYFDTTIDRKRYTSTKEVLDATLIHQSITGLYETRIDLSQLGGDGGEAAAKEAAAKEAAAKEAAAKEAAAKEAAAKGGMDPLQLLQPLEAEIKGTKLKAHWNSGATITCVPQAFLEEEVPIKNIWIKTIHGEKEQPVYYLTFKIQGRKVEAEVISSPYDYILVSPSDIPWLMKKPLQLTTLVPLQEYEERLLKQTMLTGSYKEKLQSLFLKYDALWQHWENQVGHRRIKPHHIATGTVNPRPQKQYPINPKAKASIQTVINDLLKQGVLIQQNSIMNTPVYPVPKPDGKWRMVLDYREVNKTIPLIAAQNQHSAGILSSIFRGKYKTTLDLSNGFWAHSITPESYWLTAFTWLGQQYCWTRLPQGFLNSPALFTADVVDLLKEVPNVQVYVDDIYISHDDPREHLEQLEKVFSLLLNAGYVVSLKKSEIAQHEVEFLGFNITKEGRGLTETFKQKLLNITPPRDLKQLQSILGLLNFARNFIPNFSELVKPLYNIIATANGKYITWTTDNSQQLQNIISMLNSAENLEERNPEVRLIMKVNTSPSAGYIRFYNEFAKRPIMYLNYVYTKAEVKFTNTEKLLTTIHKGLIKALDLGMGQEILVYSPIVSMTKIQKTPLPERKALPIRWITWMSYLEDPRIQFHYDKTLPELQQVPTVTDDIIAKIKHPSEFSMVFYTDGSAIKHPNVNKSHNAGMGIAQVQFKPEFTVINTWSIPLGDHTAQLAEVAAVEFACKKALKIDGPVLIVTDSFYVAESVNKELPYWQSNGFFNNKKKPLKHVSKWKSIADCIQLKPDIIIIHEKGHQPTASTFHTEGNNLADKLATQGSYVVNAGKRTADGSEFEKRTADGSEFESPKKKAKVE

SEQ ID NO: 6466 - protein, 2106 aa, synthetic construct
MPAAKRVKLDGGDKKYSIGLDIGTNSVGWAVITDEYKVPSKKFKVLGNTDRHSIKKNLIGALLFDSGETAEATRLKRTARRRYTRRKNRICYLQEIFSNEMAKVDDSFFHRLEESFLVEEDKKHERHPIFGNIVDEVAYHEKYPTIYHLRKKLVDSTDKADLRLIYLALAHMIKFRGHFLIEGDLNPDNSDVDKLFIQLVQTYNQLFEENPINASGVDAKAILSARLSKSRRLENLIAQLPGEKKNGLFGNLIALSLGLTPNFKSNFDLAEDAKLQLSKDTYDDDLDNLLAQIGDQYADLFLAAKNLSDAILLSDILRVNTEITKAPLSASMIKRYDEHHQDLTLLKALVRQQLPEKYKEIFFDQSKNGYAGYIDGGASQEEFYKFIKPILEKMDGTEELLVKLNREDLLRKQRTFDNGSIPHQIHLGELHAILRRQEDFYPFLKDNREKIEKILTFRIPYYVGPLARGNSRFAWMTRKSEETITPWNFEEVVDKGASAQSFIERMTNFDKNLPNEKVLPKHSLLYEYFTVYNELTKVKYVTEGMRKPAFLSGEQKKAIVDLLFKTNRKVTVKQLKEDYFKKIECFDSVEISGVEDRFNASLGTYHDLLKIIKDKDFLDNEENEDILEDIVLTLTLFEDREMIEERLKTYAHLFDDKVMKQLKRRRYTGWGRLSRKLINGIRDKQSGKTILDFLKSDGFANRNFMQLIHDDSLTFKEDIQKAQVSGQGDSLHEHIANLAGSPAIKKGILQTVKVVDELVKVMGRHKPENIVIEMARENQTTQKGQKNSRERMKRIEEGIKELGSQILKEHPVENTQLQNEKLYLYYLQNGRDMYVDQELDINRLSDYDVDHIVPQSFLKDDSIDNKVLTRSDKARGKSDNVPSEEVVKKMKNYWRQLLNAKLITQRKFDNLTKAERGGLSELDKAGFIKRQLVETRQITKHVAQILDSRMNTKYDENDKLIREVKVITLKSKLVSDFRKDFQFYKVREINNYHHAHDAYLNAVVGTALIKKYPKLESEFVYGDYKVYDVRKMIAKSEQEIGKATAKYFFYSNIMNFFKTEITLANGEIRKRPLIETNGETGEIVWDKGRDFATVRKVLSMPQVNIVKKTEVQTGGFSKESILPKRNSDKLIARKKDWDPKKYGGFDSPTVAYSVLVVAKVEKGKSKKLKSVKELLGITIMERSSFEKNPIDFLEAKGYKEVKKDLIIKLPKYSLFELENGRKRMLASAGELQKGNELALPSKYVNFLYLASHYEKLKGSPEDNEQKQLFVEQHKHYLDEIIEQISEFSKRVILADANLDKVLSAYNKHRDKPIREQAENIIHLFTLTNLGAPAAFKYFDTTIDRKRYTSTKEVLDATLIHQSITGLYETRIDLSQLGGDGGEAAAKEAAAKEAAAKEAAAKEAAAKEAAAKGGIPWLMKKPLQLTTLVPLQEYEERLLKQTMLTGSYKEKLQSLFLKYDALWQHWENQVGHRRIKPHHIATGTVNPRPQKQYPINPKAKASIQTVINDLLKQGVLIQQNSIMNTPVYPVPKPDGKWRMVLDYREVNKTIPLIAAQNQHSAGILSSIFRGKYKTTLDLSNGFWAHSITPESYWLTAFTWLGQQYCWTRLPQGFLNSPALFNADVVDLLKEVPNVQVYVDDIYISHDDPREHLEQLEKVFSLLLNAGYVVSLKKSEIAQHEVEFLGFNITKEGRGLTETFKQKLLNITPPRDLKQLQSILGLLNFARNFIPNFSELVKPLYNIIATAPGKYITWTTDNSQQLQNIISMLNSAENLEERNPEVRLIMKVNTSPSAGYIRFYNEFAKRPIMYLNYVYTKAEVKFTNTEKLLTTIHKGLIKALDLGMGQEILVYSPIVSMTKIQKTPLPERKALPIRWITWMSYLEDPRIQFHYDKTLPELQQVPTVTDDIIAKIKHPSEFSMVFYTDGSAIKHPNVNKSHNAGMGIAQVQFKPEFTVINTWSIPLGDHTAQLAEVAAVEFACKKALKIDGPVLIVTDSFYVAESVNKELPYWQSNGFFNNKKKPLKHVSKWKSIADCIQLKPDIIIIHEKGHQPTASTFHTEGNNLADKLATQGSYVVNAGKRTADGSEFEKRTADGSEFESPKKKAKVE

SEQ ID NO: 6467 - protein, 2113 aa, synthetic construct
MPAAKRVKLDGGDKKYSIGLDIGTNSVGWAVITDEYKVPSKKFKVLGNTDRHSIKKNLIGALLFDSGETAEATRLKRTARRRYTRRKNRICYLQEIFSNEMAKVDDSFFHRLEESFLVEEDKKHERHPIFGNIVDEVAYHEKYPTIYHLRKKLVDSTDKADLRLIYLALAHMIKFRGHFLIEGDLNPDNSDVDKLFIQLVQTYNQLFEENPINASGVDAKAILSARLSKSRRLENLIAQLPGEKKNGLFGNLIALSLGLTPNFKSNFDLAEDAKLQLSKDTYDDDLDNLLAQIGDQYADLFLAAKNLSDAILLSDILRVNTEITKAPLSASMIKRYDEHHQDLTLLKALVRQQLPEKYKEIFFDQSKNGYAGYIDGGASQEEFYKFIKPILEKMDGTEELLVKLNREDLLRKQRTFDNGSIPHQIHLGELHAILRRQEDFYPFLKDNREKIEKILTFRIPYYVGPLARGNSRFAWMTRKSEETITPWNFEEVVDKGASAQSFIERMTNFDKNLPNEKVLPKHSLLYEYFTVYNELTKVKYVTEGMRKPAFLSGEQKKAIVDLLFKTNRKVTVKQLKEDYFKKIECFDSVEISGVEDRFNASLGTYHDLLKIIKDKDFLDNEENEDILEDIVLTLTLFEDREMIEERLKTYAHLFDDKVMKQLKRRRYTGWGRLSRKLINGIRDKQSGKTILDFLKSDGFANRNFMQLIHDDSLTFKEDIQKAQVSGQGDSLHEHIANLAGSPAIKKGILQTVKVVDELVKVMGRHKPENIVIEMARENQTTQKGQKNSRERMKRIEEGIKELGSQILKEHPVENTQLQNEKLYLYYLQNGRDMYVDQELDINRLSDYDVDHIVPQSFLKDDSIDNKVLTRSDKARGKSDNVPSEEVVKKMKNYWRQLLNAKLITQRKFDNLTKAERGGLSELDKAGFIKRQLVETRQITKHVAQILDSRMNTKYDENDKLIREVKVITLKSKLVSDFRKDFQFYKVREINNYHHAHDAYLNAVVGTALIKKYPKLESEFVYGDYKVYDVRKMIAKSEQEIGKATAKYFFYSNIMNFFKTEITLANGEIRKRPLIETNGETGEIVWDKGRDFATVRKVLSMPQVNIVKKTEVQTGGFSKESILPKRNSDKLIARKKDWDPKKYGGFDSPTVAYSVLVVAKVEKGKSKKLKSVKELLGITIMERSSFEKNPIDFLEAKGYKEVKKDLIIKLPKYSLFELENGRKRMLASAGELQKGNELALPSKYVNFLYLASHYEKLKGSPEDNEQKQLFVEQHKHYLDEIIEQISEFSKRVILADANLDKVLSAYNKHRDKPIREQAENIIHLFTLTNLGAPAAFKYFDTTIDRKRYTSTKEVLDATLIHQSITGLYETRIDLSQLGGDGGEAAAKEAAAKEAAAKEAAAKEAAAKEAAAKGGVLNLEEEYRLHEKPVPSSIDPSWLQLFPTVWAERAGMGLANQVPPVVVELRSGASPVAVRQYPMSKEAREGIRPHIQRFLDLGVLVPCQSPWNTPLLPVKKPGTNDYRPVQDLREINKRVQDIHPTVPNPYNLLSSLPPSHTWYSVLDLKDAFFCLKLHPNSQPLFAFEWRDPEKGNTGQLTWTRLPQGFKNSPTLFDEALHRDLAPFRALNPQVVLLQYVDDLLVAAPTYRDCKEGTQKLLQELSKLGYRVSAKKAQLCQKEVTYLGYLLKEGKRWLTPARKATVMKIPPPTTPRQVREFLGTAGFCRLWIPGFASLAAPLYPLTKESIPFIWTEEHQKAFDRIKEALLSAPALALPDLTKPFTLYVDERAGVARGVLTQTLGPWRRPVAYLSKKLDPVASGWPTCLKAVAAVALLLKDADKLTLGQNVTVIASHSLESIVRQPPDRWMTNARMTHYQSLLLNERVSFAPPAVLNPATLLPVESEATPVHRCSEILAEETGTRRDLKDQPLPGVPAWYTDGSSFIAEGKRRAGAAIVDGKRTVWASSLPEGTSAQKAELVALTQALRLAEGKDINIYTDSRYAFATAHIHGAIYKQRGLLTSAGKDIKNKEEILALLEAIHLPKRVAIIHCPGHQKGNDPVATGNRRADEAAKQAALSTRVLAETTKPAGKRTADGSEFEKRTADGSEFESPKKKAKVE

SEQ ID NO: 6468 - protein, 2113 aa, synthetic construct
MPAAKRVKLDGGDKKYSIGLDIGTNSVGWAVITDEYKVPSKKFKVLGNTDRHSIKKNLIGALLFDSGETAEATRLKRTARRRYTRRKNRICYLQEIFSNEMAKVDDSFFHRLEESFLVEEDKKHERHPIFGNIVDEVAYHEKYPTIYHLRKKLVDSTDKADLRLIYLALAHMIKFRGHFLIEGDLNPDNSDVDKLFIQLVQTYNQLFEENPINASGVDAKAILSARLSKSRRLENLIAQLPGEKKNGLFGNLIALSLGLTPNFKSNFDLAEDAKLQLSKDTYDDDLDNLLAQIGDQYADLFLAAKNLSDAILLSDILRVNTEITKAPLSASMIKRYDEHHQDLTLLKALVRQQLPEKYKEIFFDQSKNGYAGYIDGGASQEEFYKFIKPILEKMDGTEELLVKLNREDLLRKQRTFDNGSIPHQIHLGELHAILRRQEDFYPFLKDNREKIEKILTFRIPYYVGPLARGNSRFAWMTRKSEETITPWNFEEVVDKGASAQSFIERMTNFDKNLPNEKVLPKHSLLYEYFTVYNELTKVKYVTEGMRKPAFLSGEQKKAIVDLLFKTNRKVTVKQLKEDYFKKIECFDSVEISGVEDRFNASLGTYHDLLKIIKDKDFLDNEENEDILEDIVLTLTLFEDREMIEERLKTYAHLFDDKVMKQLKRRRYTGWGRLSRKLINGIRDKQSGKTILDFLKSDGFANRNFMQLIHDDSLTFKEDIQKAQVSGQGDSLHEHIANLAGSPAIKKGILQTVKVVDELVKVMGRHKPENIVIEMARENQTTQKGQKNSRERMKRIEEGIKELGSQILKEHPVENTQLQNEKLYLYYLQNGRDMYVDQELDINRLSDYDVDHIVPQSFLKDDSIDNKVLTRSDKARGKSDNVPSEEVVKKMKNYWRQLLNAKLITQRKFDNLTKAERGGLSELDKAGFIKRQLVETRQITKHVAQILDSRMNTKYDENDKLIREVKVITLKSKLVSDFRKDFQFYKVREINNYHHAHDAYLNAVVGTALIKKYPKLESEFVYGDYKVYDVRKMIAKSEQEIGKATAKYFFYSNIMNFFKTEITLANGEIRKRPLIETNGETGEIVWDKGRDFATVRKVLSMPQVNIVKKTEVQTGGFSKESILPKRNSDKLIARKKDWDPKKYGGFDSPTVAYSVLVVAKVEKGKSKKLKSVKELLGITIMERSSFEKNPIDFLEAKGYKEVKKDLIIKLPKYSLFELENGRKRMLASAGELQKGNELALPSKYVNFLYLASHYEKLKGSPEDNEQKQLFVEQHKHYLDEIIEQISEFSKRVILADANLDKVLSAYNKHRDKPIREQAENIIHLFTLTNLGAPAAFKYFDTTIDRKRYTSTKEVLDATLIHQSITGLYETRIDLSQLGGDGGEAAAKEAAAKEAAAKEAAAKEAAAKEAAAKGGVLNLEEEYRLHEKPVPSSIDPSWLQLFPTVWAERAGMGLANQVPPVVVELRSGASPVAVRQYPMSKEAREGIRPHIQRFLDLGVLVPCQSPWNTPLLPVKKPGTNDYRPVQDLREINKRVQDIHPTVPNPYNLLSSLPPSHTWYSVLDLKDAFFCLKLHPNSQPLFAFEWRDPEKGNTGQLTWTRLPQGFKNSPTLFNEALHRDLAPFRALNPQVVLLQYVDDLLVAAPTYRDCKEGTQKLLQELSKLGYRVSAKKAQLCQKEVTYLGYLLKEGKRWLTPARKATVMKIPPPTTPRQVREFLGTAGFCRLWIPGFASLAAPLYPLTKPSIPFIWTEEHQKAFDRIKEALLSAPALALPDLTKPFTLYVDERAGVARGVLTQTLGPWRRPVAYLSKKLDPVASGWPTCLKAVAAVALLLKDADKLTLGQNVTVIASHSLESIVRQPPDRWMTNARMTHYQSLLLNERVSFAPPAVLNPATLLPVESEATPVHRCSEILAEETGTRRDLKDQPLPGVPAWYTDGSSFIAEGKRRAGAAIVDGKRTVWASSLPEGTSAQKAELVALTQALRLAEGKDINIYTDSRYAFATAHIHGAIYKQRGWLTSAGKDIKNKEEILALLEAIHLPKRVAIIHCPGHQKGNDPVATGNRRADEAAKQAALSTRVLAETTKPAGKRTADGSEFEKRTADGSEFESPKKKAKVE

SEQ ID NO: 6469 - protein, 2115 aa, synthetic construct
MPAAKRVKLDGGDKKYSIGLDIGTNSVGWAVITDEYKVPSKKFKVLGNTDRHSIKKNLIGALLFDSGETAEATRLKRTARRRYTRRKNRICYLQEIFSNEMAKVDDSFFHRLEESFLVEEDKKHERHPIFGNIVDEVAYHEKYPTIYHLRKKLVDSTDKADLRLIYLALAHMIKFRGHFLIEGDLNPDNSDVDKLFIQLVQTYNQLFEENPINASGVDAKAILSARLSKSRRLENLIAQLPGEKKNGLFGNLIALSLGLTPNFKSNFDLAEDAKLQLSKDTYDDDLDNLLAQIGDQYADLFLAAKNLSDAILLSDILRVNTEITKAPLSASMIKRYDEHHQDLTLLKALVRQQLPEKYKEIFFDQSKNGYAGYIDGGASQEEFYKFIKPILEKMDGTEELLVKLNREDLLRKQRTFDNGSIPHQIHLGELHAILRRQEDFYPFLKDNREKIEKILTFRIPYYVGPLARGNSRFAWMTRKSEETITPWNFEEVVDKGASAQSFIERMTNFDKNLPNEKVLPKHSLLYEYFTVYNELTKVKYVTEGMRKPAFLSGEQKKAIVDLLFKTNRKVTVKQLKEDYFKKIECFDSVEISGVEDRFNASLGTYHDLLKIIKDKDFLDNEENEDILEDIVLTLTLFEDREMIEERLKTYAHLFDDKVMKQLKRRRYTGWGRLSRKLINGIRDKQSGKTILDFLKSDGFANRNFMQLIHDDSLTFKEDIQKAQVSGQGDSLHEHIANLAGSPAIKKGILQTVKVVDELVKVMGRHKPENIVIEMARENQTTQKGQKNSRERMKRIEEGIKELGSQILKEHPVENTQLQNEKLYLYYLQNGRDMYVDQELDINRLSDYDVDHIVPQSFLKDDSIDNKVLTRSDKARGKSDNVPSEEVVKKMKNYWRQLLNAKLITQRKFDNLTKAERGGLSELDKAGFIKRQLVETRQITKHVAQILDSRMNTKYDENDKLIREVKVITLKSKLVSDFRKDFQFYKVREINNYHHAHDAYLNAVVGTALIKKYPKLESEFVYGDYKVYDVRKMIAKSEQEIGKATAKYFFYSNIMNFFKTEITLANGEIRKRPLIETNGETGEIVWDKGRDFATVRKVLSMPQVNIVKKTEVQTGGFSKESILPKRNSDKLIARKKDWDPKKYGGFDSPTVAYSVLVVAKVEKGKSKKLKSVKELLGITIMERSSFEKNPIDFLEAKGYKEVKKDLIIKLPKYSLFELENGRKRMLASAGELQKGNELALPSKYVNFLYLASHYEKLKGSPEDNEQKQLFVEQHKHYLDEIIEQISEFSKRVILADANLDKVLSAYNKHRDKPIREQAENIIHLFTLTNLGAPAAFKYFDTTIDRKRYTSTKEVLDATLIHQSITGLYETRIDLSQLGGDGGEAAAKEAAAKEAAAKEAAAKEAAAKEAAAKGGTLNIEDEYRLHETSKEPDVPLGSTWLSDFPQAWAETGGMGLAVRQAPLIIPLKATSTPVSIKQYPMSQEARLGIKPHIQRLLDQGILVPCQSPWNTPLLPVKKPGTNDYRPVQDLREVNKRVEDIHPTVPNPYNLLSGLPPSHQWYTVLDLKDAFFCLRLHPTSQPLFAFEWRDPEMGISGQLTWTRLPQGFKNSPTLFDEALHRDLADFRIQHPDLILLQYVDDLLLAATSEQDCQRGTRALLQTLGNLGYRASAKKAQICQKQVKYLGYLLKEGQRWLTEARKETVMGQPTPKTPRQLREFLGTAGFCRLWIPGFAEMAAPLYPLTKTGTLFNWGPDQQKAYQEIKQALLTAPALGLPDLTKPFELFVDEKQGYAKGVLTQKLGPWRRPVAYLSKKLDPVAAGWPPCLRMVAAIAVLTKDAGKLTMGQPLVILAPHAVEALVKQPPDRWLSNARMTHYQAMLLDTDRVQFGPVVALNPATLLPLPEKEAPHDCLEILAETHGTRPDLTDQPIPDADYTWYTDGSSFLQEGQRRAGAAVTTETEVIWARALPAGTSAQRAELIALTQALKMAEGKKLNVYTDSRYAFATAHVHGEIYRRRGLLTSEGREIKNKNEILALLKALFLPKRLSIIHCPGHQKGNSAEARGNRMADQAAREAAMKAVLETSTLLAGKRTADGSEFEKRTADGSEFESPKKKAKVE

SEQ ID NO: 6470 - protein, 2115 aa, synthetic construct
MPAAKRVKLDGGDKKYSIGLDIGTNSVGWAVITDEYKVPSKKFKVLGNTDRHSIKKNLIGALLFDSGETAEATRLKRTARRRYTRRKNRICYLQEIFSNEMAKVDDSFFHRLEESFLVEEDKKHERHPIFGNIVDEVAYHEKYPTIYHLRKKLVDSTDKADLRLIYLALAHMIKFRGHFLIEGDLNPDNSDVDKLFIQLVQTYNQLFEENPINASGVDAKAILSARLSKSRRLENLIAQLPGEKKNGLFGNLIALSLGLTPNFKSNFDLAEDAKLQLSKDTYDDDLDNLLAQIGDQYADLFLAAKNLSDAILLSDILRVNTEITKAPLSASMIKRYDEHHQDLTLLKALVRQQLPEKYKEIFFDQSKNGYAGYIDGGASQEEFYKFIKPILEKMDGTEELLVKLNREDLLRKQRTFDNGSIPHQIHLGELHAILRRQEDFYPFLKDNREKIEKILTFRIPYYVGPLARGNSRFAWMTRKSEETITPWNFEEVVDKGASAQSFIERMTNFDKNLPNEKVLPKHSLLYEYFTVYNELTKVKYVTEGMRKPAFLSGEQKKAIVDLLFKTNRKVTVKQLKEDYFKKIECFDSVEISGVEDRFNASLGTYHDLLKIIKDKDFLDNEENEDILEDIVLTLTLFEDREMIEERLKTYAHLFDDKVMKQLKRRRYTGWGRLSRKLINGIRDKQSGKTILDFLKSDGFANRNFMQLIHDDSLTFKEDIQKAQVSGQGDSLHEHIANLAGSPAIKKGILQTVKVVDELVKVMGRHKPENIVIEMARENQTTQKGQKNSRERMKRIEEGIKELGSQILKEHPVENTQLQNEKLYLYYLQNGRDMYVDQELDINRLSDYDVDHIVPQSFLKDDSIDNKVLTRSDKARGKSDNVPSEEVVKKMKNYWRQLLNAKLITQRKFDNLTKAERGGLSELDKAGFIKRQLVETRQITKHVAQILDSRMNTKYDENDKLIREVKVITLKSKLVSDFRKDFQFYKVREINNYHHAHDAYLNAVVGTALIKKYPKLESEFVYGDYKVYDVRKMIAKSEQEIGKATAKYFFYSNIMNFFKTEITLANGEIRKRPLIETNGETGEIVWDKGRDFATVRKVLSMPQVNIVKKTEVQTGGFSKESILPKRNSDKLIARKKDWDPKKYGGFDSPTVAYSVLVVAKVEKGKSKKLKSVKELLGITIMERSSFEKNPIDFLEAKGYKEVKKDLIIKLPKYSLFELENGRKRMLASAGELQKGNELALPSKYVNFLYLASHYEKLKGSPEDNEQKQLFVEQHKHYLDEIIEQISEFSKRVILADANLDKVLSAYNKHRDKPIREQAENIIHLFTLTNLGAPAAFKYFDTTIDRKRYTSTKEVLDATLIHQSITGLYETRIDLSQLGGDGGEAAAKEAAAKEAAAKEAAAKEAAAKEAAAKGGTLNIEDEYRLHETSKEPDVPLGSTWLSDFPQAWAETGGMGLAVRQAPLIIPLKATSTPVSIKQYPMSQEARLGIKPHIQRLLDQGILVPCQSPWNTPLLPVKKPGTNDYRPVQDLREVNKRVEDIHPTVPNPYNLLSGLPPSHQWYTVLDLKDAFFCLRLHPTSQPLFAFEWRDPEMGISGQLTWTRLPQGFKNSPTLFNEALHRDLADFRIQHPDLILLQYVDDLLLAATSEQDCQRGTRALLQTLGNLGYRASAKKAQICQKQVKYLGYLLKEGQRWLTEARKETVMGQPTPKTPRQLREFLGTAGFCRLWIPGFAEMAAPLYPLTKPGTLFNWGPDQQKAYQEIKQALLTAPALGLPDLTKPFELFVDEKQGYAKGVLTQKLGPWRRPVAYLSKKLDPVAAGWPPCLRMVAAIAVLTKDAGKLTMGQPLVILAPHAVEALVKQPPDRWLSNARMTHYQAMLLDTDRVQFGPVVALNPATLLPLPEKEAPHDCLEILAETHGTRPDLTDQPIPDADYTWYTDGSSFLQEGQRRAGAAVTTETEVIWARALPAGTSAQRAELIALTQALKMAEGKKLNVYTDSRYAFATAHVHGEIYRRRGWLTSEGREIKNKNEILALLKALFLPKRLSIIHCPGHQKGNSAEARGNRMADQAAREAAMKAVLETSTLLAGKRTADGSEFEKRTADGSEFESPKKKAKVE

SEQ ID NO: 6471 - protein, 2094 aa, synthetic construct
MPAAKRVKLDGGDKKYSIGLDIGTNSVGWAVITDEYKVPSKKFKVLGNTDRHSIKKNLIGALLFDSGETAEATRLKRTARRRYTRRKNRICYLQEIFSNEMAKVDDSFFHRLEESFLVEEDKKHERHPIFGNIVDEVAYHEKYPTIYHLRKKLVDSTDKADLRLIYLALAHMIKFRGHFLIEGDLNPDNSDVDKLFIQLVQTYNQLFEENPINASGVDAKAILSARLSKSRRLENLIAQLPGEKKNGLFGNLIALSLGLTPNFKSNFDLAEDAKLQLSKDTYDDDLDNLLAQIGDQYADLFLAAKNLSDAILLSDILRVNTEITKAPLSASMIKRYDEHHQDLTLLKALVRQQLPEKYKEIFFDQSKNGYAGYIDGGASQEEFYKFIKPILEKMDGTEELLVKLNREDLLRKQRTFDNGSIPHQIHLGELHAILRRQEDFYPFLKDNREKIEKILTFRIPYYVGPLARGNSRFAWMTRKSEETITPWNFEEVVDKGASAQSFIERMTNFDKNLPNEKVLPKHSLLYEYFTVYNELTKVKYVTEGMRKPAFLSGEQKKAIVDLLFKTNRKVTVKQLKEDYFKKIECFDSVEISGVEDRFNASLGTYHDLLKIIKDKDFLDNEENEDILEDIVLTLTLFEDREMIEERLKTYAHLFDDKVMKQLKRRRYTGWGRLSRKLINGIRDKQSGKTILDFLKSDGFANRNFMQLIHDDSLTFKEDIQKAQVSGQGDSLHEHIANLAGSPAIKKGILQTVKVVDELVKVMGRHKPENIVIEMARENQTTQKGQKNSRERMKRIEEGIKELGSQILKEHPVENTQLQNEKLYLYYLQNGRDMYVDQELDINRLSDYDVDHIVPQSFLKDDSIDNKVLTRSDKARGKSDNVPSEEVVKKMKNYWRQLLNAKLITQRKFDNLTKAERGGLSELDKAGFIKRQLVETRQITKHVAQILDSRMNTKYDENDKLIREVKVITLKSKLVSDFRKDFQFYKVREINNYHHAHDAYLNAVVGTALIKKYPKLESEFVYGDYKVYDVRKMIAKSEQEIGKATAKYFFYSNIMNFFKTEITLANGEIRKRPLIETNGETGEIVWDKGRDFATVRKVLSMPQVNIVKKTEVQTGGFSKESILPKRNSDKLIARKKDWDPKKYGGFDSPTVAYSVLVVAKVEKGKSKKLKSVKELLGITIMERSSFEKNPIDFLEAKGYKEVKKDLIIKLPKYSLFELENGRKRMLASAGELQKGNELALPSKYVNFLYLASHYEKLKGSPEDNEQKQLFVEQHKHYLDEIIEQISEFSKRVILADANLDKVLSAYNKHRDKPIREQAENIIHLFTLTNLGAPAAFKYFDTTIDRKRYTSTKEVLDATLIHQSITGLYETRIDLSQLGGDGGPAPGGTVSLQDEHRLFDIPVTTSLPDVWLQDFPQAWAETGGLGRAKCQAPIIIDLKPTAVPVSIKQYPMSLEAHMGIRQHIIKFLELGVLRPCRSPWNTPLLPVKKPGTQDYRPVQDLREINKRTVDIHPTVPNPYNLLSTLKPDYSWYTVLDLKDAFFCLPLAPQSQELFAFEWKDPERGISGQLTWTRLPQGFKNSPTLFNEALHRDLTDFRTQHPEVTLLQYVDDLLLAAPTKKACTQGTRHLLQELGEKGYRASAKKAQICQTKVTYLGYILSEGKRWLTPGRIETVARIPPPRNPREVREFLGTAGFCRLWIPGFAELAAPLYALTKPSTPFTWQTEHQLAFEALKKALLSAPALGLPDTSKPFTLFLDERQGIAKGVLTQKLGPWKRPVAYLSKKLDPVAAGWPPCLRIMAATAMLVKDSAKLTLGQPLTVITPHTLEAIVRQPPDRWITNARLTHYQALLLDTDRVQFGPPVTLNPATLLPVPENQPSPHDCRQVLAETHGTREDLKDQELPDADHTWYTDGSSYLDSGTRRAGAAVVDGHNTIWAQSLPPGTSAQKAELIALTKALELSKGKKANIYTDSRYAFATAHTHGSIYERRGWLTSEGKEIKNKAEIIALLKALFLPQEVAIIHCPGHQKGQDPVAVGNRQADRVARQAAMAEVLTLATEPDNTSHITAGKRTADGSEFEKRTADGSEFESPKKKAKVE

SEQ ID NO: 6472 - protein, 2088 aa, synthetic construct
MPAAKRVKLDGGDKKYSIGLDIGTNSVGWAVITDEYKVPSKKFKVLGNTDRHSIKKNLIGALLFDSGETAEATRLKRTARRRYTRRKNRICYLQEIFSNEMAKVDDSFFHRLEESFLVEEDKKHERHPIFGNIVDEVAYHEKYPTIYHLRKKLVDSTDKADLRLIYLALAHMIKFRGHFLIEGDLNPDNSDVDKLFIQLVQTYNQLFEENPINASGVDAKAILSARLSKSRRLENLIAQLPGEKKNGLFGNLIALSLGLTPNFKSNFDLAEDAKLQLSKDTYDDDLDNLLAQIGDQYADLFLAAKNLSDAILLSDILRVNTEITKAPLSASMIKRYDEHHQDLTLLKALVRQQLPEKYKEIFFDQSKNGYAGYIDGGASQEEFYKFIKPILEKMDGTEELLVKLNREDLLRKQRTFDNGSIPHQIHLGELHAILRRQEDFYPFLKDNREKIEKILTFRIPYYVGPLARGNSRFAWMTRKSEETITPWNFEEVVDKGASAQSFIERMTNFDKNLPNEKVLPKHSLLYEYFTVYNELTKVKYVTEGMRKPAFLSGEQKKAIVDLLFKTNRKVTVKQLKEDYFKKIECFDSVEISGVEDRFNASLGTYHDLLKIIKDKDFLDNEENEDILEDIVLTLTLFEDREMIEERLKTYAHLFDDKVMKQLKRRRYTGWGRLSRKLINGIRDKQSGKTILDFLKSDGFANRNFMQLIHDDSLTFKEDIQKAQVSGQGDSLHEHIANLAGSPAIKKGILQTVKVVDELVKVMGRHKPENIVIEMARENQTTQKGQKNSRERMKRIEEGIKELGSQILKEHPVENTQLQNEKLYLYYLQNGRDMYVDQELDINRLSDYDVDHIVPQSFLKDDSIDNKVLTRSDKARGKSDNVPSEEVVKKMKNYWRQLLNAKLITQRKFDNLTKAERGGLSELDKAGFIKRQLVETRQITKHVAQILDSRMNTKYDENDKLIREVKVITLKSKLVSDFRKDFQFYKVREINNYHHAHDAYLNAVVGTALIKKYPKLESEFVYGDYKVYDVRKMIAKSEQEIGKATAKYFFYSNIMNFFKTEITLANGEIRKRPLIETNGETGEIVWDKGRDFATVRKVLSMPQVNIVKKTEVQTGGFSKESILPKRNSDKLIARKKDWDPKKYGGFDSPTVAYSVLVVAKVEKGKSKKLKSVKELLGITIMERSSFEKNPIDFLEAKGYKEVKKDLIIKLPKYSLFELENGRKRMLASAGELQKGNELALPSKYVNFLYLASHYEKLKGSPEDNEQKQLFVEQHKHYLDEIIEQISEFSKRVILADANLDKVLSAYNKHRDKPIREQAENIIHLFTLTNLGAPAAFKYFDTTIDRKRYTSTKEVLDATLIHQSITGLYETRIDLSQLGGDGGPAPGGTLNLEDEYRLYETSAEPEVSPGSTWLSDFPQAWAETGGMGLAVRQAPLIIPLKATSTPVSIKQYPMSQEAKLGIKPHIQRLLDQGILVPCQSPWNTPLLPVKKPGTNDYRPVQDLREVNKRVEDIHPTVPNPYNLLSGLPPSHRWYTVLDLKDAFFCLRLHPTSQPLFAFEWRDPGMGISGQLTWTRLPQGFKNSPTLFNEALHRDLADFRIQHPDLILLQYVDDILLAATSELDCQQGTRALLLTLGNLGYRASAKKAQLCQKQVKYLGYLLKEGQRWLTEARKETVMGQPTPKTPRQLREFLGKAGFCRLFIPGFAEMAAPLYPLTKPGTLFNWGPDQQKAYQEIKQALLTAPALGLPDLTKPFELFVDEKQGYAKGVLTQKLGPWRRPVAYLSKKLDPVAAGWPPCLRMVAAIAVLRKDAGKLTMGQPLVILAPHAVEALVKQPPDRWLSNARMTHYQAMLLDTDRVQFGPVVALNPATLLPLPEEGAPHDCLEILAETHGTRPDLTDQPIPDADHTWYTDGSSFLQEGQRKAGAAVTTETEVIWARALPAGTSAQRAELIALTQALKMAEGKRLNVYTDSRYAFATAHIHGEIYRRRGWLTSEGREIKNKSEILALLKALFLPKRLSIIHCLGHQKGDSAEARGNRLADQAAREAAIKTPPDTSTLLAGKRTADGSEFEKRTADGSEFESPKKKAKVE

SEQ ID NO: 6473 - protein, 2088 aa, synthetic construct
MPAAKRVKLDGGDKKYSIGLDIGTNSVGWAVITDEYKVPSKKFKVLGNTDRHSIKKNLIGALLFDSGETAEATRLKRTARRRYTRRKNRICYLQEIFSNEMAKVDDSFFHRLEESFLVEEDKKHERHPIFGNIVDEVAYHEKYPTIYHLRKKLVDSTDKADLRLIYLALAHMIKFRGHFLIEGDLNPDNSDVDKLFIQLVQTYNQLFEENPINASGVDAKAILSARLSKSRRLENLIAQLPGEKKNGLFGNLIALSLGLTPNFKSNFDLAEDAKLQLSKDTYDDDLDNLLAQIGDQYADLFLAAKNLSDAILLSDILRVNTEITKAPLSASMIKRYDEHHQDLTLLKALVRQQLPEKYKEIFFDQSKNGYAGYIDGGASQEEFYKFIKPILEKMDGTEELLVKLNREDLLRKQRTFDNGSIPHQIHLGELHAILRRQEDFYPFLKDNREKIEKILTFRIPYYVGPLARGNSRFAWMTRKSEETITPWNFEEVVDKGASAQSFIERMTNFDKNLPNEKVLPKHSLLYEYFTVYNELTKVKYVTEGMRKPAFLSGEQKKAIVDLLFKTNRKVTVKQLKEDYFKKIECFDSVEISGVEDRFNASLGTYHDLLKIIKDKDFLDNEENEDILEDIVLTLTLFEDREMIEERLKTYAHLFDDKVMKQLKRRRYTGWGRLSRKLINGIRDKQSGKTILDFLKSDGFANRNFMQLIHDDSLTFKEDIQKAQVSGQGDSLHEHIANLAGSPAIKKGILQTVKVVDELVKVMGRHKPENIVIEMARENQTTQKGQKNSRERMKRIEEGIKELGSQILKEHPVENTQLQNEKLYLYYLQNGRDMYVDQELDINRLSDYDVDHIVPQSFLKDDSIDNKVLTRSDKARGKSDNVPSEEVVKKMKNYWRQLLNAKLITQRKFDNLTKAERGGLSELDKAGFIKRQLVETRQITKHVAQILDSRMNTKYDENDKLIREVKVITLKSKLVSDFRKDFQFYKVREINNYHHAHDAYLNAVVGTALIKKYPKLESEFVYGDYKVYDVRKMIAKSEQEIGKATAKYFFYSNIMNFFKTEITLANGEIRKRPLIETNGETGEIVWDKGRDFATVRKVLSMPQVNIVKKTEVQTGGFSKESILPKRNSDKLIARKKDWDPKKYGGFDSPTVAYSVLVVAKVEKGKSKKLKSVKELLGITIMERSSFEKNPIDFLEAKGYKEVKKDLIIKLPKYSLFELENGRKRMLASAGELQKGNELALPSKYVNFLYLASHYEKLKGSPEDNEQKQLFVEQHKHYLDEIIEQISEFSKRVILADANLDKVLSAYNKHRDKPIREQAENIIHLFTLTNLGAPAAFKYFDTTIDRKRYTSTKEVLDATLIHQSITGLYETRIDLSQLGGDGGPAPGGTLGIEDEYRLHETSTEPDVSLGSTWLSDFPQAWAETGGMGLAVRQAPLIIPLKATSTPVSIQQYPMSHEARLGIKPHIQRLLDQGILVPCQSPWNTPLLPVKKPGTNDYRPVQDLREVNKRVEDIHPTVPNPYNLLSGLPPSHQWYTVLDLKDAFFCLRLHPTSQPLFAFEWRDPGMGISGQLTWTRLPQGFKNSPTLFNEALHRDLADFRIQHPDLILLQYVDDILLAATSELDCQQGTRALLQTLGDLGYRASAKKAQICQKQVKYLGYLLREGQRWLTEARKETVMGQPVPKTPRQLREFLGTAGFCRLWIPGFAEMAAPLYPLTKPGTLFSWGPDQQKAYQEIKQALLTAPALGLPDLTKPFELFVDEKQGYAKGVLTQKLGPWRRPVAYLSKKLDPVAAGWPPCLRMVAAIAVLTKDAGKLTMGQPLVILAPHAVEALVKQPPDRWLSNARMTHYQAMLLDTDRVQFGPVVALNPATLLPLPEEGAPHDCLEILAETHGTRPDLTDQPIPDADHTWYTDGSSFLQEGQRKAGAAVTTETEVIWAGALPAGTSAQRAELIALTQALKMAEGKRLNVYTDSRYAFATAHIHGEIYRRRGWLTSEGREIKNKSEILALLKALFLPKRLSIIHCLGHQKGDSAEARGNRLADQAAREAAIKTPPDTSTLLAGKRTADGSEFEKRTADGSEFESPKKKAKVE

SEQ ID NO: 6474 - protein, 2088 aa, synthetic construct
MPAAKRVKLDGGDKKYSIGLDIGTNSVGWAVITDEYKVPSKKFKVLGNTDRHSIKKNLIGALLFDSGETAEATRLKRTARRRYTRRKNRICYLQEIFSNEMAKVDDSFFHRLEESFLVEEDKKHERHPIFGNIVDEVAYHEKYPTIYHLRKKLVDSTDKADLRLIYLALAHMIKFRGHFLIEGDLNPDNSDVDKLFIQLVQTYNQLFEENPINASGVDAKAILSARLSKSRRLENLIAQLPGEKKNGLFGNLIALSLGLTPNFKSNFDLAEDAKLQLSKDTYDDDLDNLLAQIGDQYADLFLAAKNLSDAILLSDILRVNTEITKAPLSASMIKRYDEHHQDLTLLKALVRQQLPEKYKEIFFDQSKNGYAGYIDGGASQEEFYKFIKPILEKMDGTEELLVKLNREDLLRKQRTFDNGSIPHQIHLGELHAILRRQEDFYPFLKDNREKIEKILTFRIPYYVGPLARGNSRFAWMTRKSEETITPWNFEEVVDKGASAQSFIERMTNFDKNLPNEKVLPKHSLLYEYFTVYNELTKVKYVTEGMRKPAFLSGEQKKAIVDLLFKTNRKVTVKQLKEDYFKKIECFDSVEISGVEDRFNASLGTYHDLLKIIKDKDFLDNEENEDILEDIVLTLTLFEDREMIEERLKTYAHLFDDKVMKQLKRRRYTGWGRLSRKLINGIRDKQSGKTILDFLKSDGFANRNFMQLIHDDSLTFKEDIQKAQVSGQGDSLHEHIANLAGSPAIKKGILQTVKVVDELVKVMGRHKPENIVIEMARENQTTQKGQKNSRERMKRIEEGIKELGSQILKEHPVENTQLQNEKLYLYYLQNGRDMYVDQELDINRLSDYDVDHIVPQSFLKDDSIDNKVLTRSDKARGKSDNVPSEEVVKKMKNYWRQLLNAKLITQRKFDNLTKAERGGLSELDKAGFIKRQLVETRQITKHVAQILDSRMNTKYDENDKLIREVKVITLKSKLVSDFRKDFQFYKVREINNYHHAHDAYLNAVVGTALIKKYPKLESEFVYGDYKVYDVRKMIAKSEQEIGKATAKYFFYSNIMNFFKTEITLANGEIRKRPLIETNGETGEIVWDKGRDFATVRKVLSMPQVNIVKKTEVQTGGFSKESILPKRNSDKLIARKKDWDPKKYGGFDSPTVAYSVLVVAKVEKGKSKKLKSVKELLGITIMERSSFEKNPIDFLEAKGYKEVKKDLIIKLPKYSLFELENGRKRMLASAGELQKGNELALPSKYVNFLYLASHYEKLKGSPEDNEQKQLFVEQHKHYLDEIIEQISEFSKRVILADANLDKVLSAYNKHRDKPIREQAENIIHLFTLTNLGAPAAFKYFDTTIDRKRYTSTKEVLDATLIHQSITGLYETRIDLSQLGGDGGPAPGGTLNIEDEYRLHETSKGPDVPLGSTWLSDFPQAWAETGGMGLAVRQAPLIIPLKATSTPVSIKQYPMSQEARLGIKPHIQRLLDQGILVPCQSPWNTPLLPVKKPGTNDYRPVQDLREVNKRVEDIHPTVPNPYNLLSGLPPSHQWYTVLDLKDAFFCLRLHPTSQSLFAFEWRDPEMGISGQLTWTRLPQGFKNSPTLFDEALHRDLADFRIQHPDLILLQYVDDLLLAATSELDCQQGTRALLQTLGDLGYRASAKKAQICQKQVKYLGYLLKEGQRWLTEARKETVMGQPTPKTPRQLREFLGTAGFCRLWIPGFAEMAAPLYPLTKTGTLFEWGPDQQKAYQEIKQALLTAPALGLPDLTKPFELFVDEKQGYAKGVLTQKLGPWRRPVAYLSKKLDPVAAGWPPCLRMVAAIAVLTKDAGKLTMGQPLVILAPHAVEALVKQPPDRWLSNARMTHYQALLLDTDRVQFGPIVALNPATLLPLPEEGLQHDCLDILAEAHGTRPDLTDQPLPDADHTWYTDGSSFLQEGQRKAGAAVTTETEVVWAKALPAGTSAQRAELIALTQALKMAEGKKLNVYTDSRYAFATAHIHGEIYRRRGLLTSEGKEIKNKDEILALLKALFLPKRLSIIHCPGHQKGNRAEARGNRMADQAAREVATRETPETSTLLAGKRTADGSEFEKRTADGSEFESPKKKAKVE

SEQ ID NO: 6475 - protein, 2088 aa, synthetic construct
MPAAKRVKLDGGDKKYSIGLDIGTNSVGWAVITDEYKVPSKKFKVLGNTDRHSIKKNLIGALLFDSGETAEATRLKRTARRRYTRRKNRICYLQEIFSNEMAKVDDSFFHRLEESFLVEEDKKHERHPIFGNIVDEVAYHEKYPTIYHLRKKLVDSTDKADLRLIYLALAHMIKFRGHFLIEGDLNPDNSDVDKLFIQLVQTYNQLFEENPINASGVDAKAILSARLSKSRRLENLIAQLPGEKKNGLFGNLIALSLGLTPNFKSNFDLAEDAKLQLSKDTYDDDLDNLLAQIGDQYADLFLAAKNLSDAILLSDILRVNTEITKAPLSASMIKRYDEHHQDLTLLKALVRQQLPEKYKEIFFDQSKNGYAGYIDGGASQEEFYKFIKPILEKMDGTEELLVKLNREDLLRKQRTFDNGSIPHQIHLGELHAILRRQEDFYPFLKDNREKIEKILTFRIPYYVGPLARGNSRFAWMTRKSEETITPWNFEEVVDKGASAQSFIERMTNFDKNLPNEKVLPKHSLLYEYFTVYNELTKVKYVTEGMRKPAFLSGEQKKAIVDLLFKTNRKVTVKQLKEDYFKKIECFDSVEISGVEDRFNASLGTYHDLLKIIKDKDFLDNEENEDILEDIVLTLTLFEDREMIEERLKTYAHLFDDKVMKQLKRRRYTGWGRLSRKLINGIRDKQSGKTILDFLKSDGFANRNFMQLIHDDSLTFKEDIQKAQVSGQGDSLHEHIANLAGSPAIKKGILQTVKVVDELVKVMGRHKPENIVIEMARENQTTQKGQKNSRERMKRIEEGIKELGSQILKEHPVENTQLQNEKLYLYYLQNGRDMYVDQELDINRLSDYDVDHIVPQSFLKDDSIDNKVLTRSDKARGKSDNVPSEEVVKKMKNYWRQLLNAKLITQRKFDNLTKAERGGLSELDKAGFIKRQLVETRQITKHVAQILDSRMNTKYDENDKLIREVKVITLKSKLVSDFRKDFQFYKVREINNYHHAHDAYLNAVVGTALIKKYPKLESEFVYGDYKVYDVRKMIAKSEQEIGKATAKYFFYSNIMNFFKTEITLANGEIRKRPLIETNGETGEIVWDKGRDFATVRKVLSMPQVNIVKKTEVQTGGFSKESILPKRNSDKLIARKKDWDPKKYGGFDSPTVAYSVLVVAKVEKGKSKKLKSVKELLGITIMERSSFEKNPIDFLEAKGYKEVKKDLIIKLPKYSLFELENGRKRMLASAGELQKGNELALPSKYVNFLYLASHYEKLKGSPEDNEQKQLFVEQHKHYLDEIIEQISEFSKRVILADANLDKVLSAYNKHRDKPIREQAENIIHLFTLTNLGAPAAFKYFDTTIDRKRYTSTKEVLDATLIHQSITGLYETRIDLSQLGGDGGPAPGGTLNIEDEYRLHEISTEPDVSPGSTWLSDFPQAWAETGGMGLAVRQAPLIIPLKATSTPVSIKQYPMSQEAKLGIKPHIQRLLDQGILVPCQSPWNTPLLPVKKPGTNDYRPVQGLREVNKRVEDIHPTVPNPYNLLSGLPTSHRWYTVLDLKDAFFCLRLHPTSQPLFASEWRDPGMGISGQLTWTRLPQGFKNSPTLFNEALHRGLADFRIQHPDLILLQYVDDLLLAATSELDCQQGTRALLKTLGNLGYRASAKKAQICQKQVKYLGYLLREGQRWLTEARKETVMGQPTPKTPRQLREFLGTAGFCRLWIPRFAEMAAPLYPLTKPGTLFNWGPDQQKAYHEIKQALLTAPALGLPDLTKPFELFVDEKQGYAKGVLTQKLGPWRRPVAYLSKKLDPVAAGWPPCLRMVAAIAVLTKDAGKLTMGQPLVILAPHAVEALVKQPPDRWLSNARMTHYQAMLLDTDRVQFGPVVALNPATLLPLPEEGAPHDCLEILAETHGTEPDLTDQPIPDADHTWYTDGSSFLQEGQRKAGAAVTTETEVIWARALPAGTSAQRAELIALTQALKMAEGKRLNVYTDSRYAFATAHIHGEIYKRRGWLTSEGREIKNKSEILALLKALFLPKRLSIIHCLGHQKGDSAEARGNRLADQAAREAAIKTPPDTSTLLAGKRTADGSEFEKRTADGSEFESPKKKAKVE

SEQ ID NO: 6476 - protein, 2082 aa, synthetic construct
MPAAKRVKLDGGDKKYSIGLDIGTNSVGWAVITDEYKVPSKKFKVLGNTDRHSIKKNLIGALLFDSGETAEATRLKRTARRRYTRRKNRICYLQEIFSNEMAKVDDSFFHRLEESFLVEEDKKHERHPIFGNIVDEVAYHEKYPTIYHLRKKLVDSTDKADLRLIYLALAHMIKFRGHFLIEGDLNPDNSDVDKLFIQLVQTYNQLFEENPINASGVDAKAILSARLSKSRRLENLIAQLPGEKKNGLFGNLIALSLGLTPNFKSNFDLAEDAKLQLSKDTYDDDLDNLLAQIGDQYADLFLAAKNLSDAILLSDILRVNTEITKAPLSASMIKRYDEHHQDLTLLKALVRQQLPEKYKEIFFDQSKNGYAGYIDGGASQEEFYKFIKPILEKMDGTEELLVKLNREDLLRKQRTFDNGSIPHQIHLGELHAILRRQEDFYPFLKDNREKIEKILTFRIPYYVGPLARGNSRFAWMTRKSEETITPWNFEEVVDKGASAQSFIERMTNFDKNLPNEKVLPKHSLLYEYFTVYNELTKVKYVTEGMRKPAFLSGEQKKAIVDLLFKTNRKVTVKQLKEDYFKKIECFDSVEISGVEDRFNASLGTYHDLLKIIKDKDFLDNEENEDILEDIVLTLTLFEDREMIEERLKTYAHLFDDKVMKQLKRRRYTGWGRLSRKLINGIRDKQSGKTILDFLKSDGFANRNFMQLIHDDSLTFKEDIQKAQVSGQGDSLHEHIANLAGSPAIKKGILQTVKVVDELVKVMGRHKPENIVIEMARENQTTQKGQKNSRERMKRIEEGIKELGSQILKEHPVENTQLQNEKLYLYYLQNGRDMYVDQELDINRLSDYDVDHIVPQSFLKDDSIDNKVLTRSDKARGKSDNVPSEEVVKKMKNYWRQLLNAKLITQRKFDNLTKAERGGLSELDKAGFIKRQLVETRQITKHVAQILDSRMNTKYDENDKLIREVKVITLKSKLVSDFRKDFQFYKVREINNYHHAHDAYLNAVVGTALIKKYPKLESEFVYGDYKVYDVRKMIAKSEQEIGKATAKYFFYSNIMNFFKTEITLANGEIRKRPLIETNGETGEIVWDKGRDFATVRKVLSMPQVNIVKKTEVQTGGFSKESILPKRNSDKLIARKKDWDPKKYGGFDSPTVAYSVLVVAKVEKGKSKKLKSVKELLGITIMERSSFEKNPIDFLEAKGYKEVKKDLIIKLPKYSLFELENGRKRMLASAGELQKGNELALPSKYVNFLYLASHYEKLKGSPEDNEQKQLFVEQHKHYLDEIIEQISEFSKRVILADANLDKVLSAYNKHRDKPIREQAENIIHLFTLTNLGAPAAFKYFDTTIDRKRYTSTKEVLDATLIHQSITGLYETRIDLSQLGGDGGPAPGGTLQLDDEYRLYSPLVKPDQNIQFWLEQFPQAWAETAGMGLAKQVPPQVIQLKASATPVSVRQYPLSKEAQEGIRPHVQRLIQQGILVPVQSPWNTPLLPVRKPGTNDYRPVQDLREVNKRVQDIHPTVPNPYNLLCALPPQRSWYTVLDLKDAFFCLRLHPTSQPLFAFEWRDPGTGRTGQLTWTRLPQGFKNSPTIFDEALHRDLANFRIQHPQVTLLQYVDDLLLAGATKQDCLEGTKALLLELSDLGYRASAKKAQICRREVTYLGYSLRDGQRWLTEARKKTVVQIPAPTTAKQVREFLGTAGFCRLWIPGFATLAAPLYPLTKEKGEFSWAPEHQKAFDAIKKALLSAPALALPDVTKPFTLYVDERKGVARGVLTQTLGPWRRPVAYLSKKLDPVASGWPVCLKAIAAVAILVKDADKLTLGQNITVIAPHALENIVRQPPDRWMTNARMTHYQSLLLTERVTFAPPAALNPATLLPEETDEPVTHDCHQLLIEETGVRKDLTDIPLTGEVLTWFTDGSSYVVEGKRMAGAAVVDGTRTIWASSLPEGTSAQKAELMALTQALRLAEGKSINIYTDSRYAFATAHVHGAIYKQRGLLTSAGREIKNKEEILSLLEALHLPKRLAIIHCPGHQKAKDPISRGNQMADRVAKQAAQGVNLLAGKRTADGSEFEKRTADGSEFESPKKKAKVE

SEQ ID NO: 6477 - protein, 2168 aa, synthetic construct
MPAAKRVKLDGGDKKYSIGLDIGTNSVGWAVITDEYKVPSKKFKVLGNTDRHSIKKNLIGALLFDSGETAEATRLKRTARRRYTRRKNRICYLQEIFSNEMAKVDDSFFHRLEESFLVEEDKKHERHPIFGNIVDEVAYHEKYPTIYHLRKKLVDSTDKADLRLIYLALAHMIKFRGHFLIEGDLNPDNSDVDKLFIQLVQTYNQLFEENPINASGVDAKAILSARLSKSRRLENLIAQLPGEKKNGLFGNLIALSLGLTPNFKSNFDLAEDAKLQLSKDTYDDDLDNLLAQIGDQYADLFLAAKNLSDAILLSDILRVNTEITKAPLSASMIKRYDEHHQDLTLLKALVRQQLPEKYKEIFFDQSKNGYAGYIDGGASQEEFYKFIKPILEKMDGTEELLVKLNREDLLRKQRTFDNGSIPHQIHLGELHAILRRQEDFYPFLKDNREKIEKILTFRIPYYVGPLARGNSRFAWMTRKSEETITPWNFEEVVDKGASAQSFIERMTNFDKNLPNEKVLPKHSLLYEYFTVYNELTKVKYVTEGMRKPAFLSGEQKKAIVDLLFKTNRKVTVKQLKEDYFKKIECFDSVEISGVEDRFNASLGTYHDLLKIIKDKDFLDNEENEDILEDIVLTLTLFEDREMIEERLKTYAHLFDDKVMKQLKRRRYTGWGRLSRKLINGIRDKQSGKTILDFLKSDGFANRNFMQLIHDDSLTFKEDIQKAQVSGQGDSLHEHIANLAGSPAIKKGILQTVKVVDELVKVMGRHKPENIVIEMARENQTTQKGQKNSRERMKRIEEGIKELGSQILKEHPVENTQLQNEKLYLYYLQNGRDMYVDQELDINRLSDYDVDHIVPQSFLKDDSIDNKVLTRSDKARGKSDNVPSEEVVKKMKNYWRQLLNAKLITQRKFDNLTKAERGGLSELDKAGFIKRQLVETRQITKHVAQILDSRMNTKYDENDKLIREVKVITLKSKLVSDFRKDFQFYKVREINNYHHAHDAYLNAVVGTALIKKYPKLESEFVYGDYKVYDVRKMIAKSEQEIGKATAKYFFYSNIMNFFKTEITLANGEIRKRPLIETNGETGEIVWDKGRDFATVRKVLSMPQVNIVKKTEVQTGGFSKESILPKRNSDKLIARKKDWDPKKYGGFDSPTVAYSVLVVAKVEKGKSKKLKSVKELLGITIMERSSFEKNPIDFLEAKGYKEVKKDLIIKLPKYSLFELENGRKRMLASAGELQKGNELALPSKYVNFLYLASHYEKLKGSPEDNEQKQLFVEQHKHYLDEIIEQISEFSKRVILADANLDKVLSAYNKHRDKPIREQAENIIHLFTLTNLGAPAAFKYFDTTIDRKRYTSTKEVLDATLIHQSITGLYETRIDLSQLGGDGGPAPGGMDPLQLLQPLEAEIKGTKLKAHWNSGATITCVPQAFLEEEVPIKNIWIKTIHGEKEQPVYYLTFKIQGRKVEAEVISSPYDYILVSPSDIPWLMKKPLQLTTLVPLQEYEERLLKQTMLTGSYKEKLQSLFLKYDALWQHWENQVGHRRIKPHHIATGTVNPRPQKQYPINPKAKASIQTVINDLLKQGVLIQQNSIMNTPVYPVPKPDGKWRMVLDYREVNKTIPLIAAQNQHSAGILSSIFRGKYKTTLDLSNGFWAHSITPESYWLTAFTWLGQQYCWTRLPQGFLNSPALFNADVVDLLKEVPNVQVYVDDIYISHDDPREHLEQLEKVFSLLLNAGYVVSLKKSEIAQHEVEFLGFNITKEGRGLTETFKQKLLNITPPRDLKQLQSILGKLNFARNFIPNFSELVKPLYNIIATAPGKYITWTTDNSQQLQNIISMLNSAENLEERNPEVRLIMKVNTSPSAGYIRFYNEFAKRPIMYLNYVYTKAEVKFTNTEKLLTTIHKGLIKALDLGMGQEILVYSPIVSMTKIQKTPLPERKALPIRWITWMSYLEDPRIQFHYDKTLPELQQVPTVTDDIIAKIKHPSEFSMVFYTDGSAIKHPNVNKSHNAGMGIAQVQFKPEFTVINTWSIPLGDHTAQLAEVAAVEFACKKALKIDGPVLIVTDSFYVAESVNKELPYWQSNGFFNNKKKPLKHVSKWKSIADCIQLKPDIIIIHEKGHQPTASTFHTEGNNLADKLATQGSYVVNAGKRTADGSEFEKRTADGSEFESPKKKAKVE

SEQ ID NO: 6478 - protein, 2086 aa, synthetic construct
MPAAKRVKLDGGDKKYSIGLDIGTNSVGWAVITDEYKVPSKKFKVLGNTDRHSIKKNLIGALLFDSGETAEATRLKRTARRRYTRRKNRICYLQEIFSNEMAKVDDSFFHRLEESFLVEEDKKHERHPIFGNIVDEVAYHEKYPTIYHLRKKLVDSTDKADLRLIYLALAHMIKFRGHFLIEGDLNPDNSDVDKLFIQLVQTYNQLFEENPINASGVDAKAILSARLSKSRRLENLIAQLPGEKKNGLFGNLIALSLGLTPNFKSNFDLAEDAKLQLSKDTYDDDLDNLLAQIGDQYADLFLAAKNLSDAILLSDILRVNTEITKAPLSASMIKRYDEHHQDLTLLKALVRQQLPEKYKEIFFDQSKNGYAGYIDGGASQEEFYKFIKPILEKMDGTEELLVKLNREDLLRKQRTFDNGSIPHQIHLGELHAILRRQEDFYPFLKDNREKIEKILTFRIPYYVGPLARGNSRFAWMTRKSEETITPWNFEEVVDKGASAQSFIERMTNFDKNLPNEKVLPKHSLLYEYFTVYNELTKVKYVTEGMRKPAFLSGEQKKAIVDLLFKTNRKVTVKQLKEDYFKKIECFDSVEISGVEDRFNASLGTYHDLLKIIKDKDFLDNEENEDILEDIVLTLTLFEDREMIEERLKTYAHLFDDKVMKQLKRRRYTGWGRLSRKLINGIRDKQSGKTILDFLKSDGFANRNFMQLIHDDSLTFKEDIQKAQVSGQGDSLHEHIANLAGSPAIKKGILQTVKVVDELVKVMGRHKPENIVIEMARENQTTQKGQKNSRERMKRIEEGIKELGSQILKEHPVENTQLQNEKLYLYYLQNGRDMYVDQELDINRLSDYDVDHIVPQSFLKDDSIDNKVLTRSDKARGKSDNVPSEEVVKKMKNYWRQLLNAKLITQRKFDNLTKAERGGLSELDKAGFIKRQLVETRQITKHVAQILDSRMNTKYDENDKLIREVKVITLKSKLVSDFRKDFQFYKVREINNYHHAHDAYLNAVVGTALIKKYPKLESEFVYGDYKVYDVRKMIAKSEQEIGKATAKYFFYSNIMNFFKTEITLANGEIRKRPLIETNGETGEIVWDKGRDFATVRKVLSMPQVNIVKKTEVQTGGFSKESILPKRNSDKLIARKKDWDPKKYGGFDSPTVAYSVLVVAKVEKGKSKKLKSVKELLGITIMERSSFEKNPIDFLEAKGYKEVKKDLIIKLPKYSLFELENGRKRMLASAGELQKGNELALPSKYVNFLYLASHYEKLKGSPEDNEQKQLFVEQHKHYLDEIIEQISEFSKRVILADANLDKVLSAYNKHRDKPIREQAENIIHLFTLTNLGAPAAFKYFDTTIDRKRYTSTKEVLDATLIHQSITGLYETRIDLSQLGGDGGPAPGGVLNLEEEYRLHEKPVPSSIDPSWLQLFPTVWAERAGMGLANQVPPVVVELRSGASPVAVRQYPMSKEAREGIRPHIQRFLDLGVLVPCQSPWNTPLLPVKKPGTNDYRPVQDLREINKRVQDIHPTVPNPYNLLSSLPPSHTWYSVLDLKDAFFCLKLHPNSQPLFAFEWRDPEKGNTGQLTWTRLPQGFKNSPTLFNEALHRDLAPFRALNPQVVLLQYVDDLLVAAPTYRDCKEGTQKLLQELSKLGYRVSAKKAQLCQKEVTYLGYLLKEGKRWLTPARKATVMKIPPPTTPRQVREFLGTAGFCRLWIPGFASLAAPLYPLTKPSIPFIWTEEHQKAFDRIKEALLSAPALALPDLTKPFTLYVDERAGVARGVLTQTLGPWRRPVAYLSKKLDPVASGWPTCLKAVAAVALLLKDADKLTLGQNVTVIASHSLESIVRQPPDRWMTNARMTHYQSLLLNERVSFAPPAVLNPATLLPVESEATPVHRCSEILAEETGTRRDLKDQPLPGVPAWYTDGSSFIAEGKRRAGAAIVDGKRTVWASSLPEGTSAQKAELVALTQALRLAEGKDINIYTDSRYAFATAHIHGAIYKQRGWLTSAGKDIKNKEEILALLEAIHLPKRVAIIHCPGHQKGNDPVATGNRRADEAAKQAALSTRVLAETTKPAGKRTADGSEFEKRTADGSEFESPKKKAKVE

SEQ ID NO: 6479 - protein, 2086 aa, synthetic construct
MPAAKRVKLDGGDKKYSIGLDIGTNSVGWAVITDEYKVPSKKFKVLGNTDRHSIKKNLIGALLFDSGETAEATRLKRTARRRYTRRKNRICYLQEIFSNEMAKVDDSFFHRLEESFLVEEDKKHERHPIFGNIVDEVAYHEKYPTIYHLRKKLVDSTDKADLRLIYLALAHMIKFRGHFLIEGDLNPDNSDVDKLFIQLVQTYNQLFEENPINASGVDAKAILSARLSKSRRLENLIAQLPGEKKNGLFGNLIALSLGLTPNFKSNFDLAEDAKLQLSKDTYDDDLDNLLAQIGDQYADLFLAAKNLSDAILLSDILRVNTEITKAPLSASMIKRYDEHHQDLTLLKALVRQQLPEKYKEIFFDQSKNGYAGYIDGGASQEEFYKFIKPILEKMDGTEELLVKLNREDLLRKQRTFDNGSIPHQIHLGELHAILRRQEDFYPFLKDNREKIEKILTFRIPYYVGPLARGNSRFAWMTRKSEETITPWNFEEVVDKGASAQSFIERMTNFDKNLPNEKVLPKHSLLYEYFTVYNELTKVKYVTEGMRKPAFLSGEQKKAIVDLLFKTNRKVTVKQLKEDYFKKIECFDSVEISGVEDRFNASLGTYHDLLKIIKDKDFLDNEENEDILEDIVLTLTLFEDREMIEERLKTYAHLFDDKVMKQLKRRRYTGWGRLSRKLINGIRDKQSGKTILDFLKSDGFANRNFMQLIHDDSLTFKEDIQKAQVSGQGDSLHEHIANLAGSPAIKKGILQTVKVVDELVKVMGRHKPENIVIEMARENQTTQKGQKNSRERMKRIEEGIKELGSQILKEHPVENTQLQNEKLYLYYLQNGRDMYVDQELDINRLSDYDVDHIVPQSFLKDDSIDNKVLTRSDKARGKSDNVPSEEVVKKMKNYWRQLLNAKLITQRKFDNLTKAERGGLSELDKAGFIKRQLVETRQITKHVAQILDSRMNTKYDENDKLIREVKVITLKSKLVSDFRKDFQFYKVREINNYHHAHDAYLNAVVGTALIKKYPKLESEFVYGDYKVYDVRKMIAKSEQEIGKATAKYFFYSNIMNFFKTEITLANGEIRKRPLIETNGETGEIVWDKGRDFATVRKVLSMPQVNIVKKTEVQTGGFSKESILPKRNSDKLIARKKDWDPKKYGGFDSPTVAYSVLVVAKVEKGKSKKLKSVKELLGITIMERSSFEKNPIDFLEAKGYKEVKKDLIIKLPKYSLFELENGRKRMLASAGELQKGNELALPSKYVNFLYLASHYEKLKGSPEDNEQKQLFVEQHKHYLDEIIEQISEFSKRVILADANLDKVLSAYNKHRDKPIREQAENIIHLFTLTNLGAPAAFKYFDTTIDRKRYTSTKEVLDATLIHQSITGLYETRIDLSQLGGDGGPAPGGVLNLEEEYRLHEKPVPSSIDPSWLQLFPTVWAERAGMGLANQVPPVVVELRSGASPVAVRQYPMSKEAREGIRPHIQRFLDLGVLVPCQSPWNTPLLPVKKPGTNDYRPVQDLREINKRVQDIHPTVPNPYNLLSSLPPSHTWYSVLDLKDAFFCLKLHPNSQPLFAFEWRDPEKGNTGQLTWTRLPQGFKNSPTLFNEALHRDLAPFRALNPQVVLLQYVDDLLVAAPTYRDCKEGTQKLLQELSKLGYRVSAKKAQLCQKEVTYLGYLLKEGKRWLTPARKATVMKIPPPTTPRQVREFLGKAGFCRLFIPGFASLAAPLYPLTKPSIPFIWTEEHQKAFDRIKEALLSAPALALPDLTKPFTLYVDERAGVARGVLTQTLGPWRRPVAYLSKKLDPVASGWPTCLKAVAAVALLLKDADKLTLGQNVTVIASHSLESIVRQPPDRWMTNARMTHYQSLLLNERVSFAPPAVLNPATLLPVESEATPVHRCSEILAEETGTRRDLKDQPLPGVPAWYTDGSSFIAEGKRRAGAAIVDGKRTVWASSLPEGTSAQKAELVALTQALRLAEGKDINIYTDSRYAFATAHIHGAIYKQRGWLTSAGKDIKNKEEILALLEAIHLPKRVAIIHCPGHQKGNDPVATGNRRADEAAKQAALSTRVLAETTKPAGKRTADGSEFEKRTADGSEFESPKKKAKVE

SEQ ID NO: 6480 - protein, 2088 aa, synthetic construct
MPAAKRVKLDGGDKKYSIGLDIGTNSVGWAVITDEYKVPSKKFKVLGNTDRHSIKKNLIGALLFDSGETAEATRLKRTARRRYTRRKNRICYLQEIFSNEMAKVDDSFFHRLEESFLVEEDKKHERHPIFGNIVDEVAYHEKYPTIYHLRKKLVDSTDKADLRLIYLALAHMIKFRGHFLIEGDLNPDNSDVDKLFIQLVQTYNQLFEENPINASGVDAKAILSARLSKSRRLENLIAQLPGEKKNGLFGNLIALSLGLTPNFKSNFDLAEDAKLQLSKDTYDDDLDNLLAQIGDQYADLFLAAKNLSDAILLSDILRVNTEITKAPLSASMIKRYDEHHQDLTLLKALVRQQLPEKYKEIFFDQSKNGYAGYIDGGASQEEFYKFIKPILEKMDGTEELLVKLNREDLLRKQRTFDNGSIPHQIHLGELHAILRRQEDFYPFLKDNREKIEKILTFRIPYYVGPLARGNSRFAWMTRKSEETITPWNFEEVVDKGASAQSFIERMTNFDKNLPNEKVLPKHSLLYEYFTVYNELTKVKYVTEGMRKPAFLSGEQKKAIVDLLFKTNRKVTVKQLKEDYFKKIECFDSVEISGVEDRFNASLGTYHDLLKIIKDKDFLDNEENEDILEDIVLTLTLFEDREMIEERLKTYAHLFDDKVMKQLKRRRYTGWGRLSRKLINGIRDKQSGKTILDFLKSDGFANRNFMQLIHDDSLTFKEDIQKAQVSGQGDSLHEHIANLAGSPAIKKGILQTVKVVDELVKVMGRHKPENIVIEMARENQTTQKGQKNSRERMKRIEEGIKELGSQILKEHPVENTQLQNEKLYLYYLQNGRDMYVDQELDINRLSDYDVDHIVPQSFLKDDSIDNKVLTRSDKARGKSDNVPSEEVVKKMKNYWRQLLNAKLITQRKFDNLTKAERGGLSELDKAGFIKRQLVETRQITKHVAQILDSRMNTKYDENDKLIREVKVITLKSKLVSDFRKDFQFYKVREINNYHHAHDAYLNAVVGTALIKKYPKLESEFVYGDYKVYDVRKMIAKSEQEIGKATAKYFFYSNIMNFFKTEITLANGEIRKRPLIETNGETGEIVWDKGRDFATVRKVLSMPQVNIVKKTEVQTGGFSKESILPKRNSDKLIARKKDWDPKKYGGFDSPTVAYSVLVVAKVEKGKSKKLKSVKELLGITIMERSSFEKNPIDFLEAKGYKEVKKDLIIKLPKYSLFELENGRKRMLASAGELQKGNELALPSKYVNFLYLASHYEKLKGSPEDNEQKQLFVEQHKHYLDEIIEQISEFSKRVILADANLDKVLSAYNKHRDKPIREQAENIIHLFTLTNLGAPAAFKYFDTTIDRKRYTSTKEVLDATLIHQSITGLYETRIDLSQLGGDGGPAPGGTLNIEDEYRLHETSKEPDVPLGSTWLSDFPQAWAETGGMGLAVRQAPLIIPLKATSTPVSIKQYPMSQEARLGIKPHIQRLLDQGILVPCQSPWNTPLLPVKKPGTNDYRPVQDLREVNKRVEDIHPTVPNPYNLLSGLPPSHQWYTVLDLKDAFFCLRLHPTSQPLFAFEWRDPEMGISGQLTWTRLPQGFKNSPTLFNEALHRDLADFRIQHPDLILLQYVDDLLLAATSEQDCQRGTRALLQTLGNLGYRASAKKAQICQKQVKYLGYLLKEGQRWLTEARKETVMGQPTPKTPRQLREFLGKAGFCRLFIPGFAEMAAPLYPLTKPGTLFNWGPDQQKAYQEIKQALLTAPALGLPDLTKPFELFVDEKQGYAKGVLTQKLGPWRRPVAYLSKKLDPVAAGWPPCLRMVAAIAVLTKDAGKLTMGQPLVILAPHAVEALVKQPPDRWLSNARMTHYQAMLLDTDRVQFGPVVALNPATLLPLPEKEAPHDCLEILAETHGTRPDLTDQPIPDADYTWYTDGSSFLQEGQRRAGAAVTTETEVIWARALPAGTSAQRAELIALTQALKMAEGKKLNVYTDSRYAFATAHVHGEIYRRRGWLTSEGREIKNKNEILALLKALFLPKRLSIIHCPGHQKGNSAEARGNRMADQAAREAAMKAVLETSTLLAGKRTADGSEFEKRTADGSEFESPKKKAKVE

SEQ ID NO: 6481 - protein, 2167 aa, synthetic construct
MPAAKRVKLDGGDKKYSIGLDIGTNSVGWAVITDEYKVPSKKFKVLGNTDRHSIKKNLIGALLFDSGETAEATRLKRTARRRYTRRKNRICYLQEIFSNEMAKVDDSFFHRLEESFLVEEDKKHERHPIFGNIVDEVAYHEKYPTIYHLRKKLVDSTDKADLRLIYLALAHMIKFRGHFLIEGDLNPDNSDVDKLFIQLVQTYNQLFEENPINASGVDAKAILSARLSKSRRLENLIAQLPGEKKNGLFGNLIALSLGLTPNFKSNFDLAEDAKLQLSKDTYDDDLDNLLAQIGDQYADLFLAAKNLSDAILLSDILRVNTEITKAPLSASMIKRYDEHHQDLTLLKALVRQQLPEKYKEIFFDQSKNGYAGYIDGGASQEEFYKFIKPILEKMDGTEELLVKLNREDLLRKQRTFDNGSIPHQIHLGELHAILRRQEDFYPFLKDNREKIEKILTFRIPYYVGPLARGNSRFAWMTRKSEETITPWNFEEVVDKGASAQSFIERMTNFDKNLPNEKVLPKHSLLYEYFTVYNELTKVKYVTEGMRKPAFLSGEQKKAIVDLLFKTNRKVTVKQLKEDYFKKIECFDSVEISGVEDRFNASLGTYHDLLKIIKDKDFLDNEENEDILEDIVLTLTLFEDREMIEERLKTYAHLFDDKVMKQLKRRRYTGWGRLSRKLINGIRDKQSGKTILDFLKSDGFANRNFMQLIHDDSLTFKEDIQKAQVSGQGDSLHEHIANLAGSPAIKKGILQTVKVVDELVKVMGRHKPENIVIEMARENQTTQKGQKNSRERMKRIEEGIKELGSQILKEHPVENTQLQNEKLYLYYLQNGRDMYVDQELDINRLSDYDVDHIVPQSFLKDDSIDNKVLTRSDKARGKSDNVPSEEVVKKMKNYWRQLLNAKLITQRKFDNLTKAERGGLSELDKAGFIKRQLVETRQITKHVAQILDSRMNTKYDENDKLIREVKVITLKSKLVSDFRKDFQFYKVREINNYHHAHDAYLNAVVGTALIKKYPKLESEFVYGDYKVYDVRKMIAKSEQEIGKATAKYFFYSNIMNFFKTEITLANGEIRKRPLIETNGETGEIVWDKGRDFATVRKVLSMPQVNIVKKTEVQTGGFSKESILPKRNSDKLIARKKDWDPKKYGGFDSPTVAYSVLVVAKVEKGKSKKLKSVKELLGITIMERSSFEKNPIDFLEAKGYKEVKKDLIIKLPKYSLFELENGRKRMLASAGELQKGNELALPSKYVNFLYLASHYEKLKGSPEDNEQKQLFVEQHKHYLDEIIEQISEFSKRVILADANLDKVLSAYNKHRDKPIREQAENIIHLFTLTNLGAPAAFKYFDTTIDRKRYTSTKEVLDATLIHQSITGLYETRIDLSQLGGDGGPAPAPGGMDLLKPLTVERKGVKIKGYWNSQADITCVPKDLLQGEEPVRQQNVTTIHGTQEGDVYYVNLKIDGRRINTEVIGTTLDYAIITPGDVPWILKKPLELTIKLDLEEQQGTLLNNSILSKKGKEELKQLFEKYSALWQSWENQVGHRRIRPHKIATGTVKPTPQKQYHINPKAKPDIQIVINDLLKQGVLIQKESTMNTPVYPVPKPNGRWRMVLDYRAVNKVTPLIAVQNQHSYGILGSLFKGRYKTTIDLSNGFWAHPIVPEDYWITAFTWQGKQYCWTVLPQGFLNSPGLFNGDVVDLLQGIPNVEVYVDDVYISHDSEKEHLEYLDILFNRLKEAGYIISLKKSNIANSIVDFLGFQITNEGRGLTDTFKEKLENITAPTTLKQLQSILGLLNFARNFIPDFTELIAPLYALIPKSPKNYVPWQIEHSTTLETLITKLNGAEYLQGRKGDKTLIMKVNASYTTGYIRYYNEGEKKPISYVSIVFSKTELKFTELEKLLTTVHKGLLKALDLSMGQNIHVYSPIVSMQNIQKTPQTAKKALASRWLSWLSYLEDPRIRFFYDPQMPALKDLPAVDTGKDNKKHPSNFQHIFYTDGSAITSPTKEGHLNAGMGIVYFINKDGNLQKQQEWSISLGNHTAQFAEIAAFEFALKKCLPLGGNILVVTDSNYVAKAYNEELDVWASNGFVNNRKKPLKHISKWKSVADLKRLRPDVVVTHEPGHQKLDSSPHAYGNNLADQLATQASFKVHAGKRTADGSEFEKRTADGSEFESPKKKAKVE

SEQ ID NO: 6482 - protein, 2089 aa, synthetic construct
MPAAKRVKLDGGDKKYSIGLDIGTNSVGWAVITDEYKVPSKKFKVLGNTDRHSIKKNLIGALLFDSGETAEATRLKRTARRRYTRRKNRICYLQEIFSNEMAKVDDSFFHRLEESFLVEEDKKHERHPIFGNIVDEVAYHEKYPTIYHLRKKLVDSTDKADLRLIYLALAHMIKFRGHFLIEGDLNPDNSDVDKLFIQLVQTYNQLFEENPINASGVDAKAILSARLSKSRRLENLIAQLPGEKKNGLFGNLIALSLGLTPNFKSNFDLAEDAKLQLSKDTYDDDLDNLLAQIGDQYADLFLAAKNLSDAILLSDILRVNTEITKAPLSASMIKRYDEHHQDLTLLKALVRQQLPEKYKEIFFDQSKNGYAGYIDGGASQEEFYKFIKPILEKMDGTEELLVKLNREDLLRKQRTFDNGSIPHQIHLGELHAILRRQEDFYPFLKDNREKIEKILTFRIPYYVGPLARGNSRFAWMTRKSEETITPWNFEEVVDKGASAQSFIERMTNFDKNLPNEKVLPKHSLLYEYFTVYNELTKVKYVTEGMRKPAFLSGEQKKAIVDLLFKTNRKVTVKQLKEDYFKKIECFDSVEISGVEDRFNASLGTYHDLLKIIKDKDFLDNEENEDILEDIVLTLTLFEDREMIEERLKTYAHLFDDKVMKQLKRRRYTGWGRLSRKLINGIRDKQSGKTILDFLKSDGFANRNFMQLIHDDSLTFKEDIQKAQVSGQGDSLHEHIANLAGSPAIKKGILQTVKVVDELVKVMGRHKPENIVIEMARENQTTQKGQKNSRERMKRIEEGIKELGSQILKEHPVENTQLQNEKLYLYYLQNGRDMYVDQELDINRLSDYDVDHIVPQSFLKDDSIDNKVLTRSDKARGKSDNVPSEEVVKKMKNYWRQLLNAKLITQRKFDNLTKAERGGLSELDKAGFIKRQLVETRQITKHVAQILDSRMNTKYDENDKLIREVKVITLKSKLVSDFRKDFQFYKVREINNYHHAHDAYLNAVVGTALIKKYPKLESEFVYGDYKVYDVRKMIAKSEQEIGKATAKYFFYSNIMNFFKTEITLANGEIRKRPLIETNGETGEIVWDKGRDFATVRKVLSMPQVNIVKKTEVQTGGFSKESILPKRNSDKLIARKKDWDPKKYGGFDSPTVAYSVLVVAKVEKGKSKKLKSVKELLGITIMERSSFEKNPIDFLEAKGYKEVKKDLIIKLPKYSLFELENGRKRMLASAGELQKGNELALPSKYVNFLYLASHYEKLKGSPEDNEQKQLFVEQHKHYLDEIIEQISEFSKRVILADANLDKVLSAYNKHRDKPIREQAENIIHLFTLTNLGAPAAFKYFDTTIDRKRYTSTKEVLDATLIHQSITGLYETRIDLSQLGGDGGPAPAPGGTLQLEEEYRLFEPESTQKQEMDIWLKNFPQAWAETGGMGTAHCQAPVLIQLKATATPISIRQYPMPHEAYQGIKPHIRRMLDQGILKPCQSPWNTPLLPVKKPGTEDYRPVQDLREVNKRVEDIHPTVPNPYNLLSTLPPSHPWYTVLDLKDAFFCLRLHSESQLLFAFEWRDPEIGLSGQLTWTRLPQGFKNSPTLFNEALHSDLADFRVRYPALVLLQYVDDLLLAAATRTECLEGTKALLETLGNKGYRASAKKAQICLQEVTYLGYSLKDGQRWLTKARKEAILSIPVPKNSRQVREFLGTAGYCRLWIPGFAELAAPLYPLTRPGTLFQWGTEQQLAFEDIKKALLSSPALGLPDITKPFELFIDENSGFAKGVLVQKLGPWKRPVAYLSKKLDTVASGWPPCLRMVAAIAILVKDAGKLTLGQPLTILTSHPVEALVRQPPNKWLSNARMTHYQAMLLDAERVHFGPTVSLNPATLLPLPSGGNHHDCLQILAETHGTRPDLTDQPLPDADLTWYTDGSSFIRNGEREAGAAVTTESEVIWAAPLPPGTSAQRAELIALTQALKMAEGKKLTVYTDSRYAFATTHVHGEIYRRRGWLTSEGKEIKNKNEILALLEALFLPKRLSIIHCPGHQKGDSPQAKGNRLADDTAKKAATETHSSLTVLPAGKRTADGSEFEKRTADGSEFESPKKKAKVE

SEQ ID NO: 6483 - protein, 2003 aa, synthetic construct
MPAAKRVKLDGGDKKYSIGLDIGTNSVGWAVITDEYKVPSKKFKVLGNTDRHSIKKNLIGALLFDSGETAEATRLKRTARRRYTRRKNRICYLQEIFSNEMAKVDDSFFHRLEESFLVEEDKKHERHPIFGNIVDEVAYHEKYPTIYHLRKKLVDSTDKADLRLIYLALAHMIKFRGHFLIEGDLNPDNSDVDKLFIQLVQTYNQLFEENPINASGVDAKAILSARLSKSRRLENLIAQLPGEKKNGLFGNLIALSLGLTPNFKSNFDLAEDAKLQLSKDTYDDDLDNLLAQIGDQYADLFLAAKNLSDAILLSDILRVNTEITKAPLSASMIKRYDEHHQDLTLLKALVRQQLPEKYKEIFFDQSKNGYAGYIDGGASQEEFYKFIKPILEKMDGTEELLVKLNREDLLRKQRTFDNGSIPHQIHLGELHAILRRQEDFYPFLKDNREKIEKILTFRIPYYVGPLARGNSRFAWMTRKSEETITPWNFEEVVDKGASAQSFIERMTNFDKNLPNEKVLPKHSLLYEYFTVYNELTKVKYVTEGMRKPAFLSGEQKKAIVDLLFKTNRKVTVKQLKEDYFKKIECFDSVEISGVEDRFNASLGTYHDLLKIIKDKDFLDNEENEDILEDIVLTLTLFEDREMIEERLKTYAHLFDDKVMKQLKRRRYTGWGRLSRKLINGIRDKQSGKTILDFLKSDGFANRNFMQLIHDDSLTFKEDIQKAQVSGQGDSLHEHIANLAGSPAIKKGILQTVKVVDELVKVMGRHKPENIVIEMARENQTTQKGQKNSRERMKRIEEGIKELGSQILKEHPVENTQLQNEKLYLYYLQNGRDMYVDQELDINRLSDYDVDHIVPQSFLKDDSIDNKVLTRSDKARGKSDNVPSEEVVKKMKNYWRQLLNAKLITQRKFDNLTKAERGGLSELDKAGFIKRQLVETRQITKHVAQILDSRMNTKYDENDKLIREVKVITLKSKLVSDFRKDFQFYKVREINNYHHAHDAYLNAVVGTALIKKYPKLESEFVYGDYKVYDVRKMIAKSEQEIGKATAKYFFYSNIMNFFKTEITLANGEIRKRPLIETNGETGEIVWDKGRDFATVRKVLSMPQVNIVKKTEVQTGGFSKESILPKRNSDKLIARKKDWDPKKYGGFDSPTVAYSVLVVAKVEKGKSKKLKSVKELLGITIMERSSFEKNPIDFLEAKGYKEVKKDLIIKLPKYSLFELENGRKRMLASAGELQKGNELALPSKYVNFLYLASHYEKLKGSPEDNEQKQLFVEQHKHYLDEIIEQISEFSKRVILADANLDKVLSAYNKHRDKPIREQAENIIHLFTLTNLGAPAAFKYFDTTIDRKRYTSTKEVLDATLIHQSITGLYETRIDLSQLGGDGGPAPAPGGGLEHLPPPPEVSQFPLNPERLQALTDLVSRALEAKHIEPYQGPGNNPIFPVKKPNGKWRFIHDLRATNSLTRDLASPSPGPPDLTSLPQDLPHLRTIDLTDAFFQIPLPAVFQPYFAFTLPQPNNHGPGTRYSWRVLPQGFKNSPTLFQQQLSHILAPVRKAFPNSLIIQYMDDILLASPALRELTALTDKVTNALTKEGLPMSLEKTQATPGSIHFLGQVISPDCITYETLPSIHVKSIWSLAELQSMLGELQWVSKGTPVLRSSLHQLYLALRGHRDPRDTIELTSTQVQALKTIQKALALNCRSRLVSQLPILALIILRPTGTTAVLFQTKQKWPLVWLHTPHPATSLRPWGQLLANAIITLDKYSLQHYGQICKSFHHNISNQALTYYLHTSDQSSVAILLQHSHRFHNLGAQPSGPWRSLLQVPQIFQNIDVLRPPFIISPVVIDHAPCLFSDGATSKAAFILWDKQVIHQQVLPLPSTCSAQAGELFGLLAGLQKSKPWPALNIFLDSKFLIGHLRRMAWGAFLGPSTQCDLHARLFPLLQGKTVYVHHVRSHTLLQDPISRLNEATDALMLAPLLPLAGKRTADGSEFEKRTADGSEFESPKKKAKVE

SEQ ID NO: 6484 - protein, 2090 aa, synthetic construct
MPAAKRVKLDGGDKKYSIGLDIGTNSVGWAVITDEYKVPSKKFKVLGNTDRHSIKKNLIGALLFDSGETAEATRLKRTARRRYTRRKNRICYLQEIFSNEMAKVDDSFFHRLEESFLVEEDKKHERHPIFGNIVDEVAYHEKYPTIYHLRKKLVDSTDKADLRLIYLALAHMIKFRGHFLIEGDLNPDNSDVDKLFIQLVQTYNQLFEENPINASGVDAKAILSARLSKSRRLENLIAQLPGEKKNGLFGNLIALSLGLTPNFKSNFDLAEDAKLQLSKDTYDDDLDNLLAQIGDQYADLFLAAKNLSDAILLSDILRVNTEITKAPLSASMIKRYDEHHQDLTLLKALVRQQLPEKYKEIFFDQSKNGYAGYIDGGASQEEFYKFIKPILEKMDGTEELLVKLNREDLLRKQRTFDNGSIPHQIHLGELHAILRRQEDFYPFLKDNREKIEKILTFRIPYYVGPLARGNSRFAWMTRKSEETITPWNFEEVVDKGASAQSFIERMTNFDKNLPNEKVLPKHSLLYEYFTVYNELTKVKYVTEGMRKPAFLSGEQKKAIVDLLFKTNRKVTVKQLKEDYFKKIECFDSVEISGVEDRFNASLGTYHDLLKIIKDKDFLDNEENEDILEDIVLTLTLFEDREMIEERLKTYAHLFDDKVMKQLKRRRYTGWGRLSRKLINGIRDKQSGKTILDFLKSDGFANRNFMQLIHDDSLTFKEDIQKAQVSGQGDSLHEHIANLAGSPAIKKGILQTVKVVDELVKVMGRHKPENIVIEMARENQTTQKGQKNSRERMKRIEEGIKELGSQILKEHPVENTQLQNEKLYLYYLQNGRDMYVDQELDINRLSDYDVDHIVPQSFLKDDSIDNKVLTRSDKARGKSDNVPSEEVVKKMKNYWRQLLNAKLITQRKFDNLTKAERGGLSELDKAGFIKRQLVETRQITKHVAQILDSRMNTKYDENDKLIREVKVITLKSKLVSDFRKDFQFYKVREINNYHHAHDAYLNAVVGTALIKKYPKLESEFVYGDYKVYDVRKMIAKSEQEIGKATAKYFFYSNIMNFFKTEITLANGEIRKRPLIETNGETGEIVWDKGRDFATVRKVLSMPQVNIVKKTEVQTGGFSKESILPKRNSDKLIARKKDWDPKKYGGFDSPTVAYSVLVVAKVEKGKSKKLKSVKELLGITIMERSSFEKNPIDFLEAKGYKEVKKDLIIKLPKYSLFELENGRKRMLASAGELQKGNELALPSKYVNFLYLASHYEKLKGSPEDNEQKQLFVEQHKHYLDEIIEQISEFSKRVILADANLDKVLSAYNKHRDKPIREQAENIIHLFTLTNLGAPAAFKYFDTTIDRKRYTSTKEVLDATLIHQSITGLYETRIDLSQLGGDGGPAPAPGGTLNLEDEYRLYETSAEPEVSPGSTWLSDFPQAWAETGGMGLAVRQAPLIIPLKATSTPVSIKQYPMSQEAKLGIKPHIQRLLDQGILVPCQSPWNTPLLPVKKPGTNDYRPVQDLREVNKRVEDIHPTVPNPYNLLSGLPPSHRWYTVLDLKDAFFCLRLHPTSQPLFAFEWRDPGMGISGQLTWTRLPQGFKNSPTLFNEALHRDLADFRIQHPDLILLQYVDDILLAATSELDCQQGTRALLLTLGNLGYRASAKKAQLCQKQVKYLGYLLKEGQRWLTEARKETVMGQPTPKTPRQLREFLGKAGFCRLFIPGFAEMAAPLYPLTKPGTLFNWGPDQQKAYQEIKQALLTAPALGLPDLTKPFELFVDEKQGYAKGVLTQKLGPWRRPVAYLSKKLDPVAAGWPPCLRMVAAIAVLRKDAGKLTMGQPLVILAPHAVEALVKQPPDRWLSNARMTHYQAMLLDTDRVQFGPVVALNPATLLPLPEEGAPHDCLEILAETHGTRPDLTDQPIPDADHTWYTDGSSFLQEGQRKAGAAVTTETEVIWARALPAGTSAQRAELIALTQALKMAEGKRLNVYTDSRYAFATAHIHGEIYRRRGWLTSEGREIKNKSEILALLKALFLPKRLSIIHCLGHQKGDSAEARGNRLADQAAREAAIKTPPDTSTLLAGKRTADGSEFEKRTADGSEFESPKKKAKVE

SEQ ID NO: 6485 - protein, 2110 aa, synthetic construct
MPAAKRVKLDGGDKKYSIGLDIGTNSVGWAVITDEYKVPSKKFKVLGNTDRHSIKKNLIGALLFDSGETAEATRLKRTARRRYTRRKNRICYLQEIFSNEMAKVDDSFFHRLEESFLVEEDKKHERHPIFGNIVDEVAYHEKYPTIYHLRKKLVDSTDKADLRLIYLALAHMIKFRGHFLIEGDLNPDNSDVDKLFIQLVQTYNQLFEENPINASGVDAKAILSARLSKSRRLENLIAQLPGEKKNGLFGNLIALSLGLTPNFKSNFDLAEDAKLQLSKDTYDDDLDNLLAQIGDQYADLFLAAKNLSDAILLSDILRVNTEITKAPLSASMIKRYDEHHQDLTLLKALVRQQLPEKYKEIFFDQSKNGYAGYIDGGASQEEFYKFIKPILEKMDGTEELLVKLNREDLLRKQRTFDNGSIPHQIHLGELHAILRRQEDFYPFLKDNREKIEKILTFRIPYYVGPLARGNSRFAWMTRKSEETITPWNFEEVVDKGASAQSFIERMTNFDKNLPNEKVLPKHSLLYEYFTVYNELTKVKYVTEGMRKPAFLSGEQKKAIVDLLFKTNRKVTVKQLKEDYFKKIECFDSVEISGVEDRFNASLGTYHDLLKIIKDKDFLDNEENEDILEDIVLTLTLFEDREMIEERLKTYAHLFDDKVMKQLKRRRYTGWGRLSRKLINGIRDKQSGKTILDFLKSDGFANRNFMQLIHDDSLTFKEDIQKAQVSGQGDSLHEHIANLAGSPAIKKGILQTVKVVDELVKVMGRHKPENIVIEMARENQTTQKGQKNSRERMKRIEEGIKELGSQILKEHPVENTQLQNEKLYLYYLQNGRDMYVDQELDINRLSDYDVDHIVPQSFLKDDSIDNKVLTRSDKARGKSDNVPSEEVVKKMKNYWRQLLNAKLITQRKFDNLTKAERGGLSELDKAGFIKRQLVETRQITKHVAQILDSRMNTKYDENDKLIREVKVITLKSKLVSDFRKDFQFYKVREINNYHHAHDAYLNAVVGTALIKKYPKLESEFVYGDYKVYDVRKMIAKSEQEIGKATAKYFFYSNIMNFFKTEITLANGEIRKRPLIETNGETGEIVWDKGRDFATVRKVLSMPQVNIVKKTEVQTGGFSKESILPKRNSDKLIARKKDWDPKKYGGFDSPTVAYSVLVVAKVEKGKSKKLKSVKELLGITIMERSSFEKNPIDFLEAKGYKEVKKDLIIKLPKYSLFELENGRKRMLASAGELQKGNELALPSKYVNFLYLASHYEKLKGSPEDNEQKQLFVEQHKHYLDEIIEQISEFSKRVILADANLDKVLSAYNKHRDKPIREQAENIIHLFTLTNLGAPAAFKYFDTTIDRKRYTSTKEVLDATLIHQSITGLYETRIDLSQLGGDGGPAPAPGGTLNIEDEYRLHETSKEPDVSLGSTWLSDFPQAWAETGGMGLAVRQAPLIIPLKATSTPVSIKQYPMSQEARLGIKPHIQRLLDQGILVPCQSPWNTPLLPVKKPGTNDYRPVQDLREVNKRVEDIHPTVPNPYNLLSGLPPSHQWYTVLDLKDAFFCLRLHPTSQPLFAFEWRDPEMGISGQLTWTRLPQGFKNSPTLFNEALHRDLADFRIQHPDLILLQYVDDLLLAATSELDCQQGTRALLQTLGNLGYRASAKKAQICQKQVKYLGYLLKEGQRWLTEARKETVMGQPTPKTPRQLREFLGKAGFCRLFIPGFAEMAAPLYPLTKPGTLFNWGPDQQKAYQEIKQALLTAPALGLPDLTKPFELFVDEKQGYAKGVLTQKLGPWRRPVAYLSKKLDPVAAGWPPCLRMVAAIAVLTKDAGKLTMGQPLVILAPHAVEALVKQPPDRWLSNARMTHYQALLLDTDRVQFGPVVALNPATLLPLPEEGLQHNCLDILAEAHGTRPDLTDQPLPDADHTWYTDGSSLLQEGQRKAGAAVTTETEVIWAKALPAGTSAQRAELIALTQALKMAEGKKLNVYTDSRYAFATAHIHGEIYRRRGWLTSEGKEIKNKDEILALLKALFLPKRLSIIHCPGHQKGHSAEARGNRMADQAARKAAITETPDTSTLLIENSSPSGGSKRTADGSEFEAGKRTADGSEFEKRTADGSEFESPKKKAKVE

SEQ ID NO: 6486 - protein, 2110 aa, synthetic construct; identical to SEQ ID NO: 6485

SEQ ID NO: 6487 - protein, 2110 aa, synthetic construct
MPAAKRVKLDGGDKKYSIGLDIGTNSVGWAVITDEYKVPSKKFKVLGNTDRHSIKKNLIGALLFDSGETAEATRLKRTARRRYTRRKNRICYLQEIFSNEMAKVDDSFFHRLEESFLVEEDKKHERHPIFGNIVDEVAYHEKYPTIYHLRKKLVDSTDKADLRLIYLALAHMIKFRGHFLIEGDLNPDNSDVDKLFIQLVQTYNQLFEENPINASGVDAKAILSARLSKSRRLENLIAQLPGEKKNGLFGNLIALSLGLTPNFKSNFDLAEDAKLQLSKDTYDDDLDNLLAQIGDQYADLFLAAKNLSDAILLSDILRVNTEITKAPLSASMIKRYDEHHQDLTLLKALVRQQLPEKYKEIFFDQSKNGYAGYIDGGASQEEFYKFIKPILEKMDGTEELLVKLNREDLLRKQRTFDNGSIPHQIHLGELHAILRRQEDFYPFLKDNREKIEKILTFRIPYYVGPLARGNSRFAWMTRKSEETITPWNFEEVVDKGASAQSFIERMTNFDKNLPNEKVLPKHSLLYEYFTVYNELTKVKYVTEGMRKPAFLSGEQKKAIVDLLFKTNRKVTVKQLKEDYFKKIECFDSVEISGVEDRFNASLGTYHDLLKIIKDKDFLDNEENEDILEDIVLTLTLFEDREMIEERLKTYAHLFDDKVMKQLKRRRYTGWGRLSRKLINGIRDKQSGKTILDFLKSDGFANRNFMQLIHDDSLTFKEDIQKAQVSGQGDSLHEHIANLAGSPAIKKGILQTVKVVDELVKVMGRHKPENIVIEMARENQTTQKGQKNSRERMKRIEEGIKELGSQILKEHPVENTQLQNEKLYLYYLQNGRDMYVDQELDINRLSDYDVDHIVPQSFLKDDSIDNKVLTRSDKARGKSDNVPSEEVVKKMKNYWRQLLNAKLITQRKFDNLTKAERGGLSELDKAGFIKRQLVETRQITKHVAQILDSRMNTKYDENDKLIREVKVITLKSKLVSDFRKDFQFYKVREINNYHHAHDAYLNAVVGTALIKKYPKLESEFVYGDYKVYDVRKMIAKSEQEIGKATAKYFFYSNIMNFFKTEITLANGEIRKRPLIETNGETGEIVWDKGRDFATVRKVLSMPQVNIVKKTEVQTGGFSKESILPKRNSDKLIARKKDWDPKKYGGFDSPTVAYSVLVVAKVEKGKSKKLKSVKELLGITIMERSSFEKNPIDFLEAKGYKEVKKDLIIKLPKYSLFELENGRKRMLASAGELQKGNELALPSKYVNFLYLASHYEKLKGSPEDNEQKQLFVEQHKHYLDEIIEQISEFSKRVILADANLDKVLSAYNKHRDKPIREQAENIIHLFTLTNLGAPAAFKYFDTTIDRKRYTSTKEVLDATLIHQSITGLYETRIDLSQLGGDGGPAPAPGGVQEISDSRPMLHIYLNGRRFLGLLDTGADKTCIAGRDWPANWPIHQTESSLQGLGMACGVARSSQPLRWQHEDKSGIIHPFVIPTLPFTLWGRDIMKDIKVRLMTDSPDDSQDLMIGAIESNLFADQISWKSDQPVWLNQWPLKQEKLQALQQLVTEQLQLGHLEESNSPWNTPVFVIKKKSGKWRLLQDLRAVNATMHDMGALQPGLPSPVAVPKGWEIIIIDLQDCFFNIKLHPEDCKRFAFSVPSPNFKRPYQRFQWKVLPQGMKNSPTLCQKFVDKAILTVRDKYQDSYIVHYMDDILLAHPSRSIVDEILTSMIQALNKHGLVVSTEKIQKYDNLKYLGTHIQGDSVSYQKLQIRTDKLRTLNDFQKLLGNINWIRPFLKLTTGELKPLFEILNGDSNPISTRKLTPEACKALQLMNERLSTARVKRLDLSQPWSLCILKTEYTPTACLWQDGVVEWIHLPHISPKVITPYDIFCTQLIIKGRHRSKELFSKDPDYIVVPYTKVQFDLLLQEKEDWPISLLGFLGEVHFHLPKDPLLTFTLQTAIIFPHMTSTTPLEKGIVIFTDGSANGRSVTYIQGREPIIKENTQNTAQQAEIVAVITAFEEVSQPFNLYTDSKYVTGLFPEIETATLSPRTKIYTELKHLQRLIHKRQEKFYIGHIRGHTGLPGPLAQGNAYADSLTRILTAAGKRTADGSEFEKRTADGSEFESPKKKAKVE

SEQ ID NO: 6488 - protein, 2084 aa, synthetic construct
MPAAKRVKLDGGDKKYSIGLDIGTNSVGWAVITDEYKVPSKKFKVLGNTDRHSIKKNLIGALLFDSGETAEATRLKRTARRRYTRRKNRICYLQEIFSNEMAKVDDSFFHRLEESFLVEEDKKHERHPIFGNIVDEVAYHEKYPTIYHLRKKLVDSTDKADLRLIYLALAHMIKFRGHFLIEGDLNPDNSDVDKLFIQLVQTYNQLFEENPINASGVDAKAILSARLSKSRRLENLIAQLPGEKKNGLFGNLIALSLGLTPNFKSNFDLAEDAKLQLSKDTYDDDLDNLLAQIGDQYADLFLAAKNLSDAILLSDILRVNTEITKAPLSASMIKRYDEHHQDLTLLKALVRQQLPEKYKEIFFDQSKNGYAGYIDGGASQEEFYKFIKPILEKMDGTEELLVKLNREDLLRKQRTFDNGSIPHQIHLGELHAILRRQEDFYPFLKDNREKIEKILTFRIPYYVGPLARGNSRFAWMTRKSEETITPWNFEEVVDKGASAQSFIERMTNFDKNLPNEKVLPKHSLLYEYFTVYNELTKVKYVTEGMRKPAFLSGEQKKAIVDLLFKTNRKVTVKQLKEDYFKKIECFDSVEISGVEDRFNASLGTYHDLLKIIKDKDFLDNEENEDILEDIVLTLTLFEDREMIEERLKTYAHLFDDKVMKQLKRRRYTGWGRLSRKLINGIRDKQSGKTILDFLKSDGFANRNFMQLIHDDSLTFKEDIQKAQVSGQGDSLHEHIANLAGSPAIKKGILQTVKVVDELVKVMGRHKPENIVIEMARENQTTQKGQKNSRERMKRIEEGIKELGSQILKEHPVENTQLQNEKLYLYYLQNGRDMYVDQELDINRLSDYDVDHIVPQSFLKDDSIDNKVLTRSDKARGKSDNVPSEEVVKKMKNYWRQLLNAKLITQRKFDNLTKAERGGLSELDKAGFIKRQLVETRQITKHVAQILDSRMNTKYDENDKLIREVKVITLKSKLVSDFRKDFQFYKVREINNYHHAHDAYLNAVVGTALIKKYPKLESEFVYGDYKVYDVRKMIAKSEQEIGKATAKYFFYSNIMNFFKTEITLANGEIRKRPLIETNGETGEIVWDKGRDFATVRKVLSMPQVNIVKKTEVQTGGFSKESILPKRNSDKLIARKKDWDPKKYGGFDSPTVAYSVLVVAKVEKGKSKKLKSVKELLGITIMERSSFEKNPIDFLEAKGYKEVKKDLIIKLPKYSLFELENGRKRMLASAGELQKGNELALPSKYVNFLYLASHYEKLKGSPEDNEQKQLFVEQHKHYLDEIIEQISEFSKRVILADANLDKVLSAYNKHRDKPIREQAENIIHLFTLTNLGAPAAFKYFDTTIDRKRYTSTKEVLDATLIHQSITGLYETRIDLSQLGGDGGPAPAPGGTLQLDDEYRLYSPLVKPDQNIQFWLEQFPQAWAETAGMGLAKQVPPQVIQLKASATPVSVRQYPLSKEAQEGIRPHVQRLIQQGILVPVQSPWNTPLLPVRKPGTNDYRPVQDLREVNKRVQDIHPTVPNPYNLLCALPPQRSWYTVLDLKDAFFCLRLHPTSQPLFAFEWRDPGTGRTGQLTWTRLPQGFKNSPTIFDEALHRDLANFRIQHPQVTLLQYVDDLLLAGATKQDCLEGTKALLLELSDLGYRASAKKAQICRREVTYLGYSLRDGQRWLTEARKKTVVQIPAPTTAKQVREFLGTAGFCRLWIPGFATLAAPLYPLTKEKGEFSWAPEHQKAFDAIKKALLSAPALALPDVTKPFTLYVDERKGVARGVLTQTLGPWRRPVAYLSKKLDPVASGWPVCLKAIAAVAILVKDADKLTLGQNITVIAPHALENIVRQPPDRWMTNARMTHYQSLLLTERVTFAPPAALNPATLLPEETDEPVTHDCHQLLIEETGVRKDLTDIPLTGEVLTWFTDGSSYVVEGKRMAGAAVVDGTRTIWASSLPEGTSAQKAELMALTQALRLAEGKSINIYTDSRYAFATAHVHGAIYKQRGLLTSAGREIKNKEEILSLLEALHLPKRLAIIHCPGHQKAKDPISRGNQMADRVAKQAAQGVNLLAGKRTADGSEFEKRTADGSEFESPKKKAKVE

SEQ ID NO: 6489 - protein, 2081 aa, synthetic construct
MPAAKRVKLDGGDKKYSIGLDIGTNSVGWAVITDEYKVPSKKFKVLGNTDRHSIKKNLIGALLFDSGETAEATRLKRTARRRYTRRKNRICYLQEIFSNEMAKVDDSFFHRLEESFLVEEDKKHERHPIFGNIVDEVAYHEKYPTIYHLRKKLVDSTDKADLRLIYLALAHMIKFRGHFLIEGDLNPDNSDVDKLFIQLVQTYNQLFEENPINASGVDAKAILSARLSKSRRLENLIAQLPGEKKNGLFGNLIALSLGLTPNFKSNFDLAEDAKLQLSKDTYDDDLDNLLAQIGDQYADLFLAAKNLSDAILLSDILRVNTEITKAPLSASMIKRYDEHHQDLTLLKALVRQQLPEKYKEIFFDQSKNGYAGYIDGGASQEEFYKFIKPILEKMDGTEELLVKLNREDLLRKQRTFDNGSIPHQIHLGELHAILRRQEDFYPFLKDNREKIEKILTFRIPYYVGPLARGNSRFAWMTRKSEETITPWNFEEVVDKGASAQSFIERMTNFDKNLPNEKVLPKHSLLYEYFTVYNELTKVKYVTEGMRKPAFLSGEQKKAIVDLLFKTNRKVTVKQLKEDYFKKIECFDSVEISGVEDRFNASLGTYHDLLKIIKDKDFLDNEENEDILEDIVLTLTLFEDREMIEERLKTYAHLFDDKVMKQLKRRRYTGWGRLSRKLINGIRDKQSGKTILDFLKSDGFANRNFMQLIHDDSLTFKEDIQKAQVSGQGDSLHEHIANLAGSPAIKKGILQTVKVVDELVKVMGRHKPENIVIEMARENQTTQKGQKNSRERMKRIEEGIKELGSQILKEHPVENTQLQNEKLYLYYLQNGRDMYVDQELDINRLSDYDVDHIVPQSFLKDDSIDNKVLTRSDKARGKSDNVPSEEVVKKMKNYWRQLLNAKLITQRKFDNLTKAERGGLSELDKAGFIKRQLVETRQITKHVAQILDSRMNTKYDENDKLIREVKVITLKSKLVSDFRKDFQFYKVREINNYHHAHDAYLNAVVGTALIKKYPKLESEFVYGDYKVYDVRKMIAKSEQEIGKATAKYFFYSNIMNFFKTEITLANGEIRKRPLIETNGETGEIVWDKGRDFATVRKVLSMPQVNIVKKTEVQTGGFSKESILPKRNSDKLIARKKDWDPKKYGGFDSPTVAYSVLVVAKVEKGKSKKLKSVKELLGITIMERSSFEKNPIDFLEAKGYKEVKKDLIIKLPKYSLFELENGRKRMLASAGELQKGNELALPSKYVNFLYLASHYEKLKGSPEDNEQKQLFVEQHKHYLDEIIEQISEFSKRVILADANLDKVLSAYNKHRDKPIREQAENIIHLFTLTNLGAPAAFKYFDTTIDRKRYTSTKEVLDATLIHQSITGLYETRIDLSQLGGDGGPAPAPGGIPWLMKKPLQLTTLVPLQEYEERLLKQTMLTGSYKEKLQSLFLKYDALWQHWENQVGHRRIKPHHIATGTVNPRPQKQYPINPKAKASIQTVINDLLKQGVLIQQNSIMNTPVYPVPKPDGKWRMVLDYREVNKTIPLIAAQNQHSAGILSSIFRGKYKTTLDLSNGFWAHSITPESYWLTAFTWLGQQYCWTRLPQGFLNSPALFNADVVDLLKEVPNVQVYVDDIYISHDDPREHLEQLEKVFSLLLNAGYVVSLKKSEIAQHEVEFLGFNITKEGRGLTETFKQKLLNITPPRDLKQLQSILGKLNFARNFIPNFSELVKPLYNIIATAPGKYITWTTDNSQQLQNIISMLNSAENLEERNPEVRLIMKVNTSPSAGYIRFYNEFAKRPIMYLNYVYTKAEVKFTNTEKLLTTIHKGLIKALDLGMGQEILVYSPIVSMTKIQKTPLPERKALPIRWITWMSYLEDPRIQFHYDKTLPELQQVPTVTDDIIAKIKHPSEFSMVFYTDGSAIKHPNVNKSHNAGMGIAQVQFKPEFTVINTWSIPLGDHTAQLAEVAAVEFACKKALKIDGPVLIVTDSFYVAESVNKELPYWQSNGFFNNKKKPLKHVSKWKSIADCIQLKPDIIIIHEKGHQPTASTFHTEGNNLADKLATQGSYVVNAGKRTADGSEFEKRTADGSEFESPKKKAKVE

SEQ ID NO: 6490 - protein, 2170 aa, synthetic construct
MPAAKRVKLDGGDKKYSIGLDIGTNSVGWAVITDEYKVPSKKFKVLGNTDRHSIKKNLIGALLFDSGETAEATRLKRTARRRYTRRKNRICYLQEIFSNEMAKVDDSFFHRLEESFLVEEDKKHERHPIFGNIVDEVAYHEKYPTIYHLRKKLVDSTDKADLRLIYLALAHMIKFRGHFLIEGDLNPDNSDVDKLFIQLVQTYNQLFEENPINASGVDAKAILSARLSKSRRLENLIAQLPGEKKNGLFGNLIALSLGLTPNFKSNFDLAEDAKLQLSKDTYDDDLDNLLAQIGDQYADLFLAAKNLSDAILLSDILRVNTEITKAPLSASMIKRYDEHHQDLTLLKALVRQQLPEKYKEIFFDQSKNGYAGYIDGGASQEEFYKFIKPILEKMDGTEELLVKLNREDLLRKQRTFDNGSIPHQIHLGELHAILRRQEDFYPFLKDNREKIEKILTFRIPYYVGPLARGNSRFAWMTRKSEETITPWNFEEVVDKGASAQSFIERMTNFDKNLPNEKVLPKHSLLYEYFTVYNELTKVKYVTEGMRKPAFLSGEQKKAIVDLLFKTNRKVTVKQLKEDYFKKIECFDSVEISGVEDRFNASLGTYHDLLKIIKDKDFLDNEENEDILEDIVLTLTLFEDREMIEERLKTYAHLFDDKVMKQLKRRRYTGWGRLSRKLINGIRDKQSGKTILDFLKSDGFANRNFMQLIHDDSLTFKEDIQKAQVSGQGDSLHEHIANLAGSPAIKKGILQTVKVVDELVKVMGRHKPENIVIEMARENQTTQKGQKNSRERMKRIEEGIKELGSQILKEHPVENTQLQNEKLYLYYLQNGRDMYVDQELDINRLSDYDVDHIVPQSFLKDDSIDNKVLTRSDKARGKSDNVPSEEVVKKMKNYWRQLLNAKLITQRKFDNLTKAERGGLSELDKAGFIKRQLVETRQITKHVAQILDSRMNTKYDENDKLIREVKVITLKSKLVSDFRKDFQFYKVREINNYHHAHDAYLNAVVGTALIKKYPKLESEFVYGDYKVYDVRKMIAKSEQEIGKATAKYFFYSNIMNFFKTEITLANGEIRKRPLIETNGETGEIVWDKGRDFATVRKVLSMPQVNIVKKTEVQTGGFSKESILPKRNSDKLIARKKDWDPKKYGGFDSPTVAYSVLVVAKVEKGKSKKLKSVKELLGITIMERSSFEKNPIDFLEAKGYKEVKKDLIIKLPKYSLFELENGRKRMLASAGELQKGNELALPSKYVNFLYLASHYEKLKGSPEDNEQKQLFVEQHKHYLDEIIEQISEFSKRVILADANLDKVLSAYNKHRDKPIREQAENIIHLFTLTNLGAPAAFKYFDTTIDRKRYTSTKEVLDATLIHQSITGLYETRIDLSQLGGDGGPAPAPGGMDPLQLLQPLEAEIKGTKLKAHWNSGATITCVPQAFLEEEVPIKNIWIKTIHGEKEQPVYYLTFKIQGRKVEAEVISSPYDYILVSPSDIPWLMKKPLQLTTLVPLQEYEERLLKQTMLTGSYKEKLQSLFLKYDALWQHWENQVGHRRIKPHHIATGTVNPRPQKQYPINPKAKASIQTVINDLLKQGVLIQQNSIMNTPVYPVPKPDGKWRMVLDYREVNKTIPLIAAQNQHSAGILSSIFRGKYKTTLDLSNGFWAHSITPESYWLTAFTWLGQQYCWTRLPQGFLNSPALFNADVVDLLKEVPNVQVYVDDIYISHDDPREHLEQLEKVFSLLLNAGYVVSLKKSEIAQHEVEFLGFNITKEGRGLTETFKQKLLNITPPRDLKQLQSILGKLNFARNFIPNFSELVKPLYNIIATAPGKYITWTTDNSQQLQNIISMLNSAENLEERNPEVRLIMKVNTSPSAGYIRFYNEFAKRPIMYLNYVYTKAEVKFTNTEKLLTTIHKGLIKALDLGMGQEILVYSPIVSMTKIQKTPLPERKALPIRWITWMSYLEDPRIQFHYDKTLPELQQVPTVTDDIIAKIKHPSEFSMVFYTDGSAIKHPNVNKSHNAGMGIAQVQFKPEFTVINTWSIPLGDHTAQLAEVAAVEFACKKALKIDGPVLIVTDSFYVAESVNKELPYWQSNGFFNNKKKPLKHVSKWKSIADCIQLKPDIIIIHEKGHQPTASTFHTEGNNLADKLATQGSYVVNAGKRTADGSEFEKRTADGSEFESPKKKAKVE

SEQ ID NO: 6491 - protein, 2090 aa, synthetic construct
MPAAKRVKLDGGDKKYSIGLDIGTNSVGWAVITDEYKVPSKKFKVLGNTDRHSIKKNLIGALLFDSGETAEATRLKRTARRRYTRRKNRICYLQEIFSNEMAKVDDSFFHRLEESFLVEEDKKHERHPIFGNIVDEVAYHEKYPTIYHLRKKLVDSTDKADLRLIYLALAHMIKFRGHFLIEGDLNPDNSDVDKLFIQLVQTYNQLFEENPINASGVDAKAILSARLSKSRRLENLIAQLPGEKKNGLFGNLIALSLGLTPNFKSNFDLAEDAKLQLSKDTYDDDLDNLLAQIGDQYADLFLAAKNLSDAILLSDILRVNTEITKAPLSASMIKRYDEHHQDLTLLKALVRQQLPEKYKEIFFDQSKNGYAGYIDGGASQEEFYKFIKPILEKMDGTEELLVKLNREDLLRKQRTFDNGSIPHQIHLGELHAILRRQEDFYPFLKDNREKIEKILTFRIPYYVGPLARGNSRFAWMTRKSEETITPWNFEEVVDKGASAQSFIERMTNFDKNLPNEKVLPKHSLLYEYFTVYNELTKVKYVTEGMRKPAFLSGEQKKAIVDLLFKTNRKVTVKQLKEDYFKKIECFDSVEISGVEDRFNASLGTYHDLLKIIKDKDFLDNEENEDILEDIVLTLTLFEDREMIEERLKTYAHLFDDKVMKQLKRRRYTGWGRLSRKLINGIRDKQSGKTILDFLKSDGFANRNFMQLIHDDSLTFKEDIQKAQVSGQGDSLHEHIANLAGSPAIKKGILQTVKVVDELVKVMGRHKPENIVIEMARENQTTQKGQKNSRERMKRIEEGIKELGSQILKEHPVENTQLQNEKLYLYYLQNGRDMYVDQELDINRLSDYDVDHIVPQSFLKDDSIDNKVLTRSDKARGKSDNVPSEEVVKKMKNYWRQLLNAKLITQRKFDNLTKAERGGLSELDKAGFIKRQLVETRQITKHVAQILDSRMNTKYDENDKLIREVKVITLKSKLVSDFRKDFQFYKVREINNYHHAHDAYLNAVVGTALIKKYPKLESEFVYGDYKVYDVRKMIAKSEQEIGKATAKYFFYSNIMNFFKTEITLANGEIRKRPLIETNGETGEIVWDKGRDFATVRKVLSMPQVNIVKKTEVQTGGFSKESILPKRNSDKLIARKKDWDPKKYGGFDSPTVAYSVLVVAKVEKGKSKKLKSVKELLGITIMERSSFEKNPIDFLEAKGYKEVKKDLIIKLPKYSLFELENGRKRMLASAGELQKGNELALPSKYVNFLYLASHYEKLKGSPEDNEQKQLFVEQHKHYLDEIIEQISEFSKRVILADANLDKVLSAYNKHRDKPIREQAENIIHLFTLTNLGAPAAFKYFDTTIDRKRYTSTKEVLDATLIHQSITGLYETRIDLSQLGGDGGPAPAPGGTLNIEDEYRLHETSKEPDVPLGSTWLSDFPQAWAETGGMGLAVRQAPLIIPLKATSTPVSIKQYPMSQEARLGIKPHIQRLLDQGILVPCQSPWNTPLLPVKKPGTNDYRPVQDLREVNKRVEDIHPTVPNPYNLLSGLPPSHQWYTVLDLKDAFFCLRLHPTSQPLFAFEWRDPEMGISGQLTWTRLPQGFKNSPTLFNEALHRDLADFRIQHPDLILLQYVDDLLLAATSEQDCQRGTRALLQTLGNLGYRASAKKAQICQKQVKYLGYLLKEGQRWLTEARKETVMGQPTPKTPRQLREFLGKAGFCRLFIPGFAEMAAPLYPLTKPGTLFNWGPDQQKAYQEIKQALLTAPALGLPDLTKPFELFVDEKQGYAKGVLTQKLGPWRRPVAYLSKKLDPVAAGWPPCLRMVAAIAVLTKDAGKLTMGQPLVILAPHAVEALVKQPPDRWLSNARMTHYQAMLLDTDRVQFGPVVALNPATLLPLPEKEAPHDCLEILAETHGTRPDLTDQPIPDADYTWYTDGSSFLQEGQRRAGAAVTTETEVIWARALPAGTSAQRAELIALTQALKMAEGKKLNVYTDSRYAFATAHVHGEIYRRRGWLTSEGREIKNKNEILALLKALFLPKRLSIIHCPGHQKGNSAEARGNRMADQAAREAAMKAVLETSTLLAGKRTADGSEFEKRTADGSEFESPKKKAKVE

SEQ ID NO: 6492 - protein, 2094 aa, synthetic construct
MPAAKRVKLDGGDKKYSIGLDIGTNSVGWAVITDEYKVPSKKFKVLGNTDRHSIKKNLIGALLFDSGETAEATRLKRTARRRYTRRKNRICYLQEIFSNEMAKVDDSFFHRLEESFLVEEDKKHERHPIFGNIVDEVAYHEKYPTIYHLRKKLVDSTDKADLRLIYLALAHMIKFRGHFLIEGDLNPDNSDVDKLFIQLVQTYNQLFEENPINASGVDAKAILSARLSKSRRLENLIAQLPGEKKNGLFGNLIALSLGLTPNFKSNFDLAEDAKLQLSKDTYDDDLDNLLAQIGDQYADLFLAAKNLSDAILLSDILRVNTEITKAPLSASMIKRYDEHHQDLTLLKALVRQQLPEKYKEIFFDQSKNGYAGYIDGGASQEEFYKFIKPILEKMDGTEELLVKLNREDLLRKQRTFDNGSIPHQIHLGELHAILRRQEDFYPFLKDNREKIEKILTFRIPYYVGPLARGNSRFAWMTRKSEETITPWNFEEVVDKGASAQSFIERMTNFDKNLPNEKVLPKHSLLYEYFTVYNELTKVKYVTEGMRKPAFLSGEQKKAIVDLLFKTNRKVTVKQLKEDYFKKIECFDSVEISGVEDRFNASLGTYHDLLKIIKDKDFLDNEENEDILEDIVLTLTLFEDREMIEERLKTYAHLFDDKVMKQLKRRRYTGWGRLSRKLINGIRDKQSGKTILDFLKSDGFANRNFMQLIHDDSLTFKEDIQKAQVSGQGDSLHEHIANLAGSPAIKKGILQTVKVVDELVKVMGRHKPENIVIEMARENQTTQKGQKNSRERMKRIEEGIKELGSQILKEHPVENTQLQNEKLYLYYLQNGRDMYVDQELDINRLSDYDVDHIVPQSFLKDDSIDNKVLTRSDKARGKSDNVPSEEVVKKMKNYWRQLLNAKLITQRKFDNLTKAERGGLSELDKAGFIKRQLVETRQITKHVAQILDSRMNTKYDENDKLIREVKVITLKSKLVSDFRKDFQFYKVREINNYHHAHDAYLNAVVGTALIKKYPKLESEFVYGDYKVYDVRKMIAKSEQEIGKATAKYFFYSNIMNFFKTEITLANGEIRKRPLIETNGETGEIVWDKGRDFATVRKVLSMPQVNIVKKTEVQTGGFSKESILPKRNSDKLIARKKDWDPKKYGGFDSPTVAYSVLVVAKVEKGKSKKLKSVKELLGITIMERSSFEKNPIDFLEAKGYKEVKKDLIIKLPKYSLFELENGRKRMLASAGELQKGNELALPSKYVNFLYLASHYEKLKGSPEDNEQKQLFVEQHKHYLDEIIEQISEFSKRVILADANLDKVLSAYNKHRDKPIREQAENIIHLFTLTNLGAPAAFKYFDTTIDRKRYTSTKEVLDATLIHQSITGLYETRIDLSQLGGDGGPAPAPAPGGTAPLEEEYRLFLEAPIQNVTLLEQWKREIPKVWAEINPPGLASTQAPIHVQLLSTALPVRVRQYPITLEAKRSLRETIRKFRAAGILRPVHSPWNTPLLPVRKSGTSEYRMVQDLREVNKRVETIHPTVPNPYTLLSLLPPDRIWYSVLDLKDAFFCIPLAPESQLIFAFEWADAEEGESGQLTWTRLPQGFKNSPTLFNEALNRDLQGFRLDHPSVSLLQYVDDLLIAADTQAACLSATRDLLMTLAELGYRVSGKKAQLCQEEVTYLGFKIHKGSRSLSNSRTQAILQIPVPKTKRQVREFLGTIGYCRLWIPGFAELAQPLYAATRPGNDPLVWGEKEEEAFQSLKLALTQPPALALPSLDKPFQLFVEETSGAAKGVLTQALGPWKRPVAYLSKRLDPVAAGWPRCLRAIAAAALLTREASKLTFGQDIEITSSHNLESLLRSPPDKWLTNARITQYQVLLLDPPRVRFKQTAALNPATLLPETDDTLPIHHCLDTLDSLTSTRPDLTDQPLAQAEATLFTDGSSYIRDGKRYAGAAVVTLDSVIWAEPLPIGTSAQKAELIALTKALEWSKDKSVNIYTDSRYAFATLHVHGMIYRERGWLTAGGKAIKNAPEILALLTAVWLPKRVAVMHCKGHQKDDAPTSTGNRRADEVAREVAIRPLSTQATISAGKRTADGSEFEKRTADGSEFESPKKKAKVE

SEQ ID NO: 6493 - protein, 2098 aa, synthetic construct
MPAAKRVKLDGGDKKYSIGLDIGTNSVGWAVITDEYKVPSKKFKVLGNTDRHSIKKNLIGALLFDSGETAEATRLKRTARRRYTRRKNRICYLQEIFSNEMAKVDDSFFHRLEESFLVEEDKKHERHPIFGNIVDEVAYHEKYPTIYHLRKKLVDSTDKADLRLIYLALAHMIKFRGHFLIEGDLNPDNSDVDKLFIQLVQTYNQLFEENPINASGVDAKAILSARLSKSRRLENLIAQLPGEKKNGLFGNLIALSLGLTPNFKSNFDLAEDAKLQLSKDTYDDDLDNLLAQIGDQYADLFLAAKNLSDAILLSDILRVNTEITKAPLSASMIKRYDEHHQDLTLLKALVRQQLPEKYKEIFFDQSKNGYAGYIDGGASQEEFYKFIKPILEKMDGTEELLVKLNREDLLRKQRTFDNGSIPHQIHLGELHAILRRQEDFYPFLKDNREKIEKILTFRIPYYVGPLARGNSRFAWMTRKSEETITPWNFEEVVDKGASAQSFIERMTNFDKNLPNEKVLPKHSLLYEYFTVYNELTKVKYVTEGMRKPAFLSGEQKKAIVDLLFKTNRKVTVKQLKEDYFKKIECFDSVEISGVEDRFNASLGTYHDLLKIIKDKDFLDNEENEDILEDIVLTLTLFEDREMIEERLKTYAHLFDDKVMKQLKRRRYTGWGRLSRKLINGIRDKQSGKTILDFLKSDGFANRNFMQLIHDDSLTFKEDIQKAQVSGQGDSLHEHIANLAGSPAIKKGILQTVKVVDELVKVMGRHKPENIVIEMARENQTTQKGQKNSRERMKRIEEGIKELGSQILKEHPVENTQLQNEKLYLYYLQNGRDMYVDQELDINRLSDYDVDHIVPQSFLKDDSIDNKVLTRSDKARGKSDNVPSEEVVKKMKNYWRQLLNAKLITQRKFDNLTKAERGGLSELDKAGFIKRQLVETRQITKHVAQILDSRMNTKYDENDKLIREVKVITLKSKLVSDFRKDFQFYKVREINNYHHAHDAYLNAVVGTALIKKYPKLESEFVYGDYKVYDVRKMIAKSEQEIGKATAKYFFYSNIMNFFKTEITLANGEIRKRPLIETNGETGEIVWDKGRDFATVRKVLSMPQVNIVKKTEVQTGGFSKESILPKRNSDKLIARKKDWDPKKYGGFDSPTVAYSVLVVAKVEKGKSKKLKSVKELLGITIMERSSFEKNPIDFLEAKGYKEVKKDLIIKLPKYSLFELENGRKRMLASAGELQKGNELALPSKYVNFLYLASHYEKLKGSPEDNEQKQLFVEQHKHYLDEIIEQISEFSKRVILADANLDKVLSAYNKHRDKPIREQAENIIHLFTLTNLGAPAAFKYFDTTIDRKRYTSTKEVLDATLIHQSITGLYETRIDLSQLGGDGGPAPAPAPGGTVSLQDEHRLFDIPVTTSLPDVWLQDFPQAWAETGGLGRAKCQAPIIIDLKPTAVPVSIKQYPMSLEAHMGIRQHIIKFLELGVLRPCRSPWNTPLLPVKKPGTQDYRPVQDLREINKRTVDIHPTVPNPYNLLSTLKPDYSWYTVLDLKDAFFCLPLAPQSQELFAFEWKDPERGISGQLTWTRLPQGFKNSPTLFNEALHRDLTDFRTQHPEVTLLQYVDDLLLAAPTKKACTQGTRHLLQELGEKGYRASAKKAQICQTKVTYLGYILSEGKRWLTPGRIETVARIPPPRNPREVREFLGTAGFCRLWIPGFAELAAPLYALTKPSTPFTWQTEHQLAFEALKKALLSAPALGLPDTSKPFTLFLDERQGIAKGVLTQKLGPWKRPVAYLSKKLDPVAAGWPPCLRIMAATAMLVKDSAKLTLGQPLTVITPHTLEAIVRQPPDRWITNARLTHYQALLLDTDRVQFGPPVTLNPATLLPVPENQPSPHDCRQVLAETHGTREDLKDQELPDADHTWYTDGSSYLDSGTRRAGAAVVDGHNTIWAQSLPPGTSAQKAELIALTKALELSKGKKANIYTDSRYAFATAHTHGSIYERRGWLTSEGKEIKNKAEIIALLKALFLPQEVAIIHCPGHQKGQDPVAVGNRQADRVARQAAMAEVLTLATEPDNTSHITAGKRTADGSEFEKRTADGSEFESPKKKAKVE

SEQ ID NO: 6494 - protein, 2169 aa, synthetic construct
MPAAKRVKLDGGDKKYSIGLDIGTNSVGWAVITDEYKVPSKKFKVLGNTDRHSIKKNLIGALLFDSGETAEATRLKRTARRRYTRRKNRICYLQEIFSNEMAKVDDSFFHRLEESFLVEEDKKHERHPIFGNIVDEVAYHEKYPTIYHLRKKLVDSTDKADLRLIYLALAHMIKFRGHFLIEGDLNPDNSDVDKLFIQLVQTYNQLFEENPINASGVDAKAILSARLSKSRRLENLIAQLPGEKKNGLFGNLIALSLGLTPNFKSNFDLAEDAKLQLSKDTYDDDLDNLLAQIGDQYADLFLAAKNLSDAILLSDILRVNTEITKAPLSASMIKRYDEHHQDLTLLKALVRQQLPEKYKEIFFDQSKNGYAGYIDGGASQEEFYKFIKPILEKMDGTEELLVKLNREDLLRKQRTFDNGSIPHQIHLGELHAILRRQEDFYPFLKDNREKIEKILTFRIPYYVGPLARGNSRFAWMTRKSEETITPWNFEEVVDKGASAQSFIERMTNFDKNLPNEKVLPKHSLLYEYFTVYNELTKVKYVTEGMRKPAFLSGEQKKAIVDLLFKTNRKVTVKQLKEDYFKKIECFDSVEISGVEDRFNASLGTYHDLLKIIKDKDFLDNEENEDILEDIVLTLTLFEDREMIEERLKTYAHLFDDKVMKQLKRRRYTGWGRLSRKLINGIRDKQSGKTILDFLKSDGFANRNFMQLIHDDSLTFKEDIQKAQVSGQGDSLHEHIANLAGSPAIKKGILQTVKVVDELVKVMGRHKPENIVIEMARENQTTQKGQKNSRERMKRIEEGIKELGSQILKEHPVENTQLQNEKLYLYYLQNGRDMYVDQELDINRLSDYDVDHIVPQSFLKDDSIDNKVLTRSDKARGKSDNVPSEEVVKKMKNYWRQLLNAKLITQRKFDNLTKAERGGLSELDKAGFIKRQLVETRQITKHVAQILDSRMNTKYDENDKLIREVKVITLKSKLVSDFRKDFQFYKVREINNYHHAHDAYLNAVVGTALIKKYPKLESEFVYGDYKVYDVRKMIAKSEQEIGKATAKYFFYSNIMNFFKTEITLANGEIRKRPLIETNGETGEIVWDKGRDFATVRKVLSMPQVNIVKKTEVQTGGFSKESILPKRNSDKLIARKKDWDPKKYGGFDSPTVAYSVLVVAKVEKGKSKKLKSVKELLGITIMERSSFEKNPIDFLEAKGYKEVKKDLIIKLPKYSLFELENGRKRMLASAGELQKGNELALPSKYVNFLYLASHYEKLKGSPEDNEQKQLFVEQHKHYLDEIIEQISEFSKRVILADANLDKVLSAYNKHRDKPIREQAENIIHLFTLTNLGAPAAFKYFDTTIDRKRYTSTKEVLDATLIHQSITGLYETRIDLSQLGGDGGPAPAPAPGGMDLLKPLTVERKGVKIKGYWNSQADITCVPKDLLQGEEPVRQQNVTTIHGTQEGDVYYVNLKIDGRRINTEVIGTTLDYAIITPGDVPWILKKPLELTIKLDLEEQQGTLLNNSILSKKGKEELKQLFEKYSALWQSWENQVGHRRIRPHKIATGTVKPTPQKQYHINPKAKPDIQIVINDLLKQGVLIQKESTMNTPVYPVPKPNGRWRMVLDYRAVNKVTPLIAVQNQHSYGILGSLFKGRYKTTIDLSNGFWAHPIVPEDYWITAFTWQGKQYCWTVLPQGFLNSPGLFNGDVVDLLQGIPNVEVYVDDVYISHDSEKEHLEYLDILFNRLKEAGYIISLKKSNIANSIVDFLGFQITNEGRGLTDTFKEKLENITAPTTLKQLQSILGLLNFARNFIPDFTELIAPLYALIPKSPKNYVPWQIEHSTTLETLITKLNGAEYLQGRKGDKTLIMKVNASYTTGYIRYYNEGEKKPISYVSIVFSKTELKFTELEKLLTTVHKGLLKALDLSMGQNIHVYSPIVSMQNIQKTPQTAKKALASRWLSWLSYLEDPRIRFFYDPQMPALKDLPAVDTGKDNKKHPSNFQHIFYTDGSAITSPTKEGHLNAGMGIVYFINKDGNLQKQQEWSISLGNHTAQFAEIAAFEFALKKCLPLGGNILVVTDSNYVAKAYNEELDVWASNGFVNNRKKPLKHISKWKSVADLKRLRPDVVVTHEPGHQKLDSSPHAYGNNLADQLATQASFKVHAGKRTADGSEFEKRTADGSEFESPKKKAKVE

SEQ ID NO: 6495 - protein, 2091 aa, synthetic construct
MPAAKRVKLDGGDKKYSIGLDIGTNSVGWAVITDEYKVPSKKFKVLGNTDRHSIKKNLIGALLFDSGETAEATRLKRTARRRYTRRKNRICYLQEIFSNEMAKVDDSFFHRLEESFLVEEDKKHERHPIFGNIVDEVAYHEKYPTIYHLRKKLVDSTDKADLRLIYLALAHMIKFRGHFLIEGDLNPDNSDVDKLFIQLVQTYNQLFEENPINASGVDAKAILSARLSKSRRLENLIAQLPGEKKNGLFGNLIALSLGLTPNFKSNFDLAEDAKLQLSKDTYDDDLDNLLAQIGDQYADLFLAAKNLSDAILLSDILRVNTEITKAPLSASMIKRYDEHHQDLTLLKALVRQQLPEKYKEIFFDQSKNGYAGYIDGGASQEEFYKFIKPILEKMDGTEELLVKLNREDLLRKQRTFDNGSIPHQIHLGELHAILRRQEDFYPFLKDNREKIEKILTFRIPYYVGPLARGNSRFAWMTRKSEETITPWNFEEVVDKGASAQSFIERMTNFDKNLPNEKVLPKHSLLYEYFTVYNELTKVKYVTEGMRKPAFLSGEQKKAIVDLLFKTNRKVTVKQLKEDYFKKIECFDSVEISGVEDRFNASLGTYHDLLKIIKDKDFLDNEENEDILEDIVLTLTLFEDREMIEERLKTYAHLFDDKVMKQLKRRRYTGWGRLSRKLINGIRDKQSGKTILDFLKSDGFANRNFMQLIHDDSLTFKEDIQKAQVSGQGDSLHEHIANLAGSPAIKKGILQTVKVVDELVKVMGRHKPENIVIEMARENQTTQKGQKNSRERMKRIEEGIKELGSQILKEHPVENTQLQNEKLYLYYLQNGRDMYVDQELDINRLSDYDVDHIVPQSFLKDDSIDNKVLTRSDKARGKSDNVPSEEVVKKMKNYWRQLLNAKLITQRKFDNLTKAERGGLSELDKAGFIKRQLVETRQITKHVAQILDSRMNTKYDENDKLIREVKVITLKSKLVSDFRKDFQFYKVREINNYHHAHDAYLNAVVGTALIKKYPKLESEFVYGDYKVYDVRKMIAKSEQEIGKATAKYFFYSNIMNFFKTEITLANGEIRKRPLIETNGETGEIVWDKGRDFATVRKVLSMPQVNIVKKTEVQTGGFSKESILPKRNSDKLIARKKDWDPKKYGGFDSPTVAYSVLVVAKVEKGKSKKLKSVKELLGITIMERSSFEKNPIDFLEAKGYKEVKKDLIIKLPKYSLFELENGRKRMLASAGELQKGNELALPSKYVNFLYLASHYEKLKGSPEDNEQKQLFVEQHKHYLDEIIEQISEFSKRVILADANLDKVLSAYNKHRDKPIREQAENIIHLFTLTNLGAPAAFKYFDTTIDRKRYTSTKEVLDATLIHQSITGLYETRIDLSQLGGDGGPAPAPAPGGTLQLEEEYRLFEPESTQKQEMDIWLKNFPQAWAETGGMGTAHCQAPVLIQLKATATPISIRQYPMPHEAYQGIKPHIRRMLDQGILKPCQSPWNTPLLPVKKPGTEDYRPVQDLREVNKRVEDIHPTVPNPYNLLSTLPPSHPWYTVLDLKDAFFCLRLHSESQLLFAFEWRDPEIGLSGQLTWTRLPQGFKNSPTLFNEALHSDLADFRVRYPALVLLQYVDDLLLAAATRTECLEGTKALLETLGNKGYRASAKKAQICLQEVTYLGYSLKDGQRWLTKARKEAILSIPVPKNSRQVREFLGTAGYCRLWIPGFAELAAPLYPLTRPGTLFQWGTEQQLAFEDIKKALLSSPALGLPDITKPFELFIDENSGFAKGVLVQKLGPWKRPVAYLSKKLDTVASGWPPCLRMVAAIAILVKDAGKLTLGQPLTILTSHPVEALVRQPPNKWLSNARMTHYQAMLLDAERVHFGPTVSLNPATLLPLPSGGNHHDCLQILAETHGTRPDLTDQPLPDADLTWYTDGSSFIRNGEREAGAAVTTESEVIWAAPLPPGTSAQRAELIALTQALKMAEGKKLTVYTDSRYAFATTHVHGEIYRRRGWLTSEGKEIKNKNEILALLEALFLPKRLSIIHCPGHQKGDSPQAKGNRLADDTAKKAATETHSSLTVLPAGKRTADGSEFEKRTADGSEFESPKKKAKVE

SEQ ID NO: 6496 - protein, 2091 aa, synthetic construct
MPAAKRVKLDGGDKKYSIGLDIGTNSVGWAVITDEYKVPSKKFKVLGNTDRHSIKKNLIGALLFDSGETAEATRLKRTARRRYTRRKNRICYLQEIFSNEMAKVDDSFFHRLEESFLVEEDKKHERHPIFGNIVDEVAYHEKYPTIYHLRKKLVDSTDKADLRLIYLALAHMIKFRGHFLIEGDLNPDNSDVDKLFIQLVQTYNQLFEENPINASGVDAKAILSARLSKSRRLENLIAQLPGEKKNGLFGNLIALSLGLTPNFKSNFDLAEDAKLQLSKDTYDDDLDNLLAQIGDQYADLFLAAKNLSDAILLSDILRVNTEITKAPLSASMIKRYDEHHQDLTLLKALVRQQLPEKYKEIFFDQSKNGYAGYIDGGASQEEFYKFIKPILEKMDGTEELLVKLNREDLLRKQRTFDNGSIPHQIHLGELHAILRRQEDFYPFLKDNREKIEKILTFRIPYYVGPLARGNSRFAWMTRKSEETITPWNFEEVVDKGASAQSFIERMTNFDKNLPNEKVLPKHSLLYEYFTVYNELTKVKYVTEGMRKPAFLSGEQKKAIVDLLFKTNRKVTVKQLKEDYFKKIECFDSVEISGVEDRFNASLGTYHDLLKIIKDKDFLDNEENEDILEDIVLTLTLFEDREMIEERLKTYAHLFDDKVMKQLKRRRYTGWGRLSRKLINGIRDKQSGKTILDFLKSDGFANRNFMQLIHDDSLTFKEDIQKAQVSGQGDSLHEHIANLAGSPAIKKGILQTVKVVDELVKVMGRHKPENIVIEMARENQTTQKGQKNSRERMKRIEEGIKELGSQILKEHPVENTQLQNEKLYLYYLQNGRDMYVDQELDINRLSDYDVDHIVPQSFLKDDSIDNKVLTRSDKARGKSDNVPSEEVVKKMKNYWRQLLNAKLITQRKFDNLTKAERGGLSELDKAGFIKRQLVETRQITKHVAQILDSRMNTKYDENDKLIREVKVITLKSKLVSDFRKDFQFYKVREINNYHHAHDAYLNAVVGTALIKKYPKLESEFVYGDYKVYDVRKMIAKSEQEIGKATAKYFFYSNIMNFFKTEITLANGEIRKRPLIETNGETGEIVWDKGRDFATVRKVLSMPQVNIVKKTEVQTGGFSKESILPKRNSDKLIARKKDWDPKKYGGFDSPTVAYSVLVVAKVEKGKSKKLKSVKELLGITIMERSSFEKNPIDFLEAKGYKEVKKDLIIKLPKYSLFELENGRKRMLASAGELQKGNELALPSKYVNFLYLASHYEKLKGSPEDNEQKQLFVEQHKHYLDEIIEQISEFSKRVILADANLDKVLSAYNKHRDKPIREQAENIIHLFTLTNLGAPAAFKYFDTTIDRKRYTSTKEVLDATLIHQSITGLYETRIDLSQLGGDGGPAPAPAPGGTLQLEEEYRLFEPESTQKQEMDIWLKNFPQAWAETGGMGTAHCQAPVLIQLKATATPISIRQYPMPHEAYQGIKPHIRRMLDQGILKPCQSPWNTPLLPVKKPGTEDYRPVQDLREVNKRVEDIHPTVPNPYNLLSTLPPSHPWYTVLDLKDAFFCLRLHSESQLLFAFEWRDPEIGLSGQLTWTRLPQGFKNSPTLFNEALHSDLADFRVRYPALVLLQYVDDLLLAAATRTECLEGTKALLETLGNKGYRASAKKAQICLQEVTYLGYSLKDGQRWLTKARKEAILSIPVPKNSRQVREFLGKAGYCRLFIPGFAELAAPLYPLTRPGTLFQWGTEQQLAFEDIKKALLSSPALGLPDITKPFELFIDENSGFAKGVLVQKLGPWKRPVAYLSKKLDTVASGWPPCLRMVAAIAILVKDAGKLTLGQPLTILTSHPVEALVRQPPNKWLSNARMTHYQAMLLDAERVHFGPTVSLNPATLLPLPSGGNHHDCLQILAETHGTRPDLTDQPLPDADLTWYTDGSSFIRNGEREAGAAVTTESEVIWAAPLPPGTSAQRAELIALTQALKMAEGKKLTVYTDSRYAFATTHVHGEIYRRRGWLTSEGKEIKNKNEILALLEALFLPKRLSIIHCPGHQKGDSPQAKGNRLADDTAKKAATETHSSLTVLPAGKRTADGSEFEKRTADGSEFESPKKKAKVE

SEQ ID NO: 6497 - protein, 2090 aa, synthetic construct
MPAAKRVKLDGGDKKYSIGLDIGTNSVGWAVITDEYKVPSKKFKVLGNTDRHSIKKNLIGALLFDSGETAEATRLKRTARRRYTRRKNRICYLQEIFSNEMAKVDDSFFHRLEESFLVEEDKKHERHPIFGNIVDEVAYHEKYPTIYHLRKKLVDSTDKADLRLIYLALAHMIKFRGHFLIEGDLNPDNSDVDKLFIQLVQTYNQLFEENPINASGVDAKAILSARLSKSRRLENLIAQLPGEKKNGLFGNLIALSLGLTPNFKSNFDLAEDAKLQLSKDTYDDDLDNLLAQIGDQYADLFLAAKNLSDAILLSDILRVNTEITKAPLSASMIKRYDEHHQDLTLLKALVRQQLPEKYKEIFFDQSKNGYAGYIDGGASQEEFYKFIKPILEKMDGTEELLVKLNREDLLRKQRTFDNGSIPHQIHLGELHAILRRQEDFYPFLKDNREKIEKILTFRIPYYVGPLARGNSRFAWMTRKSEETITPWNFEEVVDKGASAQSFIERMTNFDKNLPNEKVLPKHSLLYEYFTVYNELTKVKYVTEGMRKPAFLSGEQKKAIVDLLFKTNRKVTVKQLKEDYFKKIECFDSVEISGVEDRFNASLGTYHDLLKIIKDKDFLDNEENEDILEDIVLTLTLFEDREMIEERLKTYAHLFDDKVMKQLKRRRYTGWGRLSRKLINGIRDKQSGKTILDFLKSDGFANRNFMQLIHDDSLTFKEDIQKAQVSGQGDSLHEHIANLAGSPAIKKGILQTVKVVDELVKVMGRHKPENIVIEMARENQTTQKGQKNSRERMKRIEEGIKELGSQILKEHPVENTQLQNEKLYLYYLQNGRDMYVDQELDINRLSDYDVDHIVPQSFLKDDSIDNKVLTRSDKARGKSDNVPSEEVVKKMKNYWRQLLNAKLITQRKFDNLTKAERGGLSELDKAGFIKRQLVETRQITKHVAQILDSRMNTKYDENDKLIREVKVITLKSKLVSDFRKDFQFYKVREINNYHHAHDAYLNAVVGTALIKKYPKLESEFVYGDYKVYDVRKMIAKSEQEIGKATAKYFFYSNIMNFFKTEITLANGEIRKRPLIETNGETGEIVWDKGRDFATVRKVLSMPQVNIVKKTEVQTGGFSKESILPKRNSDKLIARKKDWDPKKYGGFDSPTVAYSVLVVAKVEKGKSKKLKSVKELLGITIMERSSFEKNPIDFLEAKGYKEVKKDLIIKLPKYSLFELENGRKRMLASAGELQKGNELALPSKYVNFLYLASHYEKLKGSPEDNEQKQLFVEQHKHYLDEIIEQISEFSKRVILADANLDKVLSAYNKHRDKPIREQAENIIHLFTLTNLGAPAAFKYFDTTIDRKRYTSTKEVLDATLIHQSITGLYETRIDLSQLGGDGGPAPAPAPGGVLNLEEEYRLHEKPVPSSIDPSWLQLFPTVWAERAGMGLANQVPPVVVELRSGASPVAVRQYPMSKEAREGIRPHIQKFLDLGVLVPCRSPWNTPLLPVKKPGTNDYRPVQDLREINKRVQDIHPTVPNPYNLLSSLPPSYTWYSVLDLKDAFFCLRLHPNSQPLFAFEWKDPEKGNTGQLTWTRLPQGFKNSPTLFNEALHRDLAPFRALNPQVVLLQYVDDLLVAAPTYEDCKKGTQKLLQELSKLGYRVSAKKAQLCQREVTYLGYLLKEGKRWLTPARKATVMKIPVPTTPRQVREFLGKAGFCRLFIPGFASLAAPLYPLTKPSIPFIWTEEHQQAFDHIKKALLSAPALALPDLTKPFTLYIDERAGVARGVLTQTLGPWRRPVAYLSKKLDPVASGWPTCLKAVAAVALLLKDADKLTLGQNVTVIASHSLESIVRQPPDRWMTNARMTHYQSLLLNERVSFAPPAVLNPATLLPVESEATPVHRCSEILAEETGTRRDLEDQPLPGVPTWYTDGSSFITEGKRRAGAPIVDGKRTVWASSLPEGTSAQKAELVALTQALRLAEGKNINIYTDSRYAFATAHIHGAIYKQRGWLTSAGKDIKNKEEILALLEAIHLPRRVAIIHCPGHQRGSNPVATGNRRADEAAKQAALSTRVLAGTTKPAGKRTADGSEFEKRTADGSEFESPKKKAKVE

SEQ ID NO: 6498 - protein, 2005 aa, synthetic construct
MPAAKRVKLDGGDKKYSIGLDIGTNSVGWAVITDEYKVPSKKFKVLGNTDRHSIKKNLIGALLFDSGETAEATRLKRTARRRYTRRKNRICYLQEIFSNEMAKVDDSFFHRLEESFLVEEDKKHERHPIFGNIVDEVAYHEKYPTIYHLRKKLVDSTDKADLRLIYLALAHMIKFRGHFLIEGDLNPDNSDVDKLFIQLVQTYNQLFEENPINASGVDAKAILSARLSKSRRLENLIAQLPGEKKNGLFGNLIALSLGLTPNFKSNFDLAEDAKLQLSKDTYDDDLDNLLAQIGDQYADLFLAAKNLSDAILLSDILRVNTEITKAPLSASMIKRYDEHHQDLTLLKALVRQQLPEKYKEIFFDQSKNGYAGYIDGGASQEEFYKFIKPILEKMDGTEELLVKLNREDLLRKQRTFDNGSIPHQIHLGELHAILRRQEDFYPFLKDNREKIEKILTFRIPYYVGPLARGNSRFAWMTRKSEETITPWNFEEVVDKGASAQSFIERMTNFDKNLPNEKVLPKHSLLYEYFTVYNELTKVKYVTEGMRKPAFLSGEQKKAIVDLLFKTNRKVTVKQLKEDYFKKIECFDSVEISGVEDRFNASLGTYHDLLKIIKDKDFLDNEENEDILEDIVLTLTLFEDREMIEERLKTYAHLFDDKVMKQLKRRRYTGWGRLSRKLINGIRDKQSGKTILDFLKSDGFANRNFMQLIHDDSLTFKEDIQKAQVSGQGDSLHEHIANLAGSPAIKKGILQTVKVVDELVKVMGRHKPENIVIEMARENQTTQKGQKNSRERMKRIEEGIKELGSQILKEHPVENTQLQNEKLYLYYLQNGRDMYVDQELDINRLSDYDVDHIVPQSFLKDDSIDNKVLTRSDKARGKSDNVPSEEVVKKMKNYWRQLLNAKLITQRKFDNLTKAERGGLSELDKAGFIKRQLVETRQITKHVAQILDSRMNTKYDENDKLIREVKVITLKSKLVSDFRKDFQFYKVREINNYHHAHDAYLNAVVGTALIKKYPKLESEFVYGDYKVYDVRKMIAKSEQEIGKATAKYFFYSNIMNFFKTEITLANGEIRKRPLIETNGETGEIVWDKGRDFATVRKVLSMPQVNIVKKTEVQTGGFSKESILPKRNSDKLIARKKDWDPKKYGGFDSPTVAYSVLVVAKVEKGKSKKLKSVKELLGITIMERSSFEKNPIDFLEAKGYKEVKKDLIIKLPKYSLFELENGRKRMLASAGELQKGNELALPSKYVNFLYLASHYEKLKGSPEDNEQKQLFVEQHKHYLDEIIEQISEFSKRVILADANLDKVLSAYNKHRDKPIREQAENIIHLFTLTNLGAPAAFKYFDTTIDRKRYTSTKEVLDATLIHQSITGLYETRIDLSQLGGDGGPAPAPAPGGHLPPPPQVDQFPLNLPERLQALNDLVSKALEAGHIEPYSGPGNNPVFPVKKPNGKWRFIHDLRATNAITTTLTSPSPGPPDLTSLPTALPHLQTIDLTDAFFQIPLPKQYQPYFAFTIPQPCNYGPGTRYAWTVLPQGFKNSPTLFQQQLAAVLNPMRKMFPTSTIVQYMDDILLASPTNEELQQLSQLTLQALTTHGLPISQEKTQQTPGQIRFLGQVISPNHITYESTPTIPIKSQWTLTELQVILGEIQWVSKGTPILRKHLQSLYSALHPYRDPRACITLTPQQLHALHAIQQALQHNCRGRLNPALPLLGLISLSTSGTTSVIFQPKQNWPLAWLHTPHPPTSLCPWGHLLACTILTLDKYTLQHYGQLCQSFHHNMSKQALCDFLRNSPHPSVGILIHHMGRFHNLGSQPSGPWKTLLHLPTLLQEPRLLRPIFTLSPVVLDTAPCLFSDGSPQKAAYVLWDQTILQQDITPLPSHETHSAQKGELLALICGLRAAKPWPSLNIFLDSKYLIKYLHSLAIGAFLGTSAHQTLQAALPPLLQGKTIYLHHVRSHTNLPDPISTFNEYTDSLILAPLVPLAGKRTADGSEFEKRTADGSEFESPKKKAKVE

SEQ ID NO: 6499 - protein, 2214 aa, synthetic construct
MPAAKRVKLDGGDKKYSIGLDIGTNSVGWAVITDEYKVPSKKFKVLGNTDRHSIKKNLIGALLFDSGETAEATRLKRTARRRYTRRKNRICYLQEIFSNEMAKVDDSFFHRLEESFLVEEDKKHERHPIFGNIVDEVAYHEKYPTIYHLRKKLVDSTDKADLRLIYLALAHMIKFRGHFLIEGDLNPDNSDVDKLFIQLVQTYNQLFEENPINASGVDAKAILSARLSKSRRLENLIAQLPGEKKNGLFGNLIALSLGLTPNFKSNFDLAEDAKLQLSKDTYDDDLDNLLAQIGDQYADLFLAAKNLSDAILLSDILRVNTEITKAPLSASMIKRYDEHHQDLTLLKALVRQQLPEKYKEIFFDQSKNGYAGYIDGGASQEEFYKFIKPILEKMDGTEELLVKLNREDLLRKQRTFDNGSIPHQIHLGELHAILRRQEDFYPFLKDNREKIEKILTFRIPYYVGPLARGNSRFAWMTRKSEETITPWNFEEVVDKGASAQSFIERMTNFDKNLPNEKVLPKHSLLYEYFTVYNELTKVKYVTEGMRKPAFLSGEQKKAIVDLLFKTNRKVTVKQLKEDYFKKIECFDSVEISGVEDRFNASLGTYHDLLKIIKDKDFLDNEENEDILEDIVLTLTLFEDREMIEERLKTYAHLFDDKVMKQLKRRRYTGWGRLSRKLINGIRDKQSGKTILDFLKSDGFANRNFMQLIHDDSLTFKEDIQKAQVSGQGDSLHEHIANLAGSPAIKKGILQTVKVVDELVKVMGRHKPENIVIEMARENQTTQKGQKNSRERMKRIEEGIKELGSQILKEHPVENTQLQNEKLYLYYLQNGRDMYVDQELDINRLSDYDVDHIVPQSFLKDDSIDNKVLTRSDKARGKSDNVPSEEVVKKMKNYWRQLLNAKLITQRKFDNLTKAERGGLSELDKAGFIKRQLVETRQITKHVAQILDSRMNTKYDENDKLIREVKVITLKSKLVSDFRKDFQFYKVREINNYHHAHDAYLNAVVGTALIKKYPKLESEFVYGDYKVYDVRKMIAKSEQEIGKATAKYFFYSNIMNFFKTEITLANGEIRKRPLIETNGETGEIVWDKGRDFATVRKVLSMPQVNIVKKTEVQTGGFSKESILPKRNSDKLIARKKDWDPKKYGGFDSPTVAYSVLVVAKVEKGKSKKLKSVKELLGITIMERSSFEKNPIDFLEAKGYKEVKKDLIIKLPKYSLFELENGRKRMLASAGELQKGNELALPSKYVNFLYLASHYEKLKGSPEDNEQKQLFVEQHKHYLDEIIEQISEFSKRVILADANLDKVLSAYNKHRDKPIREQAENIIHLFTLTNLGAPAAFKYFDTTIDRKRYTSTKEVLDATLIHQSITGLYETRIDLSQLGGDGGPAPAPAPGGTLGDQGSRGSDPLPEPRVTLTVEGIPTEFLVNTGAEHSVLTKPMGKMGSKRTVVAGATGSKVYPWTTKRLLKIGQKQVTHSFLVIPECPAPLLGRDLLTKLKAQIQFSTEGPQVTWEDRPAMCLVLNLEEEYRLHEKPVPPSIDPSWLQLFPMVWAEKAGMGLANQVPPVVVELKSDASPVAVRQYPMSKEAREGIRPHIQRFLDLGILVPCQSPWNTPLLPVKKPGTNDYRPVQDLREVNKRVQDIHPTVPNPYNLLSSLPPSHTWYSVLDLKDAFFCLKLHPNSQPLFAFEWRDPEKGNTGQLTWTRLPQGFKNSPTLFNEALHRDLASFRALNPQVVMLQYVDDLLVAAPTYRDCKEGTRRLLQELSKLGYRVSAKKAQLCREEVTYLGYLLKGGKRWLTPARKATVMKIPTPTTPRQVREFLGKAGFCRLFIPGFASLAAPLYPLTRPKVPFTWTEAHQEAFGRIKEALLSAPALALPDLTKPFALYVDEKEGVARGVLTQTLGPWRRPVAYLSKKLDPVASGWPTCLKAIAAVALLLKDADKLTLGQNVLVIAPHNLESIVRQPPDRWMTNARMTHYQSLLLNERVSFAPPAILNPATLLPVESDDTPIHICSEILAEETGTRPDLRDQPLPGVPAWYTDGSSFIMDGRRQAGAAIVDNKRTVWASNLPEGTSAQKAELIALTQALRLAEGKSINIYTDSRYAFATAHVHGAIYKQRGWLTSAGKDIKNKEEILALLEAIHLPKRVAIIHCPGHQRGTDPVATGNRKADEAAKQAAQSTRILTETTKNAGKRTADGSEFEKRTADGSEFESPKKKAKVE

SEQ ID NO: 6500 - protein, 2092 aa, synthetic construct
MPAAKRVKLDGGDKKYSIGLDIGTNSVGWAVITDEYKVPSKKFKVLGNTDRHSIKKNLIGALLFDSGETAEATRLKRTARRRYTRRKNRICYLQEIFSNEMAKVDDSFFHRLEESFLVEEDKKHERHPIFGNIVDEVAYHEKYPTIYHLRKKLVDSTDKADLRLIYLALAHMIKFRGHFLIEGDLNPDNSDVDKLFIQLVQTYNQLFEENPINASGVDAKAILSARLSKSRRLENLIAQLPGEKKNGLFGNLIALSLGLTPNFKSNFDLAEDAKLQLSKDTYDDDLDNLLAQIGDQYADLFLAAKNLSDAILLSDILRVNTEITKAPLSASMIKRYDEHHQDLTLLKALVRQQLPEKYKEIFFDQSKNGYAGYIDGGASQEEFYKFIKPILEKMDGTEELLVKLNREDLLRKQRTFDNGSIPHQIHLGELHAILRRQEDFYPFLKDNREKIEKILTFRIPYYVGPLARGNSRFAWMTRKSEETITPWNFEEVVDKGASAQSFIERMTNFDKNLPNEKVLPKHSLLYEYFTVYNELTKVKYVTEGMRKPAFLSGEQKKAIVDLLFKTNRKVTVKQLKEDYFKKIECFDSVEISGVEDRFNASLGTYHDLLKIIKDKDFLDNEENEDILEDIVLTLTLFEDREMIEERLKTYAHLFDDKVMKQLKRRRYTGWGRLSRKLINGIRDKQSGKTILDFLKSDGFANRNFMQLIHDDSLTFKEDIQKAQVSGQGDSLHEHIANLAGSPAIKKGILQTVKVVDELVKVMGRHKPENIVIEMARENQTTQKGQKNSRERMKRIEEGIKELGSQILKEHPVENTQLQNEKLYLYYLQNGRDMYVDQELDINRLSDYDVDHIVPQSFLKDDSIDNKVLTRSDKARGKSDNVPSEEVVKKMKNYWRQLLNAKLITQRKFDNLTKAERGGLSELDKAGFIKRQLVETRQITKHVAQILDSRMNTKYDENDKLIREVKVITLKSKLVSDFRKDFQFYKVREINNYHHAHDAYLNAVVGTALIKKYPKLESEFVYGDYKVYDVRKMIAKSEQEIGKATAKYFFYSNIMNFFKTEITLANGEIRKRPLIETNGETGEIVWDKGRDFATVRKVLSMPQVNIVKKTEVQTGGFSKESILPKRNSDKLIARKKDWDPKKYGGFDSPTVAYSVLVVAKVEKGKSKKLKSVKELLGITIMERSSFEKNPIDFLEAKGYKEVKKDLIIKLPKYSLFELENGRKRMLASAGELQKGNELALPSKYVNFLYLASHYEKLKGSPEDNEQKQLFVEQHKHYLDEIIEQISEFSKRVILADANLDKVLSAYNKHRDKPIREQAENIIHLFTLTNLGAPAAFKYFDTTIDRKRYTSTKEVLDATLIHQSITGLYETRIDLSQLGGDGGPAPAPAPGGTLNLEDEYRLYETSAEPEVSPGSTWLSDFPQAWAETGGMGLAVRQAPLIIPLKATSTPVSIKQYPMSQEAKLGIKPHIQRLLDQGILVPCQSPWNTPLLPVKKPGTNDYRPVQDLREVNKRVEDIHPTVPNPYNLLSGLPPSHRWYTVLDLKDAFFCLRLHPTSQPLFAFEWRDPGMGISGQLTWTRLPQGFKNSPTLFNEALHRDLADFRIQHPDLILLQYVDDILLAATSELDCQQGTRALLLTLGNLGYRASAKKAQLCQKQVKYLGYLLKEGQRWLTEARKETVMGQPTPKTPRQLREFLGTAGFCRLWIPGFAEMAAPLYPLTKPGTLFNWGPDQQKAYQEIKQALLTAPALGLPDLTKPFELFVDEKQGYAKGVLTQKLGPWRRPVAYLSKKLDPVAAGWPPCLRMVAAIAVLRKDAGKLTMGQPLVILAPHAVEALVKQPPDRWLSNARMTHYQAMLLDTDRVQFGPVVALNPATLLPLPEEGAPHDCLEILAETHGTRPDLTDQPIPDADHTWYTDGSSFLQEGQRKAGAAVTTETEVIWARALPAGTSAQRAELIALTQALKMAEGKRLNVYTDSRYAFATAHIHGEIYRRRGWLTSEGREIKNKSEILALLKALFLPKRLSIIHCLGHQKGDSAEARGNRLADQAAREAAIKTPPDTSTLLAGKRTADGSEFEKRTADGSEFESPKKKAKVE

SEQ ID NO: 6501 - protein, 2092 aa, synthetic construct
MPAAKRVKLDGGDKKYSIGLDIGTNSVGWAVITDEYKVPSKKFKVLGNTDRHSIKKNLIGALLFDSGETAEATRLKRTARRRYTRRKNRICYLQEIFSNEMAKVDDSFFHRLEESFLVEEDKKHERHPIFGNIVDEVAYHEKYPTIYHLRKKLVDSTDKADLRLIYLALAHMIKFRGHFLIEGDLNPDNSDVDKLFIQLVQTYNQLFEENPINASGVDAKAILSARLSKSRRLENLIAQLPGEKKNGLFGNLIALSLGLTPNFKSNFDLAEDAKLQLSKDTYDDDLDNLLAQIGDQYADLFLAAKNLSDAILLSDILRVNTEITKAPLSASMIKRYDEHHQDLTLLKALVRQQLPEKYKEIFFDQSKNGYAGYIDGGASQEEFYKFIKPILEKMDGTEELLVKLNREDLLRKQRTFDNGSIPHQIHLGELHAILRRQEDFYPFLKDNREKIEKILTFRIPYYVGPLARGNSRFAWMTRKSEETITPWNFEEVVDKGASAQSFIERMTNFDKNLPNEKVLPKHSLLYEYFTVYNELTKVKYVTEGMRKPAFLSGEQKKAIVDLLFKTNRKVTVKQLKEDYFKKIECFDSVEISGVEDRFNASLGTYHDLLKIIKDKDFLDNEENEDILEDIVLTLTLFEDREMIEERLKTYAHLFDDKVMKQLKRRRYTGWGRLSRKLINGIRDKQSGKTILDFLKSDGFANRNFMQLIHDDSLTFKEDIQKAQVSGQGDSLHEHIANLAGSPAIKKGILQTVKVVDELVKVMGRHKPENIVIEMARENQTTQKGQKNSRERMKRIEEGIKELGSQILKEHPVENTQLQNEKLYLYYLQNGRDMYVDQELDINRLSDYDVDHIVPQSFLKDDSIDNKVLTRSDKARGKSDNVPSEEVVKKMKNYWRQLLNAKLITQRKFDNLTKAERGGLSELDKAGFIKRQLVETRQITKHVAQILDSRMNTKYDENDKLIREVKVITLKSKLVSDFRKDFQFYKVREINNYHHAHDAYLNAVVGTALIKKYPKLESEFVYGDYKVYDVRKMIAKSEQEIGKATAKYFFYSNIMNFFKTEITLANGEIRKRPLIETNGETGEIVWDKGRDFATVRKVLSMPQVNIVKKTEVQTGGFSKESILPKRNSDKLIARKKDWDPKKYGGFDSPTVAYSVLVVAKVEKGKSKKLKSVKELLGITIMERSSFEKNPIDFLEAKGYKEVKKDLIIKLPKYSLFELENGRKRMLASAGELQKGNELALPSKYVNFLYLASHYEKLKGSPEDNEQKQLFVEQHKHYLDEIIEQISEFSKRVILADANLDKVLSAYNKHRDKPIREQAENIIHLFTLTNLGAPAAFKYFDTTIDRKRYTSTKEVLDATLIHQSITGLYETRIDLSQLGGDGGPAPAPAPGGTLGIEDEYRLHETSTEPDVSLGSTWLSDFPQAWAETGGMGLAVRQAPLIIPLKATSTPVSIQQYPMSHEARLGIKPHIQRLLDQGILVPCQSPWNTPLLPVKKPGTNDYRPVQDLREVNKRVEDIHPTVPNPYNLLSGLPPSHQWYTVLDLKDAFFCLRLHPTSQPLFAFEWRDPGMGISGQLTWTRLPQGFKNSPTLFNEALHRDLADFRIQHPDLILLQYVDDILLAATSELDCQQGTRALLQTLGDLGYRASAKKAQICQKQVKYLGYLLREGQRWLTEARKETVMGQPVPKTPRQLREFLGTAGFCRLWIPGFAEMAAPLYPLTKPGTLFSWGPDQQKAYQEIKQALLTAPALGLPDLTKPFELFVDEKQGYAKGVLTQKLGPWRRPVAYLSKKLDPVAAGWPPCLRMVAAIAVLTKDAGKLTMGQPLVILAPHAVEALVKQPPDRWLSNARMTHYQAMLLDTDRVQFGPVVALNPATLLPLPEEGAPHDCLEILAETHGTRPDLTDQPIPDADHTWYTDGSSFLQEGQRKAGAAVTTETEVIWAGALPAGTSAQRAELIALTQALKMAEGKRLNVYTDSRYAFATAHIHGEIYRRRGWLTSEGREIKNKSEILALLKALFLPKRLSIIHCLGHQKGDSAEARGNRLADQAAREAAIKTPPDTSTLLAGKRTADGSEFEKRTADGSEFESPKKKAKVE

SEQ ID NO: 6502 - protein, 2092 aa, synthetic construct
MPAAKRVKLDGGDKKYSIGLDIGTNSVGWAVITDEYKVPSKKFKVLGNTDRHSIKKNLIGALLFDSGETAEATRLKRTARRRYTRRKNRICYLQEIFSNEMAKVDDSFFHRLEESFLVEEDKKHERHPIFGNIVDEVAYHEKYPTIYHLRKKLVDSTDKADLRLIYLALAHMIKFRGHFLIEGDLNPDNSDVDKLFIQLVQTYNQLFEENPINASGVDAKAILSARLSKSRRLENLIAQLPGEKKNGLFGNLIALSLGLTPNFKSNFDLAEDAKLQLSKDTYDDDLDNLLAQIGDQYADLFLAAKNLSDAILLSDILRVNTEITKAPLSASMIKRYDEHHQDLTLLKALVRQQLPEKYKEIFFDQSKNGYAGYIDGGASQEEFYKFIKPILEKMDGTEELLVKLNREDLLRKQRTFDNGSIPHQIHLGELHAILRRQEDFYPFLKDNREKIEKILTFRIPYYVGPLARGNSRFAWMTRKSEETITPWNFEEVVDKGASAQSFIERMTNFDKNLPNEKVLPKHSLLYEYFTVYNELTKVKYVTEGMRKPAFLSGEQKKAIVDLLFKTNRKVTVKQLKEDYFKKIECFDSVEISGVEDRFNASLGTYHDLLKIIKDKDFLDNEENEDILEDIVLTLTLFEDREMIEERLKTYAHLFDDKVMKQLKRRRYTGWGRLSRKLINGIRDKQSGKTILDFLKSDGFANRNFMQLIHDDSLTFKEDIQKAQVSGQGDSLHEHIANLAGSPAIKKGILQTVKVVDELVKVMGRHKPENIVIEMARENQTTQKGQKNSRERMKRIEEGIKELGSQILKEHPVENTQLQNEKLYLYYLQNGRDMYVDQELDINRLSDYDVDHIVPQSFLKDDSIDNKVLTRSDKARGKSDNVPSEEVVKKMKNYWRQLLNAKLITQRKFDNLTKAERGGLSELDKAGFIKRQLVETRQITKHVAQILDSRMNTKYDENDKLIREVKVITLKSKLVSDFRKDFQFYKVREINNYHHAHDAYLNAVVGTALIKKYPKLESEFVYGDYKVYDVRKMIAKSEQEIGKATAKYFFYSNIMNFFKTEITLANGEIRKRPLIETNGETGEIVWDKGRDFATVRKVLSMPQVNIVKKTEVQTGGFSKESILPKRNSDKLIARKKDWDPKKYGGFDSPTVAYSVLVVAKVEKGKSKKLKSVKELLGITIMERSSFEKNPIDFLEAKGYKEVKKDLIIKLPKYSLFELENGRKRMLASAGELQKGNELALPSKYVNFLYLASHYEKLKGSPEDNEQKQLFVEQHKHYLDEIIEQISEFSKRVILADANLDKVLSAYNKHRDKPIREQAENIIHLFTLTNLGAPAAFKYFDTTIDRKRYTSTKEVLDATLIHQSITGLYETRIDLSQLGGDGGPAPAPAPGGTLNIEDEYRLHETSKGPDVPLGSTWLSDFPQAWAETGGMGLAVRQAPLIIPLKATSTPVSIKQYPMSQEARLGIKPHIQRLLDQGILVPCQSPWNTPLLPVKKPGTNDYRPVQDLREVNKRVEDIHPTVPNPYNLLSGLPPSHQWYTVLDLKDAFFCLRLHPTSQSLFAFEWRDPEMGISGQLTWTRLPQGFKNSPTLFNEALHRDLADFRIQHPDLILLQYVDDLLLAATSELDCQQGTRALLQTLGDLGYRASAKKAQICQKQVKYLGYLLKEGQRWLTEARKETVMGQPTPKTPRQLREFLGTAGFCRLWIPGFAEMAAPLYPLTKPGTLFEWGPDQQKAYQEIKQALLTAPALGLPDLTKPFELFVDEKQGYAKGVLTQKLGPWRRPVAYLSKKLDPVAAGWPPCLRMVAAIAVLTKDAGKLTMGQPLVILAPHAVEALVKQPPDRWLSNARMTHYQALLLDTDRVQFGPIVALNPATLLPLPEEGLQHDCLDILAEAHGTRPDLTDQPLPDADHTWYTDGSSFLQEGQRKAGAAVTTETEVVWAKALPAGTSAQRAELIALTQALKMAEGKKLNVYTDSRYAFATAHIHGEIYRRRGWLTSEGKEIKNKDEILALLKALFLPKRLSIIHCPGHQKGNRAEARGNRMADQAAREVATRETPETSTLLAGKRTADGSEFEKRTADGSEFESPKKKAKVE

SEQ ID NO: 6503 - protein, 2092 aa, synthetic construct
MPAAKRVKLDGGDKKYSIGLDIGTNSVGWAVITDEYKVPSKKFKVLGNTDRHSIKKNLIGALLFDSGETAEATRLKRTARRRYTRRKNRICYLQEIFSNEMAKVDDSFFHRLEESFLVEEDKKHERHPIFGNIVDEVAYHEKYPTIYHLRKKLVDSTDKADLRLIYLALAHMIKFRGHFLIEGDLNPDNSDVDKLFIQLVQTYNQLFEENPINASGVDAKAILSARLSKSRRLENLIAQLPGEKKNGLFGNLIALSLGLTPNFKSNFDLAEDAKLQLSKDTYDDDLDNLLAQIGDQYADLFLAAKNLSDAILLSDILRVNTEITKAPLSASMIKRYDEHHQDLTLLKALVRQQLPEKYKEIFFDQSKNGYAGYIDGGASQEEFYKFIKPILEKMDGTEELLVKLNREDLLRKQRTFDNGSIPHQIHLGELHAILRRQEDFYPFLKDNREKIEKILTFRIPYYVGPLARGNSRFAWMTRKSEETITPWNFEEVVDKGASAQSFIERMTNFDKNLPNEKVLPKHSLLYEYFTVYNELTKVKYVTEGMRKPAFLSGEQKKAIVDLLFKTNRKVTVKQLKEDYFKKIECFDSVEISGVEDRFNASLGTYHDLLKIIKDKDFLDNEENEDILEDIVLTLTLFEDREMIEERLKTYAHLFDDKVMKQLKRRRYTGWGRLSRKLINGIRDKQSGKTILDFLKSDGFANRNFMQLIHDDSLTFKEDIQKAQVSGQGDSLHEHIANLAGSPAIKKGILQTVKVVDELVKVMGRHKPENIVIEMARENQTTQKGQKNSRERMKRIEEGIKELGSQILKEHPVENTQLQNEKLYLYYLQNGRDMYVDQELDINRLSDYDVDHIVPQSFLKDDSIDNKVLTRSDKARGKSDNVPSEEVVKKMKNYWRQLLNAKLITQRKFDNLTKAERGGLSELDKAGFIKRQLVETRQITKHVAQILDSRMNTKYDENDKLIREVKVITLKSKLVSDFRKDFQFYKVREINNYHHAHDAYLNAVVGTALIKKYPKLESEFVYGDYKVYDVRKMIAKSEQEIGKATAKYFFYSNIMNFFKTEITLANGEIRKRPLIETNGETGEIVWDKGRDFATVRKVLSMPQVNIVKKTEVQTGGFSKESILPKRNSDKLIARKKDWDPKKYGGFDSPTVAYSVLVVAKVEKGKSKKLKSVKELLGITIMERSSFEKNPIDFLEAKGYKEVKKDLIIKLPKYSLFELENGRKRMLASAGELQKGNELALPSKYVNFLYLASHYEKLKGSPEDNEQKQLFVEQHKHYLDEIIEQISEFSKRVILADANLDKVLSAYNKHRDKPIREQAENIIHLFTLTNLGAPAAFKYFDTTIDRKRYTSTKEVLDATLIHQSITGLYETRIDLSQLGGDGGPAPAPAPGGTLNIEDEYRLHETSKGPDVPLGSTWLSDFPQAWAETGGMGLAVRQAPLIIPLKATSTPVSIKQYPMSQEARLGIKPHIQRLLDQGILVPCQSPWNTPLLPVKKPGTNDYRPVQDLREVNKRVEDIHPTVPNPYNLLSGLPPSHQWYTVLDLKDAFFCLRLHPTSQSLFAFEWRDPEMGISGQLTWTRLPQGFKNSPTLFNEALHRDLADFRIQHPDLILLQYVDDLLLAATSELDCQQGTRALLQTLGDLGYRASAKKAQICQKQVKYLGYLLKEGQRWLTEARKETVMGQPTPKTPRQLREFLGKAGFCRLFIPGFAEMAAPLYPLTKPGTLFEWGPDQQKAYQEIKQALLTAPALGLPDLTKPFELFVDEKQGYAKGVLTQKLGPWRRPVAYLSKKLDPVAAGWPPCLRMVAAIAVLTKDAGKLTMGQPLVILAPHAVEALVKQPPDRWLSNARMTHYQALLLDTDRVQFGPIVALNPATLLPLPEEGLQHDCLDILAEAHGTRPDLTDQPLPDADHTWYTDGSSFLQEGQRKAGAAVTTETEVVWAKALPAGTSAQRAELIALTQALKMAEGKKLNVYTDSRYAFATAHIHGEIYRRRGWLTSEGKEIKNKDEILALLKALFLPKRLSIIHCPGHQKGNRAEARGNRMADQAAREVATRETPETSTLLAGKRTADGSEFEKRTADGSEFESPKKKAKVE

SEQ ID NO: 6504 - protein, 2112 aa, synthetic construct; identical to SEQ ID NO: 4508

SEQ ID NO: 6505 - protein, 2112 aa, synthetic construct; identical to SEQ ID NO: 4508

SEQ ID NO: 6506 - protein, 2092 aa, synthetic construct
MPAAKRVKLDGGDKKYSIGLDIGTNSVGWAVITDEYKVPSKKFKVLGNTDRHSIKKNLIGALLFDSGETAEATRLKRTARRRYTRRKNRICYLQEIFSNEMAKVDDSFFHRLEESFLVEEDKKHERHPIFGNIVDEVAYHEKYPTIYHLRKKLVDSTDKADLRLIYLALAHMIKFRGHFLIEGDLNPDNSDVDKLFIQLVQTYNQLFEENPINASGVDAKAILSARLSKSRRLENLIAQLPGEKKNGLFGNLIALSLGLTPNFKSNFDLAEDAKLQLSKDTYDDDLDNLLAQIGDQYADLFLAAKNLSDAILLSDILRVNTEITKAPLSASMIKRYDEHHQDLTLLKALVRQQLPEKYKEIFFDQSKNGYAGYIDGGASQEEFYKFIKPILEKMDGTEELLVKLNREDLLRKQRTFDNGSIPHQIHLGELHAILRRQEDFYPFLKDNREKIEKILTFRIPYYVGPLARGNSRFAWMTRKSEETITPWNFEEVVDKGASAQSFIERMTNFDKNLPNEKVLPKHSLLYEYFTVYNELTKVKYVTEGMRKPAFLSGEQKKAIVDLLFKTNRKVTVKQLKEDYFKKIECFDSVEISGVEDRFNASLGTYHDLLKIIKDKDFLDNEENEDILEDIVLTLTLFEDREMIEERLKTYAHLFDDKVMKQLKRRRYTGWGRLSRKLINGIRDKQSGKTILDFLKSDGFANRNFMQLIHDDSLTFKEDIQKAQVSGQGDSLHEHIANLAGSPAIKKGILQTVKVVDELVKVMGRHKPENIVIEMARENQTTQKGQKNSRERMKRIEEGIKELGSQILKEHPVENTQLQNEKLYLYYLQNGRDMYVDQELDINRLSDYDVDHIVPQSFLKDDSIDNKVLTRSDKARGKSDNVPSEEVVKKMKNYWRQLLNAKLITQRKFDNLTKAERGGLSELDKAGFIKRQLVETRQITKHVAQILDSRMNTKYDENDKLIREVKVITLKSKLVSDFRKDFQFYKVREINNYHHAHDAYLNAVVGTALIKKYPKLESEFVYGDYKVYDVRKMIAKSEQEIGKATAKYFFYSNIMNFFKTEITLANGEIRKRPLIETNGETGEIVWDKGRDFATVRKVLSMPQVNIVKKTEVQTGGFSKESILPKRNSDKLIARKKDWDPKKYGGFDSPTVAYSVLVVAKVEKGKSKKLKSVKELLGITIMERSSFEKNPIDFLEAKGYKEVKKDLIIKLPKYSLFELENGRKRMLASAGELQKGNELALPSKYVNFLYLASHYEKLKGSPEDNEQKQLFVEQHKHYLDEIIEQISEFSKRVILADANLDKVLSAYNKHRDKPIREQAENIIHLFTLTNLGAPAAFKYFDTTIDRKRYTSTKEVLDATLIHQSITGLYETRIDLSQLGGDGGPAPAPAPGGTLNIEDEYRLHEISTEPDVSPGSTWLSDFPQAWAETGGMGLAVRQAPLIIPLKATSTPVSIKQYPMSQEAKLGIKPHIQRLLDQGILVPCQSPWNTPLLPVKKPGTNDYRPVQGLREVNKRVEDIHPTVPNPYNLLSGLPTSHRWYTVLDLKDAFFCLRLHPTSQPLFASEWRDPGMGISGQLTWTRLPQGFKNSPTLFNEALHRGLADFRIQHPDLILLQYVDDLLLAATSELDCQQGTRALLKTLGNLGYRASAKKAQICQKQVKYLGYLLREGQRWLTEARKETVMGQPTPKTPRQLREFLGTAGFCRLWIPRFAEMAAPLYPLTKPGTLFNWGPDQQKAYHEIKQALLTAPALGLPDLTKPFELFVDEKQGYAKGVLTQKLGPWRRPVAYLSKKLDPVAAGWPPCLRMVAAIAVLTKDAGKLTMGQPLVILAPHAVEALVKQPPDRWLSNARMTHYQAMLLDTDRVQFGPVVALNPATLLPLPEEGAPHDCLEILAETHGTEPDLTDQPIPDADHTWYTDGSSFLQEGQRKAGAAVTTETEVIWARALPAGTSAQRAELIALTQALKMAEGKRLNVYTDSRYAFATAHIHGEIYKRRGWLTSEGREIKNKSEILALLKALFLPKRLSIIHCLGHQKGDSAEARGNRLADQAAREAAIKTPPDTSTLLAGKRTADGSEFEKRTADGSEFESPKKKAKVE

SEQ ID NO: 6507 - protein, 2006 aa, synthetic construct
MPAAKRVKLDGGDKKYSIGLDIGTNSVGWAVITDEYKVPSKKFKVLGNTDRHSIKKNLIGALLFDSGETAEATRLKRTARRRYTRRKNRICYLQEIFSNEMAKVDDSFFHRLEESFLVEEDKKHERHPIFGNIVDEVAYHEKYPTIYHLRKKLVDSTDKADLRLIYLALAHMIKFRGHFLIEGDLNPDNSDVDKLFIQLVQTYNQLFEENPINASGVDAKAILSARLSKSRRLENLIAQLPGEKKNGLFGNLIALSLGLTPNFKSNFDLAEDAKLQLSKDTYDDDLDNLLAQIGDQYADLFLAAKNLSDAILLSDILRVNTEITKAPLSASMIKRYDEHHQDLTLLKALVRQQLPEKYKEIFFDQSKNGYAGYIDGGASQEEFYKFIKPILEKMDGTEELLVKLNREDLLRKQRTFDNGSIPHQIHLGELHAILRRQEDFYPFLKDNREKIEKILTFRIPYYVGPLARGNSRFAWMTRKSEETITPWNFEEVVDKGASAQSFIERMTNFDKNLPNEKVLPKHSLLYEYFTVYNELTKVKYVTEGMRKPAFLSGEQKKAIVDLLFKTNRKVTVKQLKEDYFKKIECFDSVEISGVEDRFNASLGTYHDLLKIIKDKDFLDNEENEDILEDIVLTLTLFEDREMIEERLKTYAHLFDDKVMKQLKRRRYTGWGRLSRKLINGIRDKQSGKTILDFLKSDGFANRNFMQLIHDDSLTFKEDIQKAQVSGQGDSLHEHIANLAGSPAIKKGILQTVKVVDELVKVMGRHKPENIVIEMARENQTTQKGQKNSRERMKRIEEGIKELGSQILKEHPVENTQLQNEKLYLYYLQNGRDMYVDQELDINRLSDYDVDHIVPQSFLKDDSIDNKVLTRSDKARGKSDNVPSEEVVKKMKNYWRQLLNAKLITQRKFDNLTKAERGGLSELDKAGFIKRQLVETRQITKHVAQILDSRMNTKYDENDKLIREVKVITLKSKLVSDFRKDFQFYKVREINNYHHAHDAYLNAVVGTALIKKYPKLESEFVYGDYKVYDVRKMIAKSEQEIGKATAKYFFYSNIMNFFKTEITLANGEIRKRPLIETNGETGEIVWDKGRDFATVRKVLSMPQVNIVKKTEVQTGGFSKESILPKRNSDKLIARKKDWDPKKYGGFDSPTVAYSVLVVAKVEKGKSKKLKSVKELLGITIMERSSFEKNPIDFLEAKGYKEVKKDLIIKLPKYSLFELENGRKRMLASAGELQKGNELALPSKYVNFLYLASHYEKLKGSPEDNEQKQLFVEQHKHYLDEIIEQISEFSKRVILADANLDKVLSAYNKHRDKPIREQAENIIHLFTLTNLGAPAAFKYFDTTIDRKRYTSTKEVLDATLIHQSITGLYETRIDLSQLGGDGGPAPAPAPGGLTAAIDILAPQQCAEPITWKSDEPVWVDQWPLTNDKLAAAQQLVQEQLEAGHITESSSPWNTPIFVIKKKSGKWRLLQDLRAVNATMVLMGALQPGLPSPVAIPQGYLKIIIDLKDCFFSIPLHPSDQKRFAFSLPSTNFKEPMQRFQWKVLPQGMANSPTLCQKYVATAIHKVRHAWKQMYIIHYMDDILIAGKDGQQVLQCFDQLKQELTAAGLHIAPEKVQLQDPYTYLGFELNGPKITNQKAVIRKDKLQTLNDFQKLLGDINWLRPYLKLTTGDLKPLFDTLKGDSDPNSHRSLSKEALASLEKVETAIAEQFVTHINYSLPLIFLIFNTALTPTGLFWQDNPIMWIHLPASPKKVLLPYYDAIADLIILGRDHSKKYFGIEPSTIIQPYSKSQIDWLMQNTEMWPIACASFVGILDNHYPPNKLIQFCKLHTFVFPQIISKTPLNNALLVFTDGSSTGMAAYTLTDTTIKFQTNLNSAQLVELQALIAVLSAFPNQPLNIYTDSAYLAHSIPLLETVAQIKHISETAKLFLQCQQLIYNRSIPFYIGHVRAHSGLPGPIAQGNQRADLATKIVASNINTAGKRTADGSEFEKRTADGSEFESPKKKAKVE

SEQ ID NO: 6508 - protein, 2086 aa, synthetic construct
MPAAKRVKLDGGDKKYSIGLDIGTNSVGWAVITDEYKVPSKKFKVLGNTDRHSIKKNLIGALLFDSGETAEATRLKRTARRRYTRRKNRICYLQEIFSNEMAKVDDSFFHRLEESFLVEEDKKHERHPIFGNIVDEVAYHEKYPTIYHLRKKLVDSTDKADLRLIYLALAHMIKFRGHFLIEGDLNPDNSDVDKLFIQLVQTYNQLFEENPINASGVDAKAILSARLSKSRRLENLIAQLPGEKKNGLFGNLIALSLGLTPNFKSNFDLAEDAKLQLSKDTYDDDLDNLLAQIGDQYADLFLAAKNLSDAILLSDILRVNTEITKAPLSASMIKRYDEHHQDLTLLKALVRQQLPEKYKEIFFDQSKNGYAGYIDGGASQEEFYKFIKPILEKMDGTEELLVKLNREDLLRKQRTFDNGSIPHQIHLGELHAILRRQEDFYPFLKDNREKIEKILTFRIPYYVGPLARGNSRFAWMTRKSEETITPWNFEEVVDKGASAQSFIERMTNFDKNLPNEKVLPKHSLLYEYFTVYNELTKVKYVTEGMRKPAFLSGEQKKAIVDLLFKTNRKVTVKQLKEDYFKKIECFDSVEISGVEDRFNASLGTYHDLLKIIKDKDFLDNEENEDILEDIVLTLTLFEDREMIEERLKTYAHLFDDKVMKQLKRRRYTGWGRLSRKLINGIRDKQSGKTILDFLKSDGFANRNFMQLIHDDSLTFKEDIQKAQVSGQGDSLHEHIANLAGSPAIKKGILQTVKVVDELVKVMGRHKPENIVIEMARENQTTQKGQKNSRERMKRIEEGIKELGSQILKEHPVENTQLQNEKLYLYYLQNGRDMYVDQELDINRLSDYDVDHIVPQSFLKDDSIDNKVLTRSDKARGKSDNVPSEEVVKKMKNYWRQLLNAKLITQRKFDNLTKAERGGLSELDKAGFIKRQLVETRQITKHVAQILDSRMNTKYDENDKLIREVKVITLKSKLVSDFRKDFQFYKVREINNYHHAHDAYLNAVVGTALIKKYPKLESEFVYGDYKVYDVRKMIAKSEQEIGKATAKYFFYSNIMNFFKTEITLANGEIRKRPLIETNGETGEIVWDKGRDFATVRKVLSMPQVNIVKKTEVQTGGFSKESILPKRNSDKLIARKKDWDPKKYGGFDSPTVAYSVLVVAKVEKGKSKKLKSVKELLGITIMERSSFEKNPIDFLEAKGYKEVKKDLIIKLPKYSLFELENGRKRMLASAGELQKGNELALPSKYVNFLYLASHYEKLKGSPEDNEQKQLFVEQHKHYLDEIIEQISEFSKRVILADANLDKVLSAYNKHRDKPIREQAENIIHLFTLTNLGAPAAFKYFDTTIDRKRYTSTKEVLDATLIHQSITGLYETRIDLSQLGGDGGPAPAPAPGGTLQLDDEYRLYSPLVKPDQNIQFWLEQFPQAWAETAGMGLAKQVPPQVIQLKASATPVSVRQYPLSKEAQEGIRPHVQRLIQQGILVPVQSPWNTPLLPVRKPGTNDYRPVQDLREVNKRVQDIHPTVPNPYNLLCALPPQRSWYTVLDLKDAFFCLRLHPTSQPLFAFEWRDPGTGRTGQLTWTRLPQGFKNSPTIFNEALHRDLANFRIQHPQVTLLQYVDDLLLAGATKQDCLEGTKALLLELSDLGYRASAKKAQICRREVTYLGYSLRDGQRWLTEARKKTVVQIPAPTTAKQVREFLGTAGFCRLWIPGFATLAAPLYPLTKPKGEFSWAPEHQKAFDAIKKALLSAPALALPDVTKPFTLYVDERKGVARGVLTQTLGPWRRPVAYLSKKLDPVASGWPVCLKAIAAVAILVKDADKLTLGQNITVIAPHALENIVRQPPDRWMTNARMTHYQSLLLTERVTFAPPAALNPATLLPEETDEPVTHDCHQLLIEETGVRKDLTDIPLTGEVLTWFTDGSSYVVEGKRMAGAAVVDGTRTIWASSLPEGTSAQKAELMALTQALRLAEGKSINIYTDSRYAFATAHVHGAIYKQRGWLTSAGREIKNKEEILSLLEALHLPKRLAIIHCPGHQKAKDPISRGNQMADRVAKQAAQGVNLLAGKRTADGSEFEKRTADGSEFESPKKKAKVE

SEQ ID NO: 6509 - protein, 2086 aa, synthetic construct; identical to SEQ ID NO: 6508

SEQ ID NO: 6510 - protein, 2083 aa, synthetic construct
MPAAKRVKLDGGDKKYSIGLDIGTNSVGWAVITDEYKVPSKKFKVLGNTDRHSIKKNLIGALLFDSGETAEATRLKRTARRRYTRRKNRICYLQEIFSNEMAKVDDSFFHRLEESFLVEEDKKHERHPIFGNIVDEVAYHEKYPTIYHLRKKLVDSTDKADLRLIYLALAHMIKFRGHFLIEGDLNPDNSDVDKLFIQLVQTYNQLFEENPINASGVDAKAILSARLSKSRRLENLIAQLPGEKKNGLFGNLIALSLGLTPNFKSNFDLAEDAKLQLSKDTYDDDLDNLLAQIGDQYADLFLAAKNLSDAILLSDILRVNTEITKAPLSASMIKRYDEHHQDLTLLKALVRQQLPEKYKEIFFDQSKNGYAGYIDGGASQEEFYKFIKPILEKMDGTEELLVKLNREDLLRKQRTFDNGSIPHQIHLGELHAILRRQEDFYPFLKDNREKIEKILTFRIPYYVGPLARGNSRFAWMTRKSEETITPWNFEEVVDKGASAQSFIERMTNFDKNLPNEKVLPKHSLLYEYFTVYNELTKVKYVTEGMRKPAFLSGEQKKAIVDLLFKTNRKVTVKQLKEDYFKKIECFDSVEISGVEDRFNASLGTYHDLLKIIKDKDFLDNEENEDILEDIVLTLTLFEDREMIEERLKTYAHLFDDKVMKQLKRRRYTGWGRLSRKLINGIRDKQSGKTILDFLKSDGFANRNFMQLIHDDSLTFKEDIQKAQVSGQGDSLHEHIANLAGSPAIKKGILQTVKVVDELVKVMGRHKPENIVIEMARENQTTQKGQKNSRERMKRIEEGIKELGSQILKEHPVENTQLQNEKLYLYYLQNGRDMYVDQELDINRLSDYDVDHIVPQSFLKDDSIDNKVLTRSDKARGKSDNVPSEEVVKKMKNYWRQLLNAKLITQRKFDNLTKAERGGLSELDKAGFIKRQLVETRQITKHVAQILDSRMNTKYDENDKLIREVKVITLKSKLVSDFRKDFQFYKVREINNYHHAHDAYLNAVVGTALIKKYPKLESEFVYGDYKVYDVRKMIAKSEQEIGKATAKYFFYSNIMNFFKTEITLANGEIRKRPLIETNGETGEIVWDKGRDFATVRKVLSMPQVNIVKKTEVQTGGFSKESILPKRNSDKLIARKKDWDPKKYGGFDSPTVAYSVLVVAKVEKGKSKKLKSVKELLGITIMERSSFEKNPIDFLEAKGYKEVKKDLIIKLPKYSLFELENGRKRMLASAGELQKGNELALPSKYVNFLYLASHYEKLKGSPEDNEQKQLFVEQHKHYLDEIIEQISEFSKRVILADANLDKVLSAYNKHRDKPIREQAENIIHLFTLTNLGAPAAFKYFDTTIDRKRYTSTKEVLDATLIHQSITGLYETRIDLSQLGGDGGPAPAPAPGGVPWLMKKPLQLTVLVPLHEYQERLLQQTALPKEQKELLQKLFLKYDALWQHWENQVGHRRIKPHNIATGTLAPRPQKQYPINPKAKPSIQIVIDDLLKQGVLIQQNSTMNTPVYPVPKPDGKWRMVLDYREVNKTIPLIAAQNQHSAGILSSIYRGKYKTTLDLTNGFWAHPITPESYWLTAFTWQGKQYCWTRLPQGFLNSPALFNADVVDLLKEIPNVQAYVDDIYISHDDPQEHLEQLEKIFSILLNAGYVVSLKKSEIAQREVEFLGFNITKEGRGLTDTFKQKLLNITPPKDLKQLQSILGLLNFARNFIPNYSELVKPLYTIVAPANGKFISWTEDNSNQLQHIISVLNQADNLEERNPETRLIIKVNSSPSAGYIRYYNEGSKRPIMYVNYIFSKAEAKFTQTEKLLTTMHKGLIKAMDLAMGQEILVYSPIVSMTKIQRTPLPERKALPVRWITWMTYLEDPRIQFHYDKSLPELQQIPNVTEDVIAKTKHPSEFAMVFYTDGSAIKHPDVNKSHSAGMGIAQVQFIPEYKIVHQWSIPLGDHTAQLAEIAAVEFACKKALKISGPVLIVTDSFYVAESANKELPYWKSNGFLNNKKKPLRHVSKWKSIAECLQLKPDIIIMHEKGHQQPMTTLHTEGNNLADKLATQGSYVVHAGKRTADGSEFEKRTADGSEFESPKKKAKVE

SEQ ID NO: 6511 - protein, 2172 aa, synthetic construct
MPAAKRVKLDGGDKKYSIGLDIGTNSVGWAVITDEYKVPSKKFKVLGNTDRHSIKKNLIGALLFDSGETAEATRLKRTARRRYTRRKNRICYLQEIFSNEMAKVDDSFFHRLEESFLVEEDKKHERHPIFGNIVDEVAYHEKYPTIYHLRKKLVDSTDKADLRLIYLALAHMIKFRGHFLIEGDLNPDNSDVDKLFIQLVQTYNQLFEENPINASGVDAKAILSARLSKSRRLENLIAQLPGEKKNGLFGNLIALSLGLTPNFKSNFDLAEDAKLQLSKDTYDDDLDNLLAQIGDQYADLFLAAKNLSDAILLSDILRVNTEITKAPLSASMIKRYDEHHQDLTLLKALVRQQLPEKYKEIFFDQSKNGYAGYIDGGASQEEFYKFIKPILEKMDGTEELLVKLNREDLLRKQRTFDNGSIPHQIHLGELHAILRRQEDFYPFLKDNREKIEKILTFRIPYYVGPLARGNSRFAWMTRKSEETITPWNFEEVVDKGASAQSFIERMTNFDKNLPNEKVLPKHSLLYEYFTVYNELTKVKYVTEGMRKPAFLSGEQKKAIVDLLFKTNRKVTVKQLKEDYFKKIECFDSVEISGVEDRFNASLGTYHDLLKIIKDKDFLDNEENEDILEDIVLTLTLFEDREMIEERLKTYAHLFDDKVMKQLKRRRYTGWGRLSRKLINGIRDKQSGKTILDFLKSDGFANRNFMQLIHDDSLTFKEDIQKAQVSGQGDSLHEHIANLAGSPAIKKGILQTVKVVDELVKVMGRHKPENIVIEMARENQTTQKGQKNSRERMKRIEEGIKELGSQILKEHPVENTQLQNEKLYLYYLQNGRDMYVDQELDINRLSDYDVDHIVPQSFLKDDSIDNKVLTRSDKARGKSDNVPSEEVVKKMKNYWRQLLNAKLITQRKFDNLTKAERGGLSELDKAGFIKRQLVETRQITKHVAQILDSRMNTKYDENDKLIREVKVITLKSKLVSDFRKDFQFYKVREINNYHHAHDAYLNAVVGTALIKKYPKLESEFVYGDYKVYDVRKMIAKSEQEIGKATAKYFFYSNIMNFFKTEITLANGEIRKRPLIETNGETGEIVWDKGRDFATVRKVLSMPQVNIVKKTEVQTGGFSKESILPKRNSDKLIARKKDWDPKKYGGFDSPTVAYSVLVVAKVEKGKSKKLKSVKELLGITIMERSSFEKNPIDFLEAKGYKEVKKDLIIKLPKYSLFELENGRKRMLASAGELQKGNELALPSKYVNFLYLASHYEKLKGSPEDNEQKQLFVEQHKHYLDEIIEQISEFSKRVILADANLDKVLSAYNKHRDKPIREQAENIIHLFTLTNLGAPAAFKYFDTTIDRKRYTSTKEVLDATLIHQSITGLYETRIDLSQLGGDGGPAPAPAPGGMDPLQLLQPLEAEIKGTKLKAHWNSGATITCVPQAFLEEEVPIKNIWIKTIHGEKEQPVYYLTFKIQGRKVEAEVISSPYDYILVSPSDIPWLMKKPLQLTTLVPLQEYEERLLKQTMLTGSYKEKLQSLFLKYDALWQHWENQVGHRRIKPHHIATGTVNPRPQKQYPINPKAKASIQTVINDLLKQGVLIQQNSIMNTPVYPVPKPDGKWRMVLDYREVNKTIPLIAAQNQHSAGILSSIFRGKYKTTLDLSNGFWAHSITPESYWLTAFTWLGQQYCWTRLPQGFLNSPALFNADVVDLLKEVPNVQVYVDDIYISHDDPREHLEQLEKVFSLLLNAGYVVSLKKSEIAQHEVEFLGFNITKEGRGLTETFKQKLLNITPPRDLKQLQSILGKLNFARNFIPNFSELVKPLYNIIATAPGKYITWTTDNSQQLQNIISMLNSAENLEERNPEVRLIMKVNTSPSAGYIRFYNEFAKRPIMYLNYVYTKAEVKFTNTEKLLTTIHKGLIKALDLGMGQEILVYSPIVSMTKIQKTPLPERKALPIRWITWMSYLEDPRIQFHYDKTLPELQQVPTVTDDIIAKIKHPSEFSMVFYTDGSAIKHPNVNKSHNAGMGIAQVQFKPEFTVINTWSIPLGDHTAQLAEVAAVEFACKKALKIDGPVLIVTDSFYVAESVNKELPYWQSNGFFNNKKKPLKHVSKWKSIADCIQLKPDIIIIHEKGHQPTASTFHTEGNNLADKLATQGSYVVNAGKRTADGSEFEKRTADGSEFESPKKKAKVE

SEQ ID NO: 6512 - protein, 2092 aa, synthetic construct
MPAAKRVKLDGGDKKYSIGLDIGTNSVGWAVITDEYKVPSKKFKVLGNTDRHSIKKNLIGALLFDSGETAEATRLKRTARRRYTRRKNRICYLQEIFSNEMAKVDDSFFHRLEESFLVEEDKKHERHPIFGNIVDEVAYHEKYPTIYHLRKKLVDSTDKADLRLIYLALAHMIKFRGHFLIEGDLNPDNSDVDKLFIQLVQTYNQLFEENPINASGVDAKAILSARLSKSRRLENLIAQLPGEKKNGLFGNLIALSLGLTPNFKSNFDLAEDAKLQLSKDTYDDDLDNLLAQIGDQYADLFLAAKNLSDAILLSDILRVNTEITKAPLSASMIKRYDEHHQDLTLLKALVRQQLPEKYKEIFFDQSKNGYAGYIDGGASQEEFYKFIKPILEKMDGTEELLVKLNREDLLRKQRTFDNGSIPHQIHLGELHAILRRQEDFYPFLKDNREKIEKILTFRIPYYVGPLARGNSRFAWMTRKSEETITPWNFEEVVDKGASAQSFIERMTNFDKNLPNEKVLPKHSLLYEYFTVYNELTKVKYVTEGMRKPAFLSGEQKKAIVDLLFKTNRKVTVKQLKEDYFKKIECFDSVEISGVEDRFNASLGTYHDLLKIIKDKDFLDNEENEDILEDIVLTLTLFEDREMIEERLKTYAHLFDDKVMKQLKRRRYTGWGRLSRKLINGIRDKQSGKTILDFLKSDGFANRNFMQLIHDDSLTFKEDIQKAQVSGQGDSLHEHIANLAGSPAIKKGILQTVKVVDELVKVMGRHKPENIVIEMARENQTTQKGQKNSRERMKRIEEGIKELGSQILKEHPVENTQLQNEKLYLYYLQNGRDMYVDQELDINRLSDYDVDHIVPQSFLKDDSIDNKVLTRSDKARGKSDNVPSEEVVKKMKNYWRQLLNAKLITQRKFDNLTKAERGGLSELDKAGFIKRQLVETRQITKHVAQILDSRMNTKYDENDKLIREVKVITLKSKLVSDFRKDFQFYKVREINNYHHAHDAYLNAVVGTALIKKYPKLESEFVYGDYKVYDVRKMIAKSEQEIGKATAKYFFYSNIMNFFKTEITLANGEIRKRPLIETNGETGEIVWDKGRDFATVRKVLSMPQVNIVKKTEVQTGGFSKESILPKRNSDKLIARKKDWDPKKYGGFDSPTVAYSVLVVAKVEKGKSKKLKSVKELLGITIMERSSFEKNPIDFLEAKGYKEVKKDLIIKLPKYSLFELENGRKRMLASAGELQKGNELALPSKYVNFLYLASHYEKLKGSPEDNEQKQLFVEQHKHYLDEIIEQISEFSKRVILADANLDKVLSAYNKHRDKPIREQAENIIHLFTLTNLGAPAAFKYFDTTIDRKRYTSTKEVLDATLIHQSITGLYETRIDLSQLGGDGGPAPAPAPGGTLNIEDEYRLHETSKEPDVPLGSTWLSDFPQAWAETGGMGLAVRQAPLIIPLKATSTPVSIKQYPMSQEARLGIKPHIQRLLDQGILVPCQSPWNTPLLPVKKPGTNDYRPVQDLREVNKRVEDIHPTVPNPYNLLSGLPPSHQWYTVLDLKDAFFCLRLHPTSQPLFAFEWRDPEMGISGQLTWTRLPQGFKNSPTLFNEALHRDLADFRIQHPDLILLQYVDDLLLAATSEQDCQRGTRALLQTLGNLGYRASAKKAQICQKQVKYLGYLLKEGQRWLTEARKETVMGQPTPKTPRQLREFLGKAGFCRLFIPGFAEMAAPLYPLTKPGTLFNWGPDQQKAYQEIKQALLTAPALGLPDLTKPFELFVDEKQGYAKGVLTQKLGPWRRPVAYLSKKLDPVAAGWPPCLRMVAAIAVLTKDAGKLTMGQPLVILAPHAVEALVKQPPDRWLSNARMTHYQAMLLDTDRVQFGPVVALNPATLLPLPEKEAPHDCLEILAETHGTRPDLTDQPIPDADYTWYTDGSSFLQEGQRRAGAAVTTETEVIWARALPAGTSAQRAELIALTQALKMAEGKKLNVYTDSRYAFATAHVHGEIYRRRGWLTSEGREIKNKNEILALLKALFLPKRLSIIHCPGHQKGNSAEARGNRMADQAAREAAMKAVLETSTLLAGKRTADGSEFEKRTADGSEFESPKKKAKVE

SEQ ID NO: 6513 - protein, 2096 aa, synthetic construct
MPAAKRVKLDGGDKKYSIGLDIGTNSVGWAVITDEYKVPSKKFKVLGNTDRHSIKKNLIGALLFDSGETAEATRLKRTARRRYTRRKNRICYLQEIFSNEMAKVDDSFFHRLEESFLVEEDKKHERHPIFGNIVDEVAYHEKYPTIYHLRKKLVDSTDKADLRLIYLALAHMIKFRGHFLIEGDLNPDNSDVDKLFIQLVQTYNQLFEENPINASGVDAKAILSARLSKSRRLENLIAQLPGEKKNGLFGNLIALSLGLTPNFKSNFDLAEDAKLQLSKDTYDDDLDNLLAQIGDQYADLFLAAKNLSDAILLSDILRVNTEITKAPLSASMIKRYDEHHQDLTLLKALVRQQLPEKYKEIFFDQSKNGYAGYIDGGASQEEFYKFIKPILEKMDGTEELLVKLNREDLLRKQRTFDNGSIPHQIHLGELHAILRRQEDFYPFLKDNREKIEKILTFRIPYYVGPLARGNSRFAWMTRKSEETITPWNFEEVVDKGASAQSFIERMTNFDKNLPNEKVLPKHSLLYEYFTVYNELTKVKYVTEGMRKPAFLSGEQKKAIVDLLFKTNRKVTVKQLKEDYFKKIECFDSVEISGVEDRFNASLGTYHDLLKIIKDKDFLDNEENEDILEDIVLTLTLFEDREMIEERLKTYAHLFDDKVMKQLKRRRYTGWGRLSRKLINGIRDKQSGKTILDFLKSDGFANRNFMQLIHDDSLTFKEDIQKAQVSGQGDSLHEHIANLAGSPAIKKGILQTVKVVDELVKVMGRHKPENIVIEMARENQTTQKGQKNSRERMKRIEEGIKELGSQILKEHPVENTQLQNEKLYLYYLQNGRDMYVDQELDINRLSDYDVDHIVPQSFLKDDSIDNKVLTRSDKARGKSDNVPSEEVVKKMKNYWRQLLNAKLITQRKFDNLTKAERGGLSELDKAGFIKRQLVETRQITKHVAQILDSRMNTKYDENDKLIREVKVITLKSKLVSDFRKDFQFYKVREINNYHHAHDAYLNAVVGTALIKKYPKLESEFVYGDYKVYDVRKMIAKSEQEIGKATAKYFFYSNIMNFFKTEITLANGEIRKRPLIETNGETGEIVWDKGRDFATVRKVLSMPQVNIVKKTEVQTGGFSKESILPKRNSDKLIARKKDWDPKKYGGFDSPTVAYSVLVVAKVEKGKSKKLKSVKELLGITIMERSSFEKNPIDFLEAKGYKEVKKDLIIKLPKYSLFELENGRKRMLASAGELQKGNELALPSKYVNFLYLASHYEKLKGSPEDNEQKQLFVEQHKHYLDEIIEQISEFSKRVILADANLDKVLSAYNKHRDKPIREQAENIIHLFTLTNLGAPAAFKYFDTTIDRKRYTSTKEVLDATLIHQSITGLYETRIDLSQLGGDGGPAPAPAPAPGGTAPLEEEYRLFLEAPIQNVTLLEQWKREIPKVWAEINPPGLASTQAPIHVQLLSTALPVRVRQYPITLEAKRSLRETIRKFRAAGILRPVHSPWNTPLLPVRKSGTSEYRMVQDLREVNKRVETIHPTVPNPYTLLSLLPPDRIWYSVLDLKDAFFCIPLAPESQLIFAFEWADAEEGESGQLTWTRLPQGFKNSPTLFDEALNRDLQGFRLDHPSVSLLQYVDDLLIAADTQAACLSATRDLLMTLAELGYRVSGKKAQLCQEEVTYLGFKIHKGSRSLSNSRTQAILQIPVPKTKRQVREFLGTIGYCRLWIPGFAELAQPLYAATRGGNDPLVWGEKEEEAFQSLKLALTQPPALALPSLDKPFQLFVEETSGAAKGVLTQALGPWKRPVAYLSKRLDPVAAGWPRCLRAIAAAALLTREASKLTFGQDIEITSSHNLESLLRSPPDKWLTNARITQYQVLLLDPPRVRFKQTAALNPATLLPETDDTLPIHHCLDTLDSLTSTRPDLTDQPLAQAEATLFTDGSSYIRDGKRYAGAAVVTLDSVIWAEPLPIGTSAQKAELIALTKALEWSKDKSVNIYTDSRYAFATLHVHGMIYRERGLLTAGGKAIKNAPEILALLTAVWLPKRVAVMHCKGHQKDDAPTSTGNRRADEVAREVAIRPLSTQATISAGKRTADGSEFEKRTADGSEFESPKKKAKVE

SEQ ID NO: 6514 - protein, 2096 aa, synthetic construct
MPAAKRVKLDGGDKKYSIGLDIGTNSVGWAVITDEYKVPSKKFKVLGNTDRHSIKKNLIGALLFDSGETAEATRLKRTARRRYTRRKNRICYLQEIFSNEMAKVDDSFFHRLEESFLVEEDKKHERHPIFGNIVDEVAYHEKYPTIYHLRKKLVDSTDKADLRLIYLALAHMIKFRGHFLIEGDLNPDNSDVDKLFIQLVQTYNQLFEENPINASGVDAKAILSARLSKSRRLENLIAQLPGEKKNGLFGNLIALSLGLTPNFKSNFDLAEDAKLQLSKDTYDDDLDNLLAQIGDQYADLFLAAKNLSDAILLSDILRVNTEITKAPLSASMIKRYDEHHQDLTLLKALVRQQLPEKYKEIFFDQSKNGYAGYIDGGASQEEFYKFIKPILEKMDGTEELLVKLNREDLLRKQRTFDNGSIPHQIHLGELHAILRRQEDFYPFLKDNREKIEKILTFRIPYYVGPLARGNSRFAWMTRKSEETITPWNFEEVVDKGASAQSFIERMTNFDKNLPNEKVLPKHSLLYEYFTVYNELTKVKYVTEGMRKPAFLSGEQKKAIVDLLFKTNRKVTVKQLKEDYFKKIECFDSVEISGVEDRFNASLGTYHDLLKIIKDKDFLDNEENEDILEDIVLTLTLFEDREMIEERLKTYAHLFDDKVMKQLKRRRYTGWGRLSRKLINGIRDKQSGKTILDFLKSDGFANRNFMQLIHDDSLTFKEDIQKAQVSGQGDSLHEHIANLAGSPAIKKGILQTVKVVDELVKVMGRHKPENIVIEMARENQTTQKGQKNSRERMKRIEEGIKELGSQILKEHPVENTQLQNEKLYLYYLQNGRDMYVDQELDINRLSDYDVDHIVPQSFLKDDSIDNKVLTRSDKARGKSDNVPSEEVVKKMKNYWRQLLNAKLITQRKFDNLTKAERGGLSELDKAGFIKRQLVETRQITKHVAQILDSRMNTKYDENDKLIREVKVITLKSKLVSDFRKDFQFYKVREINNYHHAHDAYLNAVVGTALIKKYPKLESEFVYGDYKVYDVRKMIAKSEQEIGKATAKYFFYSNIMNFFKTEITLANGEIRKRPLIETNGETGEIVWDKGRDFATVRKVLSMPQVNIVKKTEVQTGGFSKESILPKRNSDKLIARKKDWDPKKYGGFDSPTVAYSVLVVAKVEKGKSKKLKSVKELLGITIMERSSFEKNPIDFLEAKGYKEVKKDLIIKLPKYSLFELENGRKRMLASAGELQKGNELALPSKYVNFLYLASHYEKLKGSPEDNEQKQLFVEQHKHYLDEIIEQISEFSKRVILADANLDKVLSAYNKHRDKPIREQAENIIHLFTLTNLGAPAAFKYFDTTIDRKRYTSTKEVLDATLIHQSITGLYETRIDLSQLGGDGGPAPAPAPAPGGTAPLEEEYRLFLEAPIQNVTLLEQWKREIPKVWAEINPPGLASTQAPIHVQLLSTALPVRVRQYPITLEAKRSLRETIRKFRAAGILRPVHSPWNTPLLPVRKSGTSEYRMVQDLREVNKRVETIHPTVPNPYTLLSLLPPDRIWYSVLDLKDAFFCIPLAPESQLIFAFEWADAEEGESGQLTWTRLPQGFKNSPTLFNEALNRDLQGFRLDHPSVSLLQYVDDLLIAADTQAACLSATRDLLMTLAELGYRVSGKKAQLCQEEVTYLGFKIHKGSRSLSNSRTQAILQIPVPKTKRQVREFLGTIGYCRLWIPGFAELAQPLYAATRPGNDPLVWGEKEEEAFQSLKLALTQPPALALPSLDKPFQLFVEETSGAAKGVLTQALGPWKRPVAYLSKRLDPVAAGWPRCLRAIAAAALLTREASKLTFGQDIEITSSHNLESLLRSPPDKWLTNARITQYQVLLLDPPRVRFKQTAALNPATLLPETDDTLPIHHCLDTLDSLTSTRPDLTDQPLAQAEATLFTDGSSYIRDGKRYAGAAVVTLDSVIWAEPLPIGTSAQKAELIALTKALEWSKDKSVNIYTDSRYAFATLHVHGMIYRERGWLTAGGKAIKNAPEILALLTAVWLPKRVAVMHCKGHQKDDAPTSTGNRRADEVAREVAIRPLSTQATISAGKRTADGSEFEKRTADGSEFESPKKKAKVE

SEQ ID NO: 6515 - protein, 2100 aa, synthetic construct
MPAAKRVKLDGGDKKYSIGLDIGTNSVGWAVITDEYKVPSKKFKVLGNTDRHSIKKNLIGALLFDSGETAEATRLKRTARRRYTRRKNRICYLQEIFSNEMAKVDDSFFHRLEESFLVEEDKKHERHPIFGNIVDEVAYHEKYPTIYHLRKKLVDSTDKADLRLIYLALAHMIKFRGHFLIEGDLNPDNSDVDKLFIQLVQTYNQLFEENPINASGVDAKAILSARLSKSRRLENLIAQLPGEKKNGLFGNLIALSLGLTPNFKSNFDLAEDAKLQLSKDTYDDDLDNLLAQIGDQYADLFLAAKNLSDAILLSDILRVNTEITKAPLSASMIKRYDEHHQDLTLLKALVRQQLPEKYKEIFFDQSKNGYAGYIDGGASQEEFYKFIKPILEKMDGTEELLVKLNREDLLRKQRTFDNGSIPHQIHLGELHAILRRQEDFYPFLKDNREKIEKILTFRIPYYVGPLARGNSRFAWMTRKSEETITPWNFEEVVDKGASAQSFIERMTNFDKNLPNEKVLPKHSLLYEYFTVYNELTKVKYVTEGMRKPAFLSGEQKKAIVDLLFKTNRKVTVKQLKEDYFKKIECFDSVEISGVEDRFNASLGTYHDLLKIIKDKDFLDNEENEDILEDIVLTLTLFEDREMIEERLKTYAHLFDDKVMKQLKRRRYTGWGRLSRKLINGIRDKQSGKTILDFLKSDGFANRNFMQLIHDDSLTFKEDIQKAQVSGQGDSLHEHIANLAGSPAIKKGILQTVKVVDELVKVMGRHKPENIVIEMARENQTTQKGQKNSRERMKRIEEGIKELGSQILKEHPVENTQLQNEKLYLYYLQNGRDMYVDQELDINRLSDYDVDHIVPQSFLKDDSIDNKVLTRSDKARGKSDNVPSEEVVKKMKNYWRQLLNAKLITQRKFDNLTKAERGGLSELDKAGFIKRQLVETRQITKHVAQILDSRMNTKYDENDKLIREVKVITLKSKLVSDFRKDFQFYKVREINNYHHAHDAYLNAVVGTALIKKYPKLESEFVYGDYKVYDVRKMIAKSEQEIGKATAKYFFYSNIMNFFKTEITLANGEIRKRPLIETNGETGEIVWDKGRDFATVRKVLSMPQVNIVKKTEVQTGGFSKESILPKRNSDKLIARKKDWDPKKYGGFDSPTVAYSVLVVAKVEKGKSKKLKSVKELLGITIMERSSFEKNPIDFLEAKGYKEVKKDLIIKLPKYSLFELENGRKRMLASAGELQKGNELALPSKYVNFLYLASHYEKLKGSPEDNEQKQLFVEQHKHYLDEIIEQISEFSKRVILADANLDKVLSAYNKHRDKPIREQAENIIHLFTLTNLGAPAAFKYFDTTIDRKRYTSTKEVLDATLIHQSITGLYETRIDLSQLGGDGGPAPAPAPAPGGTVSLQDEHRLFDIPVTTSLPDVWLQDFPQAWAETGGLGRAKCQAPIIIDLKPTAVPVSIKQYPMSLEAHMGIRQHIIKFLELGVLRPCRSPWNTPLLPVKKPGTQDYRPVQDLREINKRTVDIHPTVPNPYNLLSTLKPDYSWYTVLDLKDAFFCLPLAPQSQELFAFEWKDPERGISGQLTWTRLPQGFKNSPTLFNEALHRDLTDFRTQHPEVTLLQYVDDLLLAAPTKKACTQGTRHLLQELGEKGYRASAKKAQICQTKVTYLGYILSEGKRWLTPGRIETVARIPPPRNPREVREFLGTAGFCRLWIPGFAELAAPLYALTKPSTPFTWQTEHQLAFEALKKALLSAPALGLPDTSKPFTLFLDERQGIAKGVLTQKLGPWKRPVAYLSKKLDPVAAGWPPCLRIMAATAMLVKDSAKLTLGQPLTVITPHTLEAIVRQPPDRWITNARLTHYQALLLDTDRVQFGPPVTLNPATLLPVPENQPSPHDCRQVLAETHGTREDLKDQELPDADHTWYTDGSSYLDSGTRRAGAAVVDGHNTIWAQSLPPGTSAQKAELIALTKALELSKGKKANIYTDSRYAFATAHTHGSIYERRGWLTSEGKEIKNKAEIIALLKALFLPQEVAIIHCPGHQKGQDPVAVGNRQADRVARQAAMAEVLTLATEPDNTSHITAGKRTADGSEFEKRTADGSEFESPKKKAKVE

SEQ ID NO: 6516 - protein, 2085 aa, synthetic construct
MPAAKRVKLDGGDKKYSIGLDIGTNSVGWAVITDEYKVPSKKFKVLGNTDRHSIKKNLIGALLFDSGETAEATRLKRTARRRYTRRKNRICYLQEIFSNEMAKVDDSFFHRLEESFLVEEDKKHERHPIFGNIVDEVAYHEKYPTIYHLRKKLVDSTDKADLRLIYLALAHMIKFRGHFLIEGDLNPDNSDVDKLFIQLVQTYNQLFEENPINASGVDAKAILSARLSKSRRLENLIAQLPGEKKNGLFGNLIALSLGLTPNFKSNFDLAEDAKLQLSKDTYDDDLDNLLAQIGDQYADLFLAAKNLSDAILLSDILRVNTEITKAPLSASMIKRYDEHHQDLTLLKALVRQQLPEKYKEIFFDQSKNGYAGYIDGGASQEEFYKFIKPILEKMDGTEELLVKLNREDLLRKQRTFDNGSIPHQIHLGELHAILRRQEDFYPFLKDNREKIEKILTFRIPYYVGPLARGNSRFAWMTRKSEETITPWNFEEVVDKGASAQSFIERMTNFDKNLPNEKVLPKHSLLYEYFTVYNELTKVKYVTEGMRKPAFLSGEQKKAIVDLLFKTNRKVTVKQLKEDYFKKIECFDSVEISGVEDRFNASLGTYHDLLKIIKDKDFLDNEENEDILEDIVLTLTLFEDREMIEERLKTYAHLFDDKVMKQLKRRRYTGWGRLSRKLINGIRDKQSGKTILDFLKSDGFANRNFMQLIHDDSLTFKEDIQKAQVSGQGDSLHEHIANLAGSPAIKKGILQTVKVVDELVKVMGRHKPENIVIEMARENQTTQKGQKNSRERMKRIEEGIKELGSQILKEHPVENTQLQNEKLYLYYLQNGRDMYVDQELDINRLSDYDVDHIVPQSFLKDDSIDNKVLTRSDKARGKSDNVPSEEVVKKMKNYWRQLLNAKLITQRKFDNLTKAERGGLSELDKAGFIKRQLVETRQITKHVAQILDSRMNTKYDENDKLIREVKVITLKSKLVSDFRKDFQFYKVREINNYHHAHDAYLNAVVGTALIKKYPKLESEFVYGDYKVYDVRKMIAKSEQEIGKATAKYFFYSNIMNFFKTEITLANGEIRKRPLIETNGETGEIVWDKGRDFATVRKVLSMPQVNIVKKTEVQTGGFSKESILPKRNSDKLIARKKDWDPKKYGGFDSPTVAYSVLVVAKVEKGKSKKLKSVKELLGITIMERSSFEKNPIDFLEAKGYKEVKKDLIIKLPKYSLFELENGRKRMLASAGELQKGNELALPSKYVNFLYLASHYEKLKGSPEDNEQKQLFVEQHKHYLDEIIEQISEFSKRVILADANLDKVLSAYNKHRDKPIREQAENIIHLFTLTNLGAPAAFKYFDTTIDRKRYTSTKEVLDATLIHQSITGLYETRIDLSQLGGDGGPAPAPAPAPGGVPWILKKPLELTIKLDLEEQQGTLLNNSILSKKGKEELKQLFEKYSALWQSWENQVGHRRIRPHKIATGTVKPTPQKQYHINPKAKPDIQIVINDLLKQGVLIQKESTMNTPVYPVPKPNGRWRMVLDYRAVNKVTPLIAVQNQHSYGILGSLFKGRYKTTIDLSNGFWAHPIVPEDYWITAFTWQGKQYCWTVLPQGFLNSPGLFNGDVVDLLQGIPNVEVYVDDVYISHDSEKEHLEYLDILFNRLKEAGYIISLKKSNIANSIVDFLGFQITNEGRGLTDTFKEKLENITAPTTLKQLQSILGKLNFARNFIPDFTELIAPLYALIPKSPKNYVPWQIEHSTTLETLITKLNGAEYLQGRKGDKTLIMKVNASYTTGYIRYYNEGEKKPISYVSIVFSKTELKFTELEKLLTTVHKGLLKALDLSMGQNIHVYSPIVSMQNIQKTPQTAKKALASRWLSWLSYLEDPRIRFFYDPQMPALKDLPAVDTGKDNKKHPSNFQHIFYTDGSAITSPTKEGHLNAGMGIVYFINKDGNLQKQQEWSISLGNHTAQFAEIAAFEFALKKCLPLGGNILVVTDSNYVAKAYNEELDVWASNGFVNNRKKPLKHISKWKSVADLKRLRPDVVVTHEPGHQKLDSSPHAYGNNLADQLATQASFKVHAGKRTADGSEFEKRTADGSEFESPKKKAKVE

SEQ ID NO: 6517 - protein, 2093 aa, synthetic construct
MPAAKRVKLDGGDKKYSIGLDIGTNSVGWAVITDEYKVPSKKFKVLGNTDRHSIKKNLIGALLFDSGETAEATRLKRTARRRYTRRKNRICYLQEIFSNEMAKVDDSFFHRLEESFLVEEDKKHERHPIFGNIVDEVAYHEKYPTIYHLRKKLVDSTDKADLRLIYLALAHMIKFRGHFLIEGDLNPDNSDVDKLFIQLVQTYNQLFEENPINASGVDAKAILSARLSKSRRLENLIAQLPGEKKNGLFGNLIALSLGLTPNFKSNFDLAEDAKLQLSKDTYDDDLDNLLAQIGDQYADLFLAAKNLSDAILLSDILRVNTEITKAPLSASMIKRYDEHHQDLTLLKALVRQQLPEKYKEIFFDQSKNGYAGYIDGGASQEEFYKFIKPILEKMDGTEELLVKLNREDLLRKQRTFDNGSIPHQIHLGELHAILRRQEDFYPFLKDNREKIEKILTFRIPYYVGPLARGNSRFAWMTRKSEETITPWNFEEVVDKGASAQSFIERMTNFDKNLPNEKVLPKHSLLYEYFTVYNELTKVKYVTEGMRKPAFLSGEQKKAIVDLLFKTNRKVTVKQLKEDYFKKIECFDSVEISGVEDRFNASLGTYHDLLKIIKDKDFLDNEENEDILEDIVLTLTLFEDREMIEERLKTYAHLFDDKVMKQLKRRRYTGWGRLSRKLINGIRDKQSGKTILDFLKSDGFANRNFMQLIHDDSLTFKEDIQKAQVSGQGDSLHEHIANLAGSPAIKKGILQTVKVVDELVKVMGRHKPENIVIEMARENQTTQKGQKNSRERMKRIEEGIKELGSQILKEHPVENTQLQNEKLYLYYLQNGRDMYVDQELDINRLSDYDVDHIVPQSFLKDDSIDNKVLTRSDKARGKSDNVPSEEVVKKMKNYWRQLLNAKLITQRKFDNLTKAERGGLSELDKAGFIKRQLVETRQITKHVAQILDSRMNTKYDENDKLIREVKVITLKSKLVSDFRKDFQFYKVREINNYHHAHDAYLNAVVGTALIKKYPKLESEFVYGDYKVYDVRKMIAKSEQEIGKATAKYFFYSNIMNFFKTEITLANGEIRKRPLIETNGETGEIVWDKGRDFATVRKVLSMPQVNIVKKTEVQTGGFSKESILPKRNSDKLIARKKDWDPKKYGGFDSPTVAYSVLVVAKVEKGKSKKLKSVKELLGITIMERSSFEKNPIDFLEAKGYKEVKKDLIIKLPKYSLFELENGRKRMLASAGELQKGNELALPSKYVNFLYLASHYEKLKGSPEDNEQKQLFVEQHKHYLDEIIEQISEFSKRVILADANLDKVLSAYNKHRDKPIREQAENIIHLFTLTNLGAPAAFKYFDTTIDRKRYTSTKEVLDATLIHQSITGLYETRIDLSQLGGDGGPAPAPAPAPGGTLQLEEEYRLFEPESTQKQEMDIWLKNFPQAWAETGGMGTAHCQAPVLIQLKATATPISIRQYPMPHEAYQGIKPHIRRMLDQGILKPCQSPWNTPLLPVKKPGTEDYRPVQDLREVNKRVEDIHPTVPNPYNLLSTLPPSHPWYTVLDLKDAFFCLRLHSESQLLFAFEWRDPEIGLSGQLTWTRLPQGFKNSPTLFNEALHSDLADFRVRYPALVLLQYVDDLLLAAATRTECLEGTKALLETLGNKGYRASAKKAQICLQEVTYLGYSLKDGQRWLTKARKEAILSIPVPKNSRQVREFLGTAGYCRLWIPGFAELAAPLYPLTRPGTLFQWGTEQQLAFEDIKKALLSSPALGLPDITKPFELFIDENSGFAKGVLVQKLGPWKRPVAYLSKKLDTVASGWPPCLRMVAAIAILVKDAGKLTLGQPLTILTSHPVEALVRQPPNKWLSNARMTHYQAMLLDAERVHFGPTVSLNPATLLPLPSGGNHHDCLQILAETHGTRPDLTDQPLPDADLTWYTDGSSFIRNGEREAGAAVTTESEVIWAAPLPPGTSAQRAELIALTQALKMAEGKKLTVYTDSRYAFATTHVHGEIYRRRGWLTSEGKEIKNKNEILALLEALFLPKRLSIIHCPGHQKGDSPQAKGNRLADDTAKKAATETHSSLTVLPAGKRTADGSEFEKRTADGSEFESPKKKAKVE

SEQ ID NO: 6518 - protein, 2085 aa, synthetic construct
MPAAKRVKLDGGDKKYSIGLDIGTNSVGWAVITDEYKVPSKKFKVLGNTDRHSIKKNLIGALLFDSGETAEATRLKRTARRRYTRRKNRICYLQEIFSNEMAKVDDSFFHRLEESFLVEEDKKHERHPIFGNIVDEVAYHEKYPTIYHLRKKLVDSTDKADLRLIYLALAHMIKFRGHFLIEGDLNPDNSDVDKLFIQLVQTYNQLFEENPINASGVDAKAILSARLSKSRRLENLIAQLPGEKKNGLFGNLIALSLGLTPNFKSNFDLAEDAKLQLSKDTYDDDLDNLLAQIGDQYADLFLAAKNLSDAILLSDILRVNTEITKAPLSASMIKRYDEHHQDLTLLKALVRQQLPEKYKEIFFDQSKNGYAGYIDGGASQEEFYKFIKPILEKMDGTEELLVKLNREDLLRKQRTFDNGSIPHQIHLGELHAILRRQEDFYPFLKDNREKIEKILTFRIPYYVGPLARGNSRFAWMTRKSEETITPWNFEEVVDKGASAQSFIERMTNFDKNLPNEKVLPKHSLLYEYFTVYNELTKVKYVTEGMRKPAFLSGEQKKAIVDLLFKTNRKVTVKQLKEDYFKKIECFDSVEISGVEDRFNASLGTYHDLLKIIKDKDFLDNEENEDILEDIVLTLTLFEDREMIEERLKTYAHLFDDKVMKQLKRRRYTGWGRLSRKLINGIRDKQSGKTILDFLKSDGFANRNFMQLIHDDSLTFKEDIQKAQVSGQGDSLHEHIANLAGSPAIKKGILQTVKVVDELVKVMGRHKPENIVIEMARENQTTQKGQKNSRERMKRIEEGIKELGSQILKEHPVENTQLQNEKLYLYYLQNGRDMYVDQELDINRLSDYDVDHIVPQSFLKDDSIDNKVLTRSDKARGKSDNVPSEEVVKKMKNYWRQLLNAKLITQRKFDNLTKAERGGLSELDKAGFIKRQLVETRQITKHVAQILDSRMNTKYDENDKLIREVKVITLKSKLVSDFRKDFQFYKVREINNYHHAHDAYLNAVVGTALIKKYPKLESEFVYGDYKVYDVRKMIAKSEQEIGKATAKYFFYSNIMNFFKTEITLANGEIRKRPLIETNGETGEIVWDKGRDFATVRKVLSMPQVNIVKKTEVQTGGFSKESILPKRNSDKLIARKKDWDPKKYGGFDSPTVAYSVLVVAKVEKGKSKKLKSVKELLGITIMERSSFEKNPIDFLEAKGYKEVKKDLIIKLPKYSLFELENGRKRMLASAGELQKGNELALPSKYVNFLYLASHYEKLKGSPEDNEQKQLFVEQHKHYLDEIIEQISEFSKRVILADANLDKVLSAYNKHRDKPIREQAENIIHLFTLTNLGAPAAFKYFDTTIDRKRYTSTKEVLDATLIHQSITGLYETRIDLSQLGGDGGPAPAPAPAPGGVPWLTQQPLQLTILVPLQEYQEKILSKTALPEDQKQQLKTLFVKYDNLWQHWENQVGHRKIRPHNIATGDYPPRPQKQYPINPKAKPSIQIVIDDLLKQGVLTPQNSTMNTPVYPVPKPDGRWRMVLDYREVNKTIPLTAAQNQHSAGILATIVRQKYKTTLDLANGFWAHPITPESYWLTAFTWQGKQYCWTRLPQGFLNSPALFNADVVDLLKEIPNVQVYVDDIYLSHDDPKEHVQQLEKVFQILLQAGYVVSLKKSEIGQKTVEFLGFNITKEGRGLTDTFKTKLLNITPPKDLKQLQSILGKLNFARNFIPNFAELVQPLYNLIAPAKGKYIEWSEENTKQLNMVIEALNTASNLEERLPEQRLVIKVNTSPSAGYVRYYNETGKKPIMYLNYVFSKAELKFSMLEKLLTTMHKALIKAMDLAMGQEILVYSPIVSMTKIQKTPLPERKALPIRWITWMTYLEDPRIQFHYDKTLPELKHIPDVYTSSQSPVKHPSQYEGVFYTDGSAIKSPDPTKSNNAGMGIVHATYKPEYQVLNQWSIPLGNHTAQMAEIAAVEFACKKALKIPGPVLVITDSFYVAESANKELPYWKSNGFVNNKKKPLKHISKWKSIAECLSMKPDITIQHEKGISLQIPVFILKGNALADKLATQGSYVVNAGKRTADGSEFEKRTADGSEFESPKKKAKVE

SEQ ID NO: 6519 - protein, 2216 aa, synthetic construct
MPAAKRVKLDGGDKKYSIGLDIGTNSVGWAVITDEYKVPSKKFKVLGNTDRHSIKKNLIGALLFDSGETAEATRLKRTARRRYTRRKNRICYLQEIFSNEMAKVDDSFFHRLEESFLVEEDKKHERHPIFGNIVDEVAYHEKYPTIYHLRKKLVDSTDKADLRLIYLALAHMIKFRGHFLIEGDLNPDNSDVDKLFIQLVQTYNQLFEENPINASGVDAKAILSARLSKSRRLENLIAQLPGEKKNGLFGNLIALSLGLTPNFKSNFDLAEDAKLQLSKDTYDDDLDNLLAQIGDQYADLFLAAKNLSDAILLSDILRVNTEITKAPLSASMIKRYDEHHQDLTLLKALVRQQLPEKYKEIFFDQSKNGYAGYIDGGASQEEFYKFIKPILEKMDGTEELLVKLNREDLLRKQRTFDNGSIPHQIHLGELHAILRRQEDFYPFLKDNREKIEKILTFRIPYYVGPLARGNSRFAWMTRKSEETITPWNFEEVVDKGASAQSFIERMTNFDKNLPNEKVLPKHSLLYEYFTVYNELTKVKYVTEGMRKPAFLSGEQKKAIVDLLFKTNRKVTVKQLKEDYFKKIECFDSVEISGVEDRFNASLGTYHDLLKIIKDKDFLDNEENEDILEDIVLTLTLFEDREMIEERLKTYAHLFDDKVMKQLKRRRYTGWGRLSRKLINGIRDKQSGKTILDFLKSDGFANRNFMQLIHDDSLTFKEDIQKAQVSGQGDSLHEHIANLAGSPAIKKGILQTVKVVDELVKVMGRHKPENIVIEMARENQTTQKGQKNSRERMKRIEEGIKELGSQILKEHPVENTQLQNEKLYLYYLQNGRDMYVDQELDINRLSDYDVDHIVPQSFLKDDSIDNKVLTRSDKARGKSDNVPSEEVVKKMKNYWRQLLNAKLITQRKFDNLTKAERGGLSELDKAGFIKRQLVETRQITKHVAQILDSRMNTKYDENDKLIREVKVITLKSKLVSDFRKDFQFYKVREINNYHHAHDAYLNAVVGTALIKKYPKLESEFVYGDYKVYDVRKMIAKSEQEIGKATAKYFFYSNIMNFFKTEITLANGEIRKRPLIETNGETGEIVWDKGRDFATVRKVLSMPQVNIVKKTEVQTGGFSKESILPKRNSDKLIARKKDWDPKKYGGFDSPTVAYSVLVVAKVEKGKSKKLKSVKELLGITIMERSSFEKNPIDFLEAKGYKEVKKDLIIKLPKYSLFELENGRKRMLASAGELQKGNELALPSKYVNFLYLASHYEKLKGSPEDNEQKQLFVEQHKHYLDEIIEQISEFSKRVILADANLDKVLSAYNKHRDKPIREQAENIIHLFTLTNLGAPAAFKYFDTTIDRKRYTSTKEVLDATLIHQSITGLYETRIDLSQLGGDGGPAPAPAPAPGGTLGDQGSRGSDPLPEPRVTLTVEGIPTEFLVNTGAEHSVLTKPMGKMGSKRTVVAGATGSKVYPWTTKRLLKIGQKQVTHSFLVIPECPAPLLGRDLLTKLKAQIQFSTEGPQVTWEDRPAMCLVLNLEEEYRLHEKPVPPSIDPSWLQLFPMVWAEKAGMGLANQVPPVVVELKSDASPVAVRQYPMSKEAREGIRPHIQRFLDLGILVPCQSPWNTPLLPVKKPGTNDYRPVQDLREVNKRVQDIHPTVPNPYNLLSSLPPSHTWYSVLDLKDAFFCLKLHPNSQPLFAFEWRDPEKGNTGQLTWTRLPQGFKNSPTLFDEALHRDLASFRALNPQVVMLQYVDDLLVAAPTYRDCKEGTRRLLQELSKLGYRVSAKKAQLCREEVTYLGYLLKGGKRWLTPARKATVMKIPTPTTPRQVREFLGTAGFCRLWIPGFASLAAPLYPLTREKVPFTWTEAHQEAFGRIKEALLSAPALALPDLTKPFALYVDEKEGVARGVLTQTLGPWRRPVAYLSKKLDPVASGWPTCLKAIAAVALLLKDADKLTLGQNVLVIAPHNLESIVRQPPDRWMTNARMTHYQSLLLNERVSFAPPAILNPATLLPVESDDTPIHICSEILAEETGTRPDLRDQPLPGVPAWYTDGSSFIMDGRRQAGAAIVDNKRTVWASNLPEGTSAQKAELIALTQALRLAEGKSINIYTDSRYAFATAHVHGAIYKQRGLLTSAGKDIKNKEEILALLEAIHLPKRVAIIHCPGHQRGTDPVATGNRKADEAAKQAAQSTRILTETTKNAGKRTADGSEFEKRTADGSEFESPKKKAKVE

SEQ ID NO: 6520 - protein, 2125 aa, synthetic construct
MPAAKRVKLDGGDKKYSIGLDIGTNSVGWAVITDEYKVPSKKFKVLGNTDRHSIKKNLIGALLFDSGETAEATRLKRTARRRYTRRKNRICYLQEIFSNEMAKVDDSFFHRLEESFLVEEDKKHERHPIFGNIVDEVAYHEKYPTIYHLRKKLVDSTDKADLRLIYLALAHMIKFRGHFLIEGDLNPDNSDVDKLFIQLVQTYNQLFEENPINASGVDAKAILSARLSKSRRLENLIAQLPGEKKNGLFGNLIALSLGLTPNFKSNFDLAEDAKLQLSKDTYDDDLDNLLAQIGDQYADLFLAAKNLSDAILLSDILRVNTEITKAPLSASMIKRYDEHHQDLTLLKALVRQQLPEKYKEIFFDQSKNGYAGYIDGGASQEEFYKFIKPILEKMDGTEELLVKLNREDLLRKQRTFDNGSIPHQIHLGELHAILRRQEDFYPFLKDNREKIEKILTFRIPYYVGPLARGNSRFAWMTRKSEETITPWNFEEVVDKGASAQSFIERMTNFDKNLPNEKVLPKHSLLYEYFTVYNELTKVKYVTEGMRKPAFLSGEQKKAIVDLLFKTNRKVTVKQLKEDYFKKIECFDSVEISGVEDRFNASLGTYHDLLKIIKDKDFLDNEENEDILEDIVLTLTLFEDREMIEERLKTYAHLFDDKVMKQLKRRRYTGWGRLSRKLINGIRDKQSGKTILDFLKSDGFANRNFMQLIHDDSLTFKEDIQKAQVSGQGDSLHEHIANLAGSPAIKKGILQTVKVVDELVKVMGRHKPENIVIEMARENQTTQKGQKNSRERMKRIEEGIKELGSQILKEHPVENTQLQNEKLYLYYLQNGRDMYVDQELDINRLSDYDVDHIVPQSFLKDDSIDNKVLTRSDKARGKSDNVPSEEVVKKMKNYWRQLLNAKLITQRKFDNLTKAERGGLSELDKAGFIKRQLVETRQITKHVAQILDSRMNTKYDENDKLIREVKVITLKSKLVSDFRKDFQFYKVREINNYHHAHDAYLNAVVGTALIKKYPKLESEFVYGDYKVYDVRKMIAKSEQEIGKATAKYFFYSNIMNFFKTEITLANGEIRKRPLIETNGETGEIVWDKGRDFATVRKVLSMPQVNIVKKTEVQTGGFSKESILPKRNSDKLIARKKDWDPKKYGGFDSPTVAYSVLVVAKVEKGKSKKLKSVKELLGITIMERSSFEKNPIDFLEAKGYKEVKKDLIIKLPKYSLFELENGRKRMLASAGELQKGNELALPSKYVNFLYLASHYEKLKGSPEDNEQKQLFVEQHKHYLDEIIEQISEFSKRVILADANLDKVLSAYNKHRDKPIREQAENIIHLFTLTNLGAPAAFKYFDTTIDRKRYTSTKEVLDATLIHQSITGLYETRIDLSQLGGDGGPAPAPAPAPGGLLGRDLLTKLKAQIQFSTEGPQVTWEDRPAMCLVLNLEEEYRLHEKPVPPSIDPSWLQLFPMVWAEKAGMGLANQVPPVVVELKSDASPVAVRQYPMSKEAREGIRPHIQRFLDLGILVPCQSPWNTPLLPVKKPGTNDYRPVQDLREVNKRVQDIHPTVPNPYNLLSSLPPSHTWYSVLDLKDAFFCLKLHPNSQPLFAFEWRDPEKGNTGQLTWTRLPQGFKNSPTLFNEALHRDLASFRALNPQVVMLQYVDDLLVAAPTYRDCKEGTRRLLQELSKLGYRVSAKKAQLCREEVTYLGYLLKGGKRWLTPARKATVMKIPTPTTPRQVREFLGTAGFCRLWIPGFASLAAPLYPLTRPKVPFTWTEAHQEAFGRIKEALLSAPALALPDLTKPFALYVDEKEGVARGVLTQTLGPWRRPVAYLSKKLDPVASGWPTCLKAIAAVALLLKDADKLTLGQNVLVIAPHNLESIVRQPPDRWMTNARMTHYQSLLLNERVSFAPPAILNPATLLPVESDDTPIHICSEILAEETGTRPDLRDQPLPGVPAWYTDGSSFIMDGRRQAGAAIVDNKRTVWASNLPEGTSAQKAELIALTQALRLAEGKSINIYTDSRYAFATAHVHGAIYKQRGWLTSAGKDIKNKEEILALLEAIHLPKRVAIIHCPGHQRGTDPVATGNRKADEAAKQAAQSTRILTETTKNAGKRTADGSEFEKRTADGSEFESPKKKAKVE

SEQ ID NO: 6521 - protein, 2216 aa, synthetic construct
MPAAKRVKLDGGDKKYSIGLDIGTNSVGWAVITDEYKVPSKKFKVLGNTDRHSIKKNLIGALLFDSGETAEATRLKRTARRRYTRRKNRICYLQEIFSNEMAKVDDSFFHRLEESFLVEEDKKHERHPIFGNIVDEVAYHEKYPTIYHLRKKLVDSTDKADLRLIYLALAHMIKFRGHFLIEGDLNPDNSDVDKLFIQLVQTYNQLFEENPINASGVDAKAILSARLSKSRRLENLIAQLPGEKKNGLFGNLIALSLGLTPNFKSNFDLAEDAKLQLSKDTYDDDLDNLLAQIGDQYADLFLAAKNLSDAILLSDILRVNTEITKAPLSASMIKRYDEHHQDLTLLKALVRQQLPEKYKEIFFDQSKNGYAGYIDGGASQEEFYKFIKPILEKMDGTEELLVKLNREDLLRKQRTFDNGSIPHQIHLGELHAILRRQEDFYPFLKDNREKIEKILTFRIPYYVGPLARGNSRFAWMTRKSEETITPWNFEEVVDKGASAQSFIERMTNFDKNLPNEKVLPKHSLLYEYFTVYNELTKVKYVTEGMRKPAFLSGEQKKAIVDLLFKTNRKVTVKQLKEDYFKKIECFDSVEISGVEDRFNASLGTYHDLLKIIKDKDFLDNEENEDILEDIVLTLTLFEDREMIEERLKTYAHLFDDKVMKQLKRRRYTGWGRLSRKLINGIRDKQSGKTILDFLKSDGFANRNFMQLIHDDSLTFKEDIQKAQVSGQGDSLHEHIANLAGSPAIKKGILQTVKVVDELVKVMGRHKPENIVIEMARENQTTQKGQKNSRERMKRIEEGIKELGSQILKEHPVENTQLQNEKLYLYYLQNGRDMYVDQELDINRLSDYDVDHIVPQSFLKDDSIDNKVLTRSDKARGKSDNVPSEEVVKKMKNYWRQLLNAKLITQRKFDNLTKAERGGLSELDKAGFIKRQLVETRQITKHVAQILDSRMNTKYDENDKLIREVKVITLKSKLVSDFRKDFQFYKVREINNYHHAHDAYLNAVVGTALIKKYPKLESEFVYGDYKVYDVRKMIAKSEQEIGKATAKYFFYSNIMNFFKTEITLANGEIRKRPLIETNGETGEIVWDKGRDFATVRKVLSMPQVNIVKKTEVQTGGFSKESILPKRNSDKLIARKKDWDPKKYGGFDSPTVAYSVLVVAKVEKGKSKKLKSVKELLGITIMERSSFEKNPIDFLEAKGYKEVKKDLIIKLPKYSLFELENGRKRMLASAGELQKGNELALPSKYVNFLYLASHYEKLKGSPEDNEQKQLFVEQHKHYLDEIIEQISEFSKRVILADANLDKVLSAYNKHRDKPIREQAENIIHLFTLTNLGAPAAFKYFDTTIDRKRYTSTKEVLDATLIHQSITGLYETRIDLSQLGGDGGPAPAPAPAPGGTLGDQGSRGSDPLPEPRVTLTVEGIPTEFLVNTGAEHSVLTKPMGKMGSKRTVVAGATGSKVYPWTTKRLLKIGQKQVTHSFLVIPECPAPLLGRDLLTKLKAQIQFSTEGPQVTWEDRPAMCLVLNLEEEYRLHEKPVPPSIDPSWLQLFPMVWAEKAGMGLANQVPPVVVELKSDASPVAVRQYPMSKEAREGIRPHIQRFLDLGILVPCQSPWNTPLLPVKKPGTNDYRPVQDLREVNKRVQDIHPTVPNPYNLLSSLPPSHTWYSVLDLKDAFFCLKLHPNSQPLFAFEWRDPEKGNTGQLTWTRLPQGFKNSPTLFNEALHRDLASFRALNPQVVMLQYVDDLLVAAPTYRDCKEGTRRLLQELSKLGYRVSAKKAQLCREEVTYLGYLLKGGKRWLTPARKATVMKIPTPTTPRQVREFLGTAGFCRLWIPGFASLAAPLYPLTRPKVPFTWTEAHQEAFGRIKEALLSAPALALPDLTKPFALYVDEKEGVARGVLTQTLGPWRRPVAYLSKKLDPVASGWPTCLKAIAAVALLLKDADKLTLGQNVLVIAPHNLESIVRQPPDRWMTNARMTHYQSLLLNERVSFAPPAILNPATLLPVESDDTPIHICSEILAEETGTRPDLRDQPLPGVPAWYTDGSSFIMDGRRQAGAAIVDNKRTVWASNLPEGTSAQKAELIALTQALRLAEGKSINIYTDSRYAFATAHVHGAIYKQRGWLTSAGKDIKNKEEILALLEAIHLPKRVAIIHCPGHQRGTDPVATGNRKADEAAKQAAQSTRILTETTKNAGKRTADGSEFEKRTADGSEFESPKKKAKVE

SEQ ID NO: 6522 - protein, 2094 aa, synthetic construct
MPAAKRVKLDGGDKKYSIGLDIGTNSVGWAVITDEYKVPSKKFKVLGNTDRHSIKKNLIGALLFDSGETAEATRLKRTARRRYTRRKNRICYLQEIFSNEMAKVDDSFFHRLEESFLVEEDKKHERHPIFGNIVDEVAYHEKYPTIYHLRKKLVDSTDKADLRLIYLALAHMIKFRGHFLIEGDLNPDNSDVDKLFIQLVQTYNQLFEENPINASGVDAKAILSARLSKSRRLENLIAQLPGEKKNGLFGNLIALSLGLTPNFKSNFDLAEDAKLQLSKDTYDDDLDNLLAQIGDQYADLFLAAKNLSDAILLSDILRVNTEITKAPLSASMIKRYDEHHQDLTLLKALVRQQLPEKYKEIFFDQSKNGYAGYIDGGASQEEFYKFIKPILEKMDGTEELLVKLNREDLLRKQRTFDNGSIPHQIHLGELHAILRRQEDFYPFLKDNREKIEKILTFRIPYYVGPLARGNSRFAWMTRKSEETITPWNFEEVVDKGASAQSFIERMTNFDKNLPNEKVLPKHSLLYEYFTVYNELTKVKYVTEGMRKPAFLSGEQKKAIVDLLFKTNRKVTVKQLKEDYFKKIECFDSVEISGVEDRFNASLGTYHDLLKIIKDKDFLDNEENEDILEDIVLTLTLFEDREMIEERLKTYAHLFDDKVMKQLKRRRYTGWGRLSRKLINGIRDKQSGKTILDFLKSDGFANRNFMQLIHDDSLTFKEDIQKAQVSGQGDSLHEHIANLAGSPAIKKGILQTVKVVDELVKVMGRHKPENIVIEMARENQTTQKGQKNSRERMKRIEEGIKELGSQILKEHPVENTQLQNEKLYLYYLQNGRDMYVDQELDINRLSDYDVDHIVPQSFLKDDSIDNKVLTRSDKARGKSDNVPSEEVVKKMKNYWRQLLNAKLITQRKFDNLTKAERGGLSELDKAGFIKRQLVETRQITKHVAQILDSRMNTKYDENDKLIREVKVITLKSKLVSDFRKDFQFYKVREINNYHHAHDAYLNAVVGTALIKKYPKLESEFVYGDYKVYDVRKMIAKSEQEIGKATAKYFFYSNIMNFFKTEITLANGEIRKRPLIETNGETGEIVWDKGRDFATVRKVLSMPQVNIVKKTEVQTGGFSKESILPKRNSDKLIARKKDWDPKKYGGFDSPTVAYSVLVVAKVEKGKSKKLKSVKELLGITIMERSSFEKNPIDFLEAKGYKEVKKDLIIKLPKYSLFELENGRKRMLASAGELQKGNELALPSKYVNFLYLASHYEKLKGSPEDNEQKQLFVEQHKHYLDEIIEQISEFSKRVILADANLDKVLSAYNKHRDKPIREQAENIIHLFTLTNLGAPAAFKYFDTTIDRKRYTSTKEVLDATLIHQSITGLYETRIDLSQLGGDGGPAPAPAPAPGGLGIEDEYRLHETSTEPDVSLGSTWLSDFPQAWAETGGMGLAVRQAPLIIPLKATSTPVSIQQYPMSHEARLGIKPHIQRLLDQGILVPCQSPWNTPLLPVKKPGTNDYRPVQDLREVNKRVEDIHPTVPNPYNLLSGLPPSHQWYTVLDLKDAFFCLRLHPTSQPLFAFEWRDPGMGISGQLTWTRLPQGFKNSPTLFNEALHRDLADFRIQHPDLILLQYVDDILLAATSELDCQQGTRALLQTLGDLGYRASAKKAQICQKQVKYLGYLLREGQRWLTEARKETVMGQPVPKTPRQLREFLGKAGFCRLFIPGFAEMAAPLYPLTKPGTLFSWGPDQQKAYQEIKQALLTAPALGLPDLTKPFELFVDEKQGYAKGVLTQKLGPWRRPVAYLSKKLDPVAAGWPPCLRMVAAIAVLTKDAGKLTMGQPLVILAPHAVEALVKQPPDRWLSNARMTHYQAMLLDTDRVQFGPVVALNPATLLPLPEEGAPHDCLEILAETHGTRPDLTDQPIPDADHTWYTDGSSFLQEGQRKAGAAVTTETEVIWAGALPAGTSAQRAELIALTQALKMAEGKRLNVYTDSRYAFATAHIHGEIYRRRGWLTSEGREIKNKSEILALLKALFLPKRLSIIHCLGHQKGDSAEARGNRLADQAAREAAIKTPPDTSTLLIAGKRTADGSEFEKRTADGSEFESPKKKAKVE

SEQ ID NO: 6523 - protein, 2094 aa, synthetic construct; identical to SEQ ID NO: 6522

SEQ ID NO: 6524 - protein, 2094 aa, synthetic construct
MPAAKRVKLDGGDKKYSIGLDIGTNSVGWAVITDEYKVPSKKFKVLGNTDRHSIKKNLIGALLFDSGETAEATRLKRTARRRYTRRKNRICYLQEIFSNEMAKVDDSFFHRLEESFLVEEDKKHERHPIFGNIVDEVAYHEKYPTIYHLRKKLVDSTDKADLRLIYLALAHMIKFRGHFLIEGDLNPDNSDVDKLFIQLVQTYNQLFEENPINASGVDAKAILSARLSKSRRLENLIAQLPGEKKNGLFGNLIALSLGLTPNFKSNFDLAEDAKLQLSKDTYDDDLDNLLAQIGDQYADLFLAAKNLSDAILLSDILRVNTEITKAPLSASMIKRYDEHHQDLTLLKALVRQQLPEKYKEIFFDQSKNGYAGYIDGGASQEEFYKFIKPILEKMDGTEELLVKLNREDLLRKQRTFDNGSIPHQIHLGELHAILRRQEDFYPFLKDNREKIEKILTFRIPYYVGPLARGNSRFAWMTRKSEETITPWNFEEVVDKGASAQSFIERMTNFDKNLPNEKVLPKHSLLYEYFTVYNELTKVKYVTEGMRKPAFLSGEQKKAIVDLLFKTNRKVTVKQLKEDYFKKIECFDSVEISGVEDRFNASLGTYHDLLKIIKDKDFLDNEENEDILEDIVLTLTLFEDREMIEERLKTYAHLFDDKVMKQLKRRRYTGWGRLSRKLINGIRDKQSGKTILDFLKSDGFANRNFMQLIHDDSLTFKEDIQKAQVSGQGDSLHEHIANLAGSPAIKKGILQTVKVVDELVKVMGRHKPENIVIEMARENQTTQKGQKNSRERMKRIEEGIKELGSQILKEHPVENTQLQNEKLYLYYLQNGRDMYVDQELDINRLSDYDVDHIVPQSFLKDDSIDNKVLTRSDKARGKSDNVPSEEVVKKMKNYWRQLLNAKLITQRKFDNLTKAERGGLSELDKAGFIKRQLVETRQITKHVAQILDSRMNTKYDENDKLIREVKVITLKSKLVSDFRKDFQFYKVREINNYHHAHDAYLNAVVGTALIKKYPKLESEFVYGDYKVYDVRKMIAKSEQEIGKATAKYFFYSNIMNFFKTEITLANGEIRKRPLIETNGETGEIVWDKGRDFATVRKVLSMPQVNIVKKTEVQTGGFSKESILPKRNSDKLIARKKDWDPKKYGGFDSPTVAYSVLVVAKVEKGKSKKLKSVKELLGITIMERSSFEKNPIDFLEAKGYKEVKKDLIIKLPKYSLFELENGRKRMLASAGELQKGNELALPSKYVNFLYLASHYEKLKGSPEDNEQKQLFVEQHKHYLDEIIEQISEFSKRVILADANLDKVLSAYNKHRDKPIREQAENIIHLFTLTNLGAPAAFKYFDTTIDRKRYTSTKEVLDATLIHQSITGLYETRIDLSQLGGDGGPAPAPAPAPGGTLNIEDEHRLHETSKEPDVSLGSTWLSDFPQAWAETGGMGLAVRQAPLIIPLKATSTPVSIKQYPMSQEARLGIKPHIQRLLDQGILVPCQSPWNTPLLPVKKPGTNDYRPVQDLREVNKRVEDIHPTVPNPYNLLSGLPPSHQWYTVLDLKDAFFCLRLHPTSQPLFAFEWRDPEMGISGQLTWTRLPQGFKNSPTLFDEALHRDLADFRIQHPDLILLQYVDDLLLAATSELDCQQGTRALLQTLGNLGYRASAKKAQICQKQVKYLGYLLKEGQRWLTEARKETVMGQPTPKTPRQLREFLGTAGFCRLWIPGFAEMAAPLYPLTKTGTLFNWGPDQQKAYQEIKQALLTAPALGLPDLTKPFELFVDEKQGYAKGVLTQKLGPWRRPVAYLSKKLDPVAAGWPPCLRMVAAIAVLTKDAGKLTMGQPLVILAPHAVEALVKQPPDRWLSNARMTHYQALLLDTDRVQFGPVVALNPATLLPLPEEGLQHNCLDILAEAHGTRPDLTDQPLPDADHTWYTDGSSLLQEGQRKAGAAVTTETEVIWAKALPAGTSAQRAELIALTQALKMAEGKKLNVYTDSRYAFATAHIHGEIYRRRGLLTSEGKEIKNKDEILALLKALFLPKRLSIIHCPGHQKGHSAEARGNRMADQAARKAAITETPDTSTLLAGKRTADGSEFEKRTADGSEFESPKKKAKVE

SEQ ID NO: 6525 - protein, 2086 aa, synthetic construct
MPAAKRVKLDGGDKKYSIGLDIGTNSVGWAVITDEYKVPSKKFKVLGNTDRHSIKKNLIGALLFDSGETAEATRLKRTARRRYTRRKNRICYLQEIFSNEMAKVDDSFFHRLEESFLVEEDKKHERHPIFGNIVDEVAYHEKYPTIYHLRKKLVDSTDKADLRLIYLALAHMIKFRGHFLIEGDLNPDNSDVDKLFIQLVQTYNQLFEENPINASGVDAKAILSARLSKSRRLENLIAQLPGEKKNGLFGNLIALSLGLTPNFKSNFDLAEDAKLQLSKDTYDDDLDNLLAQIGDQYADLFLAAKNLSDAILLSDILRVNTEITKAPLSASMIKRYDEHHQDLTLLKALVRQQLPEKYKEIFFDQSKNGYAGYIDGGASQEEFYKFIKPILEKMDGTEELLVKLNREDLLRKQRTFDNGSIPHQIHLGELHAILRRQEDFYPFLKDNREKIEKILTFRIPYYVGPLARGNSRFAWMTRKSEETITPWNFEEVVDKGASAQSFIERMTNFDKNLPNEKVLPKHSLLYEYFTVYNELTKVKYVTEGMRKPAFLSGEQKKAIVDLLFKTNRKVTVKQLKEDYFKKIECFDSVEISGVEDRFNASLGTYHDLLKIIKDKDFLDNEENEDILEDIVLTLTLFEDREMIEERLKTYAHLFDDKVMKQLKRRRYTGWGRLSRKLINGIRDKQSGKTILDFLKSDGFANRNFMQLIHDDSLTFKEDIQKAQVSGQGDSLHEHIANLAGSPAIKKGILQTVKVVDELVKVMGRHKPENIVIEMARENQTTQKGQKNSRERMKRIEEGIKELGSQILKEHPVENTQLQNEKLYLYYLQNGRDMYVDQELDINRLSDYDVDHIVPQSFLKDDSIDNKVLTRSDKARGKSDNVPSEEVVKKMKNYWRQLLNAKLITQRKFDNLTKAERGGLSELDKAGFIKRQLVETRQITKHVAQILDSRMNTKYDENDKLIREVKVITLKSKLVSDFRKDFQFYKVREINNYHHAHDAYLNAVVGTALIKKYPKLESEFVYGDYKVYDVRKMIAKSEQEIGKATAKYFFYSNIMNFFKTEITLANGEIRKRPLIETNGETGEIVWDKGRDFATVRKVLSMPQVNIVKKTEVQTGGFSKESILPKRNSDKLIARKKDWDPKKYGGFDSPTVAYSVLVVAKVEKGKSKKLKSVKELLGITIMERSSFEKNPIDFLEAKGYKEVKKDLIIKLPKYSLFELENGRKRMLASAGELQKGNELALPSKYVNFLYLASHYEKLKGSPEDNEQKQLFVEQHKHYLDEIIEQISEFSKRVILADANLDKVLSAYNKHRDKPIREQAENIIHLFTLTNLGAPAAFKYFDTTIDRKRYTSTKEVLDATLIHQSITGLYETRIDLSQLGGDGGPAPAPAPAPGGLDDEYRLYSPLVKPDQNIQFWLEQFPQAWAETAGMGLAKQVPPQVIQLKASATPVSVRQYPLSKEAQEGIRPHVQRLIQQGILVPVQSPWNTPLLPVRKPGTNDYRPVQDLREVNKRVQDIHPTVPNPYNLLCALPPQRSWYTVLDLKDAFFCLRLHPTSQPLFAFEWRDPGTGRTGQLTWTRLPQGFKNSPTIFNEALHRDLANFRIQHPQVTLLQYVDDLLLAGATKQDCLEGTKALLLELSDLGYRASAKKAQICRREVTYLGYSLRDGQRWLTEARKKTVVQIPAPTTAKQVREFLGKAGFCRLFIPGFATLAAPLYPLTKPKGEFSWAPEHQKAFDAIKKALLSAPALALPDVTKPFTLYVDERKGVARGVLTQTLGPWRRPVAYLSKKLDPVASGWPVCLKAIAAVAILVKDADKLTLGQNITVIAPHALENIVRQPPDRWMTNARMTHYQSLLLTERVTFAPPAALNPATLLPEETDEPVTHDCHQLLIEETGVRKDLTDIPLTGEVLTWFTDGSSYVVEGKRMAGAAVVDGTRTIWASSLPEGTSAQKAELMALTQALRLAEGKSINIYTDSRYAFATAHVHGAIYKQRGWLTSAGREIKNKEEILSLLEALHLPKRLAIIHCPGHQKAKDPISRGNQMADRVAKQAAQGVNLLPAGKRTADGSEFEKRTADGSEFESPKKKAKVE

SEQ ID NO: 6526 - protein, 2088 aa, synthetic construct
MPAAKRVKLDGGDKKYSIGLDIGTNSVGWAVITDEYKVPSKKFKVLGNTDRHSIKKNLIGALLFDSGETAEATRLKRTARRRYTRRKNRICYLQEIFSNEMAKVDDSFFHRLEESFLVEEDKKHERHPIFGNIVDEVAYHEKYPTIYHLRKKLVDSTDKADLRLIYLALAHMIKFRGHFLIEGDLNPDNSDVDKLFIQLVQTYNQLFEENPINASGVDAKAILSARLSKSRRLENLIAQLPGEKKNGLFGNLIALSLGLTPNFKSNFDLAEDAKLQLSKDTYDDDLDNLLAQIGDQYADLFLAAKNLSDAILLSDILRVNTEITKAPLSASMIKRYDEHHQDLTLLKALVRQQLPEKYKEIFFDQSKNGYAGYIDGGASQEEFYKFIKPILEKMDGTEELLVKLNREDLLRKQRTFDNGSIPHQIHLGELHAILRRQEDFYPFLKDNREKIEKILTFRIPYYVGPLARGNSRFAWMTRKSEETITPWNFEEVVDKGASAQSFIERMTNFDKNLPNEKVLPKHSLLYEYFTVYNELTKVKYVTEGMRKPAFLSGEQKKAIVDLLFKTNRKVTVKQLKEDYFKKIECFDSVEISGVEDRFNASLGTYHDLLKIIKDKDFLDNEENEDILEDIVLTLTLFEDREMIEERLKTYAHLFDDKVMKQLKRRRYTGWGRLSRKLINGIRDKQSGKTILDFLKSDGFANRNFMQLIHDDSLTFKEDIQKAQVSGQGDSLHEHIANLAGSPAIKKGILQTVKVVDELVKVMGRHKPENIVIEMARENQTTQKGQKNSRERMKRIEEGIKELGSQILKEHPVENTQLQNEKLYLYYLQNGRDMYVDQELDINRLSDYDVDHIVPQSFLKDDSIDNKVLTRSDKARGKSDNVPSEEVVKKMKNYWRQLLNAKLITQRKFDNLTKAERGGLSELDKAGFIKRQLVETRQITKHVAQILDSRMNTKYDENDKLIREVKVITLKSKLVSDFRKDFQFYKVREINNYHHAHDAYLNAVVGTALIKKYPKLESEFVYGDYKVYDVRKMIAKSEQEIGKATAKYFFYSNIMNFFKTEITLANGEIRKRPLIETNGETGEIVWDKGRDFATVRKVLSMPQVNIVKKTEVQTGGFSKESILPKRNSDKLIARKKDWDPKKYGGFDSPTVAYSVLVVAKVEKGKSKKLKSVKELLGITIMERSSFEKNPIDFLEAKGYKEVKKDLIIKLPKYSLFELENGRKRMLASAGELQKGNELALPSKYVNFLYLASHYEKLKGSPEDNEQKQLFVEQHKHYLDEIIEQISEFSKRVILADANLDKVLSAYNKHRDKPIREQAENIIHLFTLTNLGAPAAFKYFDTTIDRKRYTSTKEVLDATLIHQSITGLYETRIDLSQLGGDGGPAPAPAPAPGGTLQLDDEYRLYSPLVKPDQNIQFWLEQFPQAWAETAGMGLAKQVPPQVIQLKASATPVSVRQYPLSKEAQEGIRPHVQRLIQQGILVPVQSPWNTPLLPVRKPGTNDYRPVQDLREVNKRVQDIHPTVPNPYNLLCALPPQRSWYTVLDLKDAFFCLRLHPTSQPLFAFEWRDPGTGRTGQLTWTRLPQGFKNSPTIFDEALHRDLANFRIQHPQVTLLQYVDDLLLAGATKQDCLEGTKALLLELSDLGYRASAKKAQICRREVTYLGYSLRDGQRWLTEARKKTVVQIPAPTTAKQVREFLGTAGFCRLWIPGFATLAAPLYPLTKEKGEFSWAPEHQKAFDAIKKALLSAPALALPDVTKPFTLYVDERKGVARGVLTQTLGPWRRPVAYLSKKLDPVASGWPVCLKAIAAVAILVKDADKLTLGQNITVIAPHALENIVRQPPDRWMTNARMTHYQSLLLTERVTFAPPAALNPATLLPEETDEPVTHDCHQLLIEETGVRKDLTDIPLTGEVLTWFTDGSSYVVEGKRMAGAAVVDGTRTIWASSLPEGTSAQKAELMALTQALRLAEGKSINIYTDSRYAFATAHVHGAIYKQRGLLTSAGREIKNKEEILSLLEALHLPKRLAIIHCPGHQKAKDPISRGNQMADRVAKQAAQGVNLLAGKRTADGSEFEKRTADGSEFESPKKKAKVE

SEQ ID NO: 6527 - protein, 2086 aa, synthetic construct; identical to SEQ ID NO: 6525

SEQ ID NO: 6528 - protein, 2088 aa, synthetic construct; identical to SEQ ID NO: 6526

SEQ ID NO: 6529 - protein, 2085 aa, synthetic construct
MPAAKRVKLDGGDKKYSIGLDIGTNSVGWAVITDEYKVPSKKFKVLGNTDRHSIKKNLIGALLFDSGETAEATRLKRTARRRYTRRKNRICYLQEIFSNEMAKVDDSFFHRLEESFLVEEDKKHERHPIFGNIVDEVAYHEKYPTIYHLRKKLVDSTDKADLRLIYLALAHMIKFRGHFLIEGDLNPDNSDVDKLFIQLVQTYNQLFEENPINASGVDAKAILSARLSKSRRLENLIAQLPGEKKNGLFGNLIALSLGLTPNFKSNFDLAEDAKLQLSKDTYDDDLDNLLAQIGDQYADLFLAAKNLSDAILLSDILRVNTEITKAPLSASMIKRYDEHHQDLTLLKALVRQQLPEKYKEIFFDQSKNGYAGYIDGGASQEEFYKFIKPILEKMDGTEELLVKLNREDLLRKQRTFDNGSIPHQIHLGELHAILRRQEDFYPFLKDNREKIEKILTFRIPYYVGPLARGNSRFAWMTRKSEETITPWNFEEVVDKGASAQSFIERMTNFDKNLPNEKVLPKHSLLYEYFTVYNELTKVKYVTEGMRKPAFLSGEQKKAIVDLLFKTNRKVTVKQLKEDYFKKIECFDSVEISGVEDRFNASLGTYHDLLKIIKDKDFLDNEENEDILEDIVLTLTLFEDREMIEERLKTYAHLFDDKVMKQLKRRRYTGWGRLSRKLINGIRDKQSGKTILDFLKSDGFANRNFMQLIHDDSLTFKEDIQKAQVSGQGDSLHEHIANLAGSPAIKKGILQTVKVVDELVKVMGRHKPENIVIEMARENQTTQKGQKNSRERMKRIEEGIKELGSQILKEHPVENTQLQNEKLYLYYLQNGRDMYVDQELDINRLSDYDVDHIVPQSFLKDDSIDNKVLTRSDKARGKSDNVPSEEVVKKMKNYWRQLLNAKLITQRKFDNLTKAERGGLSELDKAGFIKRQLVETRQITKHVAQILDSRMNTKYDENDKLIREVKVITLKSKLVSDFRKDFQFYKVREINNYHHAHDAYLNAVVGTALIKKYPKLESEFVYGDYKVYDVRKMIAKSEQEIGKATAKYFFYSNIMNFFKTEITLANGEIRKRPLIETNGETGEIVWDKGRDFATVRKVLSMPQVNIVKKTEVQTGGFSKESILPKRNSDKLIARKKDWDPKKYGGFDSPTVAYSVLVVAKVEKGKSKKLKSVKELLGITIMERSSFEKNPIDFLEAKGYKEVKKDLIIKLPKYSLFELENGRKRMLASAGELQKGNELALPSKYVNFLYLASHYEKLKGSPEDNEQKQLFVEQHKHYLDEIIEQISEFSKRVILADANLDKVLSAYNKHRDKPIREQAENIIHLFTLTNLGAPAAFKYFDTTIDRKRYTSTKEVLDATLIHQSITGLYETRIDLSQLGGDGGPAPAPAPAPGGIPWLMKKPLQLTTLVPLQEYEERLLKQTMLTGSYKEKLQSLFLKYDALWQHWENQVGHRRIKPHHIATGTVNPRPQKQYPINPKAKASIQTVINDLLKQGVLIQQNSIMNTPVYPVPKPDGKWRMVLDYREVNKTIPLIAAQNQHSAGILSSIFRGKYKTTLDLSNGFWAHSITPESYWLTAFTWLGQQYCWTRLPQGFLNSPALFNADVVDLLKEVPNVQVYVDDIYISHDDPREHLEQLEKVFSLLLNAGYVVSLKKSEIAQHEVEFLGFNITKEGRGLTETFKQKLLNITPPRDLKQLQSILGKLNFARNFIPNFSELVKPLYNIIATAPGKYITWTTDNSQQLQNIISMLNSAENLEERNPEVRLIMKVNTSPSAGYIRFYNEFAKRPIMYLNYVYTKAEVKFTNTEKLLTTIHKGLIKALDLGMGQEILVYSPIVSMTKIQKTPLPERKALPIRWITWMSYLEDPRIQFHYDKTLPELQQVPTVTDDIIAKIKHPSEFSMVFYTDGSAIKHPNVNKSHNAGMGIAQVQFKPEFTVINTWSIPLGDHTAQLAEVAAVEFACKKALKIDGPVLIVTDSFYVAESVNKELPYWQSNGFFNNKKKPLKHVSKWKSIADCIQLKPDIIIIHEKGHQPTASTFHTEGNNLADKLATQGSYVVNAGKRTADGSEFEKRTADGSEFESPKKKAKVE

SEQ ID NO: 6530 - protein, 2098 aa, synthetic construct
MPAAKRVKLDGGDKKYSIGLDIGTNSVGWAVITDEYKVPSKKFKVLGNTDRHSIKKNLIGALLFDSGETAEATRLKRTARRRYTRRKNRICYLQEIFSNEMAKVDDSFFHRLEESFLVEEDKKHERHPIFGNIVDEVAYHEKYPTIYHLRKKLVDSTDKADLRLIYLALAHMIKFRGHFLIEGDLNPDNSDVDKLFIQLVQTYNQLFEENPINASGVDAKAILSARLSKSRRLENLIAQLPGEKKNGLFGNLIALSLGLTPNFKSNFDLAEDAKLQLSKDTYDDDLDNLLAQIGDQYADLFLAAKNLSDAILLSDILRVNTEITKAPLSASMIKRYDEHHQDLTLLKALVRQQLPEKYKEIFFDQSKNGYAGYIDGGASQEEFYKFIKPILEKMDGTEELLVKLNREDLLRKQRTFDNGSIPHQIHLGELHAILRRQEDFYPFLKDNREKIEKILTFRIPYYVGPLARGNSRFAWMTRKSEETITPWNFEEVVDKGASAQSFIERMTNFDKNLPNEKVLPKHSLLYEYFTVYNELTKVKYVTEGMRKPAFLSGEQKKAIVDLLFKTNRKVTVKQLKEDYFKKIECFDSVEISGVEDRFNASLGTYHDLLKIIKDKDFLDNEENEDILEDIVLTLTLFEDREMIEERLKTYAHLFDDKVMKQLKRRRYTGWGRLSRKLINGIRDKQSGKTILDFLKSDGFANRNFMQLIHDDSLTFKEDIQKAQVSGQGDSLHEHIANLAGSPAIKKGILQTVKVVDELVKVMGRHKPENIVIEMARENQTTQKGQKNSRERMKRIEEGIKELGSQILKEHPVENTQLQNEKLYLYYLQNGRDMYVDQELDINRLSDYDVDHIVPQSFLKDDSIDNKVLTRSDKARGKSDNVPSEEVVKKMKNYWRQLLNAKLITQRKFDNLTKAERGGLSELDKAGFIKRQLVETRQITKHVAQILDSRMNTKYDENDKLIREVKVITLKSKLVSDFRKDFQFYKVREINNYHHAHDAYLNAVVGTALIKKYPKLESEFVYGDYKVYDVRKMIAKSEQEIGKATAKYFFYSNIMNFFKTEITLANGEIRKRPLIETNGETGEIVWDKGRDFATVRKVLSMPQVNIVKKTEVQTGGFSKESILPKRNSDKLIARKKDWDPKKYGGFDSPTVAYSVLVVAKVEKGKSKKLKSVKELLGITIMERSSFEKNPIDFLEAKGYKEVKKDLIIKLPKYSLFELENGRKRMLASAGELQKGNELALPSKYVNFLYLASHYEKLKGSPEDNEQKQLFVEQHKHYLDEIIEQISEFSKRVILADANLDKVLSAYNKHRDKPIREQAENIIHLFTLTNLGAPAAFKYFDTTIDRKRYTSTKEVLDATLIHQSITGLYETRIDLSQLGGDGGPAPAPAPAPAPGGTAPLEEEYRLFLEAPIQNVTLLEQWKREIPKVWAEINPPGLASTQAPIHVQLLSTALPVRVRQYPITLEAKRSLRETIRKFRAAGILRPVHSPWNTPLLPVRKSGTSEYRMVQDLREVNKRVETIHPTVPNPYTLLSLLPPDRIWYSVLDLKDAFFCIPLAPESQLIFAFEWADAEEGESGQLTWTRLPQGFKNSPTLFNEALNRDLQGFRLDHPSVSLLQYVDDLLIAADTQAACLSATRDLLMTLAELGYRVSGKKAQLCQEEVTYLGFKIHKGSRSLSNSRTQAILQIPVPKTKRQVREFLGTIGYCRLWIPGFAELAQPLYAATRPGNDPLVWGEKEEEAFQSLKLALTQPPALALPSLDKPFQLFVEETSGAAKGVLTQALGPWKRPVAYLSKRLDPVAAGWPRCLRAIAAAALLTREASKLTFGQDIEITSSHNLESLLRSPPDKWLTNARITQYQVLLLDPPRVRFKQTAALNPATLLPETDDTLPIHHCLDTLDSLTSTRPDLTDQPLAQAEATLFTDGSSYIRDGKRYAGAAVVTLDSVIWAEPLPIGTSAQKAELIALTKALEWSKDKSVNIYTDSRYAFATLHVHGMIYRERGWLTAGGKAIKNAPEILALLTAVWLPKRVAVMHCKGHQKDDAPTSTGNRRADEVAREVAIRPLSTQATISAGKRTADGSEFEKRTADGSEFESPKKKAKVE

SEQ ID NO: 6531 - protein, 2098 aa, synthetic construct
MPAAKRVKLDGGDKKYSIGLDIGTNSVGWAVITDEYKVPSKKFKVLGNTDRHSIKKNLIGALLFDSGETAEATRLKRTARRRYTRRKNRICYLQEIFSNEMAKVDDSFFHRLEESFLVEEDKKHERHPIFGNIVDEVAYHEKYPTIYHLRKKLVDSTDKADLRLIYLALAHMIKFRGHFLIEGDLNPDNSDVDKLFIQLVQTYNQLFEENPINASGVDAKAILSARLSKSRRLENLIAQLPGEKKNGLFGNLIALSLGLTPNFKSNFDLAEDAKLQLSKDTYDDDLDNLLAQIGDQYADLFLAAKNLSDAILLSDILRVNTEITKAPLSASMIKRYDEHHQDLTLLKALVRQQLPEKYKEIFFDQSKNGYAGYIDGGASQEEFYKFIKPILEKMDGTEELLVKLNREDLLRKQRTFDNGSIPHQIHLGELHAILRRQEDFYPFLKDNREKIEKILTFRIPYYVGPLARGNSRFAWMTRKSEETITPWNFEEVVDKGASAQSFIERMTNFDKNLPNEKVLPKHSLLYEYFTVYNELTKVKYVTEGMRKPAFLSGEQKKAIVDLLFKTNRKVTVKQLKEDYFKKIECFDSVEISGVEDRFNASLGTYHDLLKIIKDKDFLDNEENEDILEDIVLTLTLFEDREMIEERLKTYAHLFDDKVMKQLKRRRYTGWGRLSRKLINGIRDKQSGKTILDFLKSDGFANRNFMQLIHDDSLTFKEDIQKAQVSGQGDSLHEHIANLAGSPAIKKGILQTVKVVDELVKVMGRHKPENIVIEMARENQTTQKGQKNSRERMKRIEEGIKELGSQILKEHPVENTQLQNEKLYLYYLQNGRDMYVDQELDINRLSDYDVDHIVPQSFLKDDSIDNKVLTRSDKARGKSDNVPSEEVVKKMKNYWRQLLNAKLITQRKFDNLTKAERGGLSELDKAGFIKRQLVETRQITKHVAQILDSRMNTKYDENDKLIREVKVITLKSKLVSDFRKDFQFYKVREINNYHHAHDAYLNAVVGTALIKKYPKLESEFVYGDYKVYDVRKMIAKSEQEIGKATAKYFFYSNIMNFFKTEITLANGEIRKRPLIETNGETGEIVWDKGRDFATVRKVLSMPQVNIVKKTEVQTGGFSKESILPKRNSDKLIARKKDWDPKKYGGFDSPTVAYSVLVVAKVEKGKSKKLKSVKELLGITIMERSSFEKNPIDFLEAKGYKEVKKDLIIKLPKYSLFELENGRKRMLASAGELQKGNELALPSKYVNFLYLASHYEKLKGSPEDNEQKQLFVEQHKHYLDEIIEQISEFSKRVILADANLDKVLSAYNKHRDKPIREQAENIIHLFTLTNLGAPAAFKYFDTTIDRKRYTSTKEVLDATLIHQSITGLYETRIDLSQLGGDGGPAPAPAPAPAPGGTAPLEEEYRLFLEAPIQNVTLLEQWKREIPKVWAEINPPGLASTQAPIHVQLLSTALPVRVRQYPITLEAKRSLRETIRKFRAAGILRPVHSPWNTPLLPVRKSGTSEYRMVQDLREVNKRVETIHPTVPNPYTLLSLLPPDRIWYSVLDLKDAFFCIPLAPESQLIFAFEWADAEEGESGQLTWTRLPQGFKNSPTLFNEALNRDLQGFRLDHPSVSLLQYVDDLLIAADTQAACLSATRDLLMTLAELGYRVSGKKAQLCQEEVTYLGFKIHKGSRSLSNSRTQAILQIPVPKTKRQVREFLGKIGYCRLFIPGFAELAQPLYAATRPGNDPLVWGEKEEEAFQSLKLALTQPPALALPSLDKPFQLFVEETSGAAKGVLTQALGPWKRPVAYLSKRLDPVAAGWPRCLRAIAAAALLTREASKLTFGQDIEITSSHNLESLLRSPPDKWLTNARITQYQVLLLDPPRVRFKQTAALNPATLLPETDDTLPIHHCLDTLDSLTSTRPDLTDQPLAQAEATLFTDGSSYIRDGKRYAGAAVVTLDSVIWAEPLPIGTSAQKAELIALTKALEWSKDKSVNIYTDSRYAFATLHVHGMIYRERGWLTAGGKAIKNAPEILALLTAVWLPKRVAVMHCKGHQKDDAPTSTGNRRADEVAREVAIRPLSTQATISAGKRTADGSEFEKRTADGSEFESPKKKAKVE

SEQ ID NO: 6532 - protein, 2102 aa, synthetic construct
MPAAKRVKLDGGDKKYSIGLDIGTNSVGWAVITDEYKVPSKKFKVLGNTDRHSIKKNLIGALLFDSGETAEATRLKRTARRRYTRRKNRICYLQEIFSNEMAKVDDSFFHRLEESFLVEEDKKHERHPIFGNIVDEVAYHEKYPTIYHLRKKLVDSTDKADLRLIYLALAHMIKFRGHFLIEGDLNPDNSDVDKLFIQLVQTYNQLFEENPINASGVDAKAILSARLSKSRRLENLIAQLPGEKKNGLFGNLIALSLGLTPNFKSNFDLAEDAKLQLSKDTYDDDLDNLLAQIGDQYADLFLAAKNLSDAILLSDILRVNTEITKAPLSASMIKRYDEHHQDLTLLKALVRQQLPEKYKEIFFDQSKNGYAGYIDGGASQEEFYKFIKPILEKMDGTEELLVKLNREDLLRKQRTFDNGSIPHQIHLGELHAILRRQEDFYPFLKDNREKIEKILTFRIPYYVGPLARGNSRFAWMTRKSEETITPWNFEEVVDKGASAQSFIERMTNFDKNLPNEKVLPKHSLLYEYFTVYNELTKVKYVTEGMRKPAFLSGEQKKAIVDLLFKTNRKVTVKQLKEDYFKKIECFDSVEISGVEDRFNASLGTYHDLLKIIKDKDFLDNEENEDILEDIVLTLTLFEDREMIEERLKTYAHLFDDKVMKQLKRRRYTGWGRLSRKLINGIRDKQSGKTILDFLKSDGFANRNFMQLIHDDSLTFKEDIQKAQVSGQGDSLHEHIANLAGSPAIKKGILQTVKVVDELVKVMGRHKPENIVIEMARENQTTQKGQKNSRERMKRIEEGIKELGSQILKEHPVENTQLQNEKLYLYYLQNGRDMYVDQELDINRLSDYDVDHIVPQSFLKDDSIDNKVLTRSDKARGKSDNVPSEEVVKKMKNYWRQLLNAKLITQRKFDNLTKAERGGLSELDKAGFIKRQLVETRQITKHVAQILDSRMNTKYDENDKLIREVKVITLKSKLVSDFRKDFQFYKVREINNYHHAHDAYLNAVVGTALIKKYPKLESEFVYGDYKVYDVRKMIAKSEQEIGKATAKYFFYSNIMNFFKTEITLANGEIRKRPLIETNGETGEIVWDKGRDFATVRKVLSMPQVNIVKKTEVQTGGFSKESILPKRNSDKLIARKKDWDPKKYGGFDSPTVAYSVLVVAKVEKGKSKKLKSVKELLGITIMERSSFEKNPIDFLEAKGYKEVKKDLIIKLPKYSLFELENGRKRMLASAGELQKGNELALPSKYVNFLYLASHYEKLKGSPEDNEQKQLFVEQHKHYLDEIIEQISEFSKRVILADANLDKVLSAYNKHRDKPIREQAENIIHLFTLTNLGAPAAFKYFDTTIDRKRYTSTKEVLDATLIHQSITGLYETRIDLSQLGGDGGPAPAPAPAPAPGGTVSLQDEHRLFDIPVTTSLPDVWLQDFPQAWAETGGLGRAKCQAPIIIDLKPTAVPVSIKQYPMSLEAHMGIRQHIIKFLELGVLRPCRSPWNTPLLPVKKPGTQDYRPVQDLREINKRTVDIHPTVPNPYNLLSTLKPDYSWYTVLDLKDAFFCLPLAPQSQELFAFEWKDPERGISGQLTWTRLPQGFKNSPTLFNEALHRDLTDFRTQHPEVTLLQYVDDLLLAAPTKKACTQGTRHLLQELGEKGYRASAKKAQICQTKVTYLGYILSEGKRWLTPGRIETVARIPPPRNPREVREFLGTAGFCRLWIPGFAELAAPLYALTKPSTPFTWQTEHQLAFEALKKALLSAPALGLPDTSKPFTLFLDERQGIAKGVLTQKLGPWKRPVAYLSKKLDPVAAGWPPCLRIMAATAMLVKDSAKLTLGQPLTVITPHTLEAIVRQPPDRWITNARLTHYQALLLDTDRVQFGPPVTLNPATLLPVPENQPSPHDCRQVLAETHGTREDLKDQELPDADHTWYTDGSSYLDSGTRRAGAAVVDGHNTIWAQSLPPGTSAQKAELIALTKALELSKGKKANIYTDSRYAFATAHTHGSIYERRGWLTSEGKEIKNKAEIIALLKALFLPQEVAIIHCPGHQKGQDPVAVGNRQADRVARQAAMAEVLTLATEPDNTSHITAGKRTADGSEFEKRTADGSEFESPKKKAKVE

SEQ ID NO: 6533 - protein, 2173 aa, synthetic construct
MPAAKRVKLDGGDKKYSIGLDIGTNSVGWAVITDEYKVPSKKFKVLGNTDRHSIKKNLIGALLFDSGETAEATRLKRTARRRYTRRKNRICYLQEIFSNEMAKVDDSFFHRLEESFLVEEDKKHERHPIFGNIVDEVAYHEKYPTIYHLRKKLVDSTDKADLRLIYLALAHMIKFRGHFLIEGDLNPDNSDVDKLFIQLVQTYNQLFEENPINASGVDAKAILSARLSKSRRLENLIAQLPGEKKNGLFGNLIALSLGLTPNFKSNFDLAEDAKLQLSKDTYDDDLDNLLAQIGDQYADLFLAAKNLSDAILLSDILRVNTEITKAPLSASMIKRYDEHHQDLTLLKALVRQQLPEKYKEIFFDQSKNGYAGYIDGGASQEEFYKFIKPILEKMDGTEELLVKLNREDLLRKQRTFDNGSIPHQIHLGELHAILRRQEDFYPFLKDNREKIEKILTFRIPYYVGPLARGNSRFAWMTRKSEETITPWNFEEVVDKGASAQSFIERMTNFDKNLPNEKVLPKHSLLYEYFTVYNELTKVKYVTEGMRKPAFLSGEQKKAIVDLLFKTNRKVTVKQLKEDYFKKIECFDSVEISGVEDRFNASLGTYHDLLKIIKDKDFLDNEENEDILEDIVLTLTLFEDREMIEERLKTYAHLFDDKVMKQLKRRRYTGWGRLSRKLINGIRDKQSGKTILDFLKSDGFANRNFMQLIHDDSLTFKEDIQKAQVSGQGDSLHEHIANLAGSPAIKKGILQTVKVVDELVKVMGRHKPENIVIEMARENQTTQKGQKNSRERMKRIEEGIKELGSQILKEHPVENTQLQNEKLYLYYLQNGRDMYVDQELDINRLSDYDVDHIVPQSFLKDDSIDNKVLTRSDKARGKSDNVPSEEVVKKMKNYWRQLLNAKLITQRKFDNLTKAERGGLSELDKAGFIKRQLVETRQITKHVAQILDSRMNTKYDENDKLIREVKVITLKSKLVSDFRKDFQFYKVREINNYHHAHDAYLNAVVGTALIKKYPKLESEFVYGDYKVYDVRKMIAKSEQEIGKATAKYFFYSNIMNFFKTEITLANGEIRKRPLIETNGETGEIVWDKGRDFATVRKVLSMPQVNIVKKTEVQTGGFSKESILPKRNSDKLIARKKDWDPKKYGGFDSPTVAYSVLVVAKVEKGKSKKLKSVKELLGITIMERSSFEKNPIDFLEAKGYKEVKKDLIIKLPKYSLFELENGRKRMLASAGELQKGNELALPSKYVNFLYLASHYEKLKGSPEDNEQKQLFVEQHKHYLDEIIEQISEFSKRVILADANLDKVLSAYNKHRDKPIREQAENIIHLFTLTNLGAPAAFKYFDTTIDRKRYTSTKEVLDATLIHQSITGLYETRIDLSQLGGDGGPAPAPAPAPAPGGMDLLKPLTVERKGVKIKGYWNSQADITCVPKDLLQGEEPVRQQNVTTIHGTQEGDVYYVNLKIDGRRINTEVIGTTLDYAIITPGDVPWILKKPLELTIKLDLEEQQGTLLNNSILSKKGKEELKQLFEKYSALWQSWENQVGHRRIRPHKIATGTVKPTPQKQYHINPKAKPDIQIVINDLLKQGVLIQKESTMNTPVYPVPKPNGRWRMVLDYRAVNKVTPLIAVQNQHSYGILGSLFKGRYKTTIDLSNGFWAHPIVPEDYWITAFTWQGKQYCWTVLPQGFLNSPGLFTGDVVDLLQGIPNVEVYVDDVYISHDSEKEHLEYLDILFNRLKEAGYIISLKKSNIANSIVDFLGFQITNEGRGLTDTFKEKLENITAPTTLKQLQSILGLLNFARNFIPDFTELIAPLYALIPKSTKNYVPWQIEHSTTLETLITKLNGAEYLQGRKGDKTLIMKVNASYTTGYIRYYNEGEKKPISYVSIVFSKTELKFTELEKLLTTVHKGLLKALDLSMGQNIHVYSPIVSMQNIQKTPQTAKKALASRWLSWLSYLEDPRIRFFYDPQMPALKDLPAVDTGKDNKKHPSNFQHIFYTDGSAITSPTKEGHLNAGMGIVYFINKDGNLQKQQEWSISLGNHTAQFAEIAAFEFALKKCLPLGGNILVVTDSNYVAKAYNEELDVWASNGFVNNRKKPLKHISKWKSVADLKRLRPDVVVTHEPGHQKLDSSPHAYGNNLADQLATQASFKVHAGKRTADGSEFEKRTADGSEFESPKKKAKVE

SEQ ID NO: 6534 - protein, 2173 aa, synthetic construct
MPAAKRVKLDGGDKKYSIGLDIGTNSVGWAVITDEYKVPSKKFKVLGNTDRHSIKKNLIGALLFDSGETAEATRLKRTARRRYTRRKNRICYLQEIFSNEMAKVDDSFFHRLEESFLVEEDKKHERHPIFGNIVDEVAYHEKYPTIYHLRKKLVDSTDKADLRLIYLALAHMIKFRGHFLIEGDLNPDNSDVDKLFIQLVQTYNQLFEENPINASGVDAKAILSARLSKSRRLENLIAQLPGEKKNGLFGNLIALSLGLTPNFKSNFDLAEDAKLQLSKDTYDDDLDNLLAQIGDQYADLFLAAKNLSDAILLSDILRVNTEITKAPLSASMIKRYDEHHQDLTLLKALVRQQLPEKYKEIFFDQSKNGYAGYIDGGASQEEFYKFIKPILEKMDGTEELLVKLNREDLLRKQRTFDNGSIPHQIHLGELHAILRRQEDFYPFLKDNREKIEKILTFRIPYYVGPLARGNSRFAWMTRKSEETITPWNFEEVVDKGASAQSFIERMTNFDKNLPNEKVLPKHSLLYEYFTVYNELTKVKYVTEGMRKPAFLSGEQKKAIVDLLFKTNRKVTVKQLKEDYFKKIECFDSVEISGVEDRFNASLGTYHDLLKIIKDKDFLDNEENEDILEDIVLTLTLFEDREMIEERLKTYAHLFDDKVMKQLKRRRYTGWGRLSRKLINGIRDKQSGKTILDFLKSDGFANRNFMQLIHDDSLTFKEDIQKAQVSGQGDSLHEHIANLAGSPAIKKGILQTVKVVDELVKVMGRHKPENIVIEMARENQTTQKGQKNSRERMKRIEEGIKELGSQILKEHPVENTQLQNEKLYLYYLQNGRDMYVDQELDINRLSDYDVDHIVPQSFLKDDSIDNKVLTRSDKARGKSDNVPSEEVVKKMKNYWRQLLNAKLITQRKFDNLTKAERGGLSELDKAGFIKRQLVETRQITKHVAQILDSRMNTKYDENDKLIREVKVITLKSKLVSDFRKDFQFYKVREINNYHHAHDAYLNAVVGTALIKKYPKLESEFVYGDYKVYDVRKMIAKSEQEIGKATAKYFFYSNIMNFFKTEITLANGEIRKRPLIETNGETGEIVWDKGRDFATVRKVLSMPQVNIVKKTEVQTGGFSKESILPKRNSDKLIARKKDWDPKKYGGFDSPTVAYSVLVVAKVEKGKSKKLKSVKELLGITIMERSSFEKNPIDFLEAKGYKEVKKDLIIKLPKYSLFELENGRKRMLASAGELQKGNELALPSKYVNFLYLASHYEKLKGSPEDNEQKQLFVEQHKHYLDEIIEQISEFSKRVILADANLDKVLSAYNKHRDKPIREQAENIIHLFTLTNLGAPAAFKYFDTTIDRKRYTSTKEVLDATLIHQSITGLYETRIDLSQLGGDGGPAPAPAPAPAPGGMDLLKPLTVERKGVKIKGYWNSQADITCVPKDLLQGEEPVRQQNVTTIHGTQEGDVYYVNLKIDGRRINTEVIGTTLDYAIITPGDVPWILKKPLELTIKLDLEEQQGTLLNNSILSKKGKEELKQLFEKYSALWQSWENQVGHRRIRPHKIATGTVKPTPQKQYHINPKAKPDIQIVINDLLKQGVLIQKESTMNTPVYPVPKPNGRWRMVLDYRAVNKVTPLIAVQNQHSYGILGSLFKGRYKTTIDLSNGFWAHPIVPEDYWITAFTWQGKQYCWTVLPQGFLNSPGLFNGDVVDLLQGIPNVEVYVDDVYISHDSEKEHLEYLDILFNRLKEAGYIISLKKSNIANSIVDFLGFQITNEGRGLTDTFKEKLENITAPTTLKQLQSILGLLNFARNFIPDFTELIAPLYALIPKSPKNYVPWQIEHSTTLETLITKLNGAEYLQGRKGDKTLIMKVNASYTTGYIRYYNEGEKKPISYVSIVFSKTELKFTELEKLLTTVHKGLLKALDLSMGQNIHVYSPIVSMQNIQKTPQTAKKALASRWLSWLSYLEDPRIRFFYDPQMPALKDLPAVDTGKDNKKHPSNFQHIFYTDGSAITSPTKEGHLNAGMGIVYFINKDGNLQKQQEWSISLGNHTAQFAEIAAFEFALKKCLPLGGNILVVTDSNYVAKAYNEELDVWASNGFVNNRKKPLKHISKWKSVADLKRLRPDVVVTHEPGHQKLDSSPHAYGNNLADQLATQASFKVHAGKRTADGSEFEKRTADGSEFESPKKKAKVE

SEQ ID NO: 6535 - protein, 2095 aa, synthetic construct
MPAAKRVKLDGGDKKYSIGLDIGTNSVGWAVITDEYKVPSKKFKVLGNTDRHSIKKNLIGALLFDSGETAEATRLKRTARRRYTRRKNRICYLQEIFSNEMAKVDDSFFHRLEESFLVEEDKKHERHPIFGNIVDEVAYHEKYPTIYHLRKKLVDSTDKADLRLIYLALAHMIKFRGHFLIEGDLNPDNSDVDKLFIQLVQTYNQLFEENPINASGVDAKAILSARLSKSRRLENLIAQLPGEKKNGLFGNLIALSLGLTPNFKSNFDLAEDAKLQLSKDTYDDDLDNLLAQIGDQYADLFLAAKNLSDAILLSDILRVNTEITKAPLSASMIKRYDEHHQDLTLLKALVRQQLPEKYKEIFFDQSKNGYAGYIDGGASQEEFYKFIKPILEKMDGTEELLVKLNREDLLRKQRTFDNGSIPHQIHLGELHAILRRQEDFYPFLKDNREKIEKILTFRIPYYVGPLARGNSRFAWMTRKSEETITPWNFEEVVDKGASAQSFIERMTNFDKNLPNEKVLPKHSLLYEYFTVYNELTKVKYVTEGMRKPAFLSGEQKKAIVDLLFKTNRKVTVKQLKEDYFKKIECFDSVEISGVEDRFNASLGTYHDLLKIIKDKDFLDNEENEDILEDIVLTLTLFEDREMIEERLKTYAHLFDDKVMKQLKRRRYTGWGRLSRKLINGIRDKQSGKTILDFLKSDGFANRNFMQLIHDDSLTFKEDIQKAQVSGQGDSLHEHIANLAGSPAIKKGILQTVKVVDELVKVMGRHKPENIVIEMARENQTTQKGQKNSRERMKRIEEGIKELGSQILKEHPVENTQLQNEKLYLYYLQNGRDMYVDQELDINRLSDYDVDHIVPQSFLKDDSIDNKVLTRSDKARGKSDNVPSEEVVKKMKNYWRQLLNAKLITQRKFDNLTKAERGGLSELDKAGFIKRQLVETRQITKHVAQILDSRMNTKYDENDKLIREVKVITLKSKLVSDFRKDFQFYKVREINNYHHAHDAYLNAVVGTALIKKYPKLESEFVYGDYKVYDVRKMIAKSEQEIGKATAKYFFYSNIMNFFKTEITLANGEIRKRPLIETNGETGEIVWDKGRDFATVRKVLSMPQVNIVKKTEVQTGGFSKESILPKRNSDKLIARKKDWDPKKYGGFDSPTVAYSVLVVAKVEKGKSKKLKSVKELLGITIMERSSFEKNPIDFLEAKGYKEVKKDLIIKLPKYSLFELENGRKRMLASAGELQKGNELALPSKYVNFLYLASHYEKLKGSPEDNEQKQLFVEQHKHYLDEIIEQISEFSKRVILADANLDKVLSAYNKHRDKPIREQAENIIHLFTLTNLGAPAAFKYFDTTIDRKRYTSTKEVLDATLIHQSITGLYETRIDLSQLGGDGGPAPAPAPAPAPGGTLQLEEEYRLFEPESTQKQEMDIWLKNFPQAWAETGGMGTAHCQAPVLIQLKATATPISIRQYPMPHEAYQGIKPHIRRMLDQGILKPCQSPWNTPLLPVKKPGTEDYRPVQDLREVNKRVEDIHPTVPNPYNLLSTLPPSHPWYTVLDLKDAFFCLRLHSESQLLFAFEWRDPEIGLSGQLTWTRLPQGFKNSPTLFDEALHSDLADFRVRYPALVLLQYVDDLLLAAATRTECLEGTKALLETLGNKGYRASAKKAQICLQEVTYLGYSLKDGQRWLTKARKEAILSIPVPKNSRQVREFLGTAGYCRLWIPGFAELAAPLYPLTRPGTLFQWGTEQQLAFEDIKKALLSSPALGLPDITKPFELFIDENSGFAKGVLVQKLGPWKRPVAYLSKKLDTVASGWPPCLRMVAAIAILVKDAGKLTLGQPLTILTSHPVEALVRQPPNKWLSNARMTHYQAMLLDAERVHFGPTVSLNPATLLPLPSGGNHHDCLQILAETHGTRPDLTDQPLPDADLTWYTDGSSFIRNGEREAGAAVTTESEVIWAAPLPPGTSAQRAELIALTQALKMAEGKKLTVYTDSRYAFATTHVHGEIYRRRGLLTSEGKEIKNKNEILALLEALFLPKRLSIIHCPGHQKGDSPQAKGNRLADDTAKKAATETHSSLTVLPAGKRTADGSEFEKRTADGSEFESPKKKAKVE

SEQ ID NO: 6536 - protein, 2176 aa, synthetic construct
MPAAKRVKLDGGDKKYSIGLDIGTNSVGWAVITDEYKVPSKKFKVLGNTDRHSIKKNLIGALLFDSGETAEATRLKRTARRRYTRRKNRICYLQEIFSNEMAKVDDSFFHRLEESFLVEEDKKHERHPIFGNIVDEVAYHEKYPTIYHLRKKLVDSTDKADLRLIYLALAHMIKFRGHFLIEGDLNPDNSDVDKLFIQLVQTYNQLFEENPINASGVDAKAILSARLSKSRRLENLIAQLPGEKKNGLFGNLIALSLGLTPNFKSNFDLAEDAKLQLSKDTYDDDLDNLLAQIGDQYADLFLAAKNLSDAILLSDILRVNTEITKAPLSASMIKRYDEHHQDLTLLKALVRQQLPEKYKEIFFDQSKNGYAGYIDGGASQEEFYKFIKPILEKMDGTEELLVKLNREDLLRKQRTFDNGSIPHQIHLGELHAILRRQEDFYPFLKDNREKIEKILTFRIPYYVGPLARGNSRFAWMTRKSEETITPWNFEEVVDKGASAQSFIERMTNFDKNLPNEKVLPKHSLLYEYFTVYNELTKVKYVTEGMRKPAFLSGEQKKAIVDLLFKTNRKVTVKQLKEDYFKKIECFDSVEISGVEDRFNASLGTYHDLLKIIKDKDFLDNEENEDILEDIVLTLTLFEDREMIEERLKTYAHLFDDKVMKQLKRRRYTGWGRLSRKLINGIRDKQSGKTILDFLKSDGFANRNFMQLIHDDSLTFKEDIQKAQVSGQGDSLHEHIANLAGSPAIKKGILQTVKVVDELVKVMGRHKPENIVIEMARENQTTQKGQKNSRERMKRIEEGIKELGSQILKEHPVENTQLQNEKLYLYYLQNGRDMYVDQELDINRLSDYDVDHIVPQSFLKDDSIDNKVLTRSDKARGKSDNVPSEEVVKKMKNYWRQLLNAKLITQRKFDNLTKAERGGLSELDKAGFIKRQLVETRQITKHVAQILDSRMNTKYDENDKLIREVKVITLKSKLVSDFRKDFQFYKVREINNYHHAHDAYLNAVVGTALIKKYPKLESEFVYGDYKVYDVRKMIAKSEQEIGKATAKYFFYSNIMNFFKTEITLANGEIRKRPLIETNGETGEIVWDKGRDFATVRKVLSMPQVNIVKKTEVQTGGFSKESILPKRNSDKLIARKKDWDPKKYGGFDSPTVAYSVLVVAKVEKGKSKKLKSVKELLGITIMERSSFEKNPIDFLEAKGYKEVKKDLIIKLPKYSLFELENGRKRMLASAGELQKGNELALPSKYVNFLYLASHYEKLKGSPEDNEQKQLFVEQHKHYLDEIIEQISEFSKRVILADANLDKVLSAYNKHRDKPIREQAENIIHLFTLTNLGAPAAFKYFDTTIDRKRYTSTKEVLDATLIHQSITGLYETRIDLSQLGGDGGPAPAPAPAPAPGGMNPLQLLQPLPAEIKGTKLLAHWNSGATITCIPESFLEDEQPIKKTLIKTIHGEKQQNVYYVTFKVKGRKVEAEVIASPYEYILLSPTDVPWLTQQPLQLTILVPLQEYQEKILSKTALPEDQKQQLKTLFVKYDNLWQHWENQVGHRKIRPHNIATGDYPPRPQKQYPINPKAKPSIQIVIDDLLKQGVLTPQNSTMNTPVYPVPKPDGRWRMVLDYREVNKTIPLTAAQNQHSAGILATIVRQKYKTTLDLANGFWAHPITPESYWLTAFTWQGKQYCWTRLPQGFLNSPALFNADVVDLLKEIPNVQVYVDDIYLSHDDPKEHVQQLEKVFQILLQAGYVVSLKKSEIGQKTVEFLGFNITKEGRGLTDTFKTKLLNITPPKDLKQLQSILGLLNFARNFIPNFAELVQPLYNLIAPAKGKYIEWSEENTKQLNMVIEALNTASNLEERLPEQRLVIKVNTSPSAGYVRYYNETGKKPIMYLNYVFSKAELKFSMLEKLLTTMHKALIKAMDLAMGQEILVYSPIVSMTKIQKTPLPERKALPIRWITWMTYLEDPRIQFHYDKTLPELKHIPDVYTSSQSPVKHPSQYEGVFYTDGSAIKSPDPTKSNNAGMGIVHATYKPEYQVLNQWSIPLGNHTAQMAEIAAVEFACKKALKIPGPVLVITDSFYVAESANKELPYWKSNGFVNNKKKPLKHISKWKSIAECLSMKPDITIQHEKGISLQIPVFILKGNALADKLATQGSYVVNAGKRTADGSEFEKRTADGSEFESPKKKAKVE

SEQ ID NO: 6537 - protein, 2009 aa, synthetic construct
MPAAKRVKLDGGDKKYSIGLDIGTNSVGWAVITDEYKVPSKKFKVLGNTDRHSIKKNLIGALLFDSGETAEATRLKRTARRRYTRRKNRICYLQEIFSNEMAKVDDSFFHRLEESFLVEEDKKHERHPIFGNIVDEVAYHEKYPTIYHLRKKLVDSTDKADLRLIYLALAHMIKFRGHFLIEGDLNPDNSDVDKLFIQLVQTYNQLFEENPINASGVDAKAILSARLSKSRRLENLIAQLPGEKKNGLFGNLIALSLGLTPNFKSNFDLAEDAKLQLSKDTYDDDLDNLLAQIGDQYADLFLAAKNLSDAILLSDILRVNTEITKAPLSASMIKRYDEHHQDLTLLKALVRQQLPEKYKEIFFDQSKNGYAGYIDGGASQEEFYKFIKPILEKMDGTEELLVKLNREDLLRKQRTFDNGSIPHQIHLGELHAILRRQEDFYPFLKDNREKIEKILTFRIPYYVGPLARGNSRFAWMTRKSEETITPWNFEEVVDKGASAQSFIERMTNFDKNLPNEKVLPKHSLLYEYFTVYNELTKVKYVTEGMRKPAFLSGEQKKAIVDLLFKTNRKVTVKQLKEDYFKKIECFDSVEISGVEDRFNASLGTYHDLLKIIKDKDFLDNEENEDILEDIVLTLTLFEDREMIEERLKTYAHLFDDKVMKQLKRRRYTGWGRLSRKLINGIRDKQSGKTILDFLKSDGFANRNFMQLIHDDSLTFKEDIQKAQVSGQGDSLHEHIANLAGSPAIKKGILQTVKVVDELVKVMGRHKPENIVIEMARENQTTQKGQKNSRERMKRIEEGIKELGSQILKEHPVENTQLQNEKLYLYYLQNGRDMYVDQELDINRLSDYDVDHIVPQSFLKDDSIDNKVLTRSDKARGKSDNVPSEEVVKKMKNYWRQLLNAKLITQRKFDNLTKAERGGLSELDKAGFIKRQLVETRQITKHVAQILDSRMNTKYDENDKLIREVKVITLKSKLVSDFRKDFQFYKVREINNYHHAHDAYLNAVVGTALIKKYPKLESEFVYGDYKVYDVRKMIAKSEQEIGKATAKYFFYSNIMNFFKTEITLANGEIRKRPLIETNGETGEIVWDKGRDFATVRKVLSMPQVNIVKKTEVQTGGFSKESILPKRNSDKLIARKKDWDPKKYGGFDSPTVAYSVLVVAKVEKGKSKKLKSVKELLGITIMERSSFEKNPIDFLEAKGYKEVKKDLIIKLPKYSLFELENGRKRMLASAGELQKGNELALPSKYVNFLYLASHYEKLKGSPEDNEQKQLFVEQHKHYLDEIIEQISEFSKRVILADANLDKVLSAYNKHRDKPIREQAENIIHLFTLTNLGAPAAFKYFDTTIDRKRYTSTKEVLDATLIHQSITGLYETRIDLSQLGGDGGPAPAPAPAPAPGGGLEHLPPPPEVSQFPLNPERLQALTDLVSRALEAKHIEPYQGPGNNPIFPVKKPNGKWRFIHDLRATNSVTRDLASPSPGPPDLTSLPQGLPHLRTIDLTDAFFQIPLPTIFQPYFAFTLPQPNNYGPGTRYSWRVLPQGFKNSPTLFQQQLSHILTPVRKTFPNSLIIQYMDDILLASPAPGELAALTDKVTNALTKEGLPLSPEKTQATPGPIHFLGQVISQDCITYETLPSINVKSTWSLAELQSMLGELQWVSKGTPVLRSSLHQLYLALRGHRDPRDTIKLTSIQVQALRTIQKALTLNCRSRLVNQLPILALIMLRPTGTTAVLFQTKQKWPLVWLHTPHPATSLRPWGQLLANAVIILDKYSLQHYGQVCKSFHHNISNQALTYYLHTSDQSSVAILLQHSHRFHNLGAQPSGPWRSLLQMPQIFQNIDVLRPPFTISPVVINHAPCLFSDGSASKAAFIIWDRQVIHQQVLSLPSTCSAQAGELFGLLAGLQKSQPWVALNIFLDSKFLIGHLRRMAWGAFPGPSTQCELHTQLLPLLQGKTVYVHHVRSHTLLQDPISRLNEATDALMLAPLLPLAGKRTADGSEFEKRTADGSEFESPKKKAKVE

SEQ ID NO: 6538 - protein, 2127 aa, synthetic construct
MPAAKRVKLDGGDKKYSIGLDIGTNSVGWAVITDEYKVPSKKFKVLGNTDRHSIKKNLIGALLFDSGETAEATRLKRTARRRYTRRKNRICYLQEIFSNEMAKVDDSFFHRLEESFLVEEDKKHERHPIFGNIVDEVAYHEKYPTIYHLRKKLVDSTDKADLRLIYLALAHMIKFRGHFLIEGDLNPDNSDVDKLFIQLVQTYNQLFEENPINASGVDAKAILSARLSKSRRLENLIAQLPGEKKNGLFGNLIALSLGLTPNFKSNFDLAEDAKLQLSKDTYDDDLDNLLAQIGDQYADLFLAAKNLSDAILLSDILRVNTEITKAPLSASMIKRYDEHHQDLTLLKALVRQQLPEKYKEIFFDQSKNGYAGYIDGGASQEEFYKFIKPILEKMDGTEELLVKLNREDLLRKQRTFDNGSIPHQIHLGELHAILRRQEDFYPFLKDNREKIEKILTFRIPYYVGPLARGNSRFAWMTRKSEETITPWNFEEVVDKGASAQSFIERMTNFDKNLPNEKVLPKHSLLYEYFTVYNELTKVKYVTEGMRKPAFLSGEQKKAIVDLLFKTNRKVTVKQLKEDYFKKIECFDSVEISGVEDRFNASLGTYHDLLKIIKDKDFLDNEENEDILEDIVLTLTLFEDREMIEERLKTYAHLFDDKVMKQLKRRRYTGWGRLSRKLINGIRDKQSGKTILDFLKSDGFANRNFMQLIHDDSLTFKEDIQKAQVSGQGDSLHEHIANLAGSPAIKKGILQTVKVVDELVKVMGRHKPENIVIEMARENQTTQKGQKNSRERMKRIEEGIKELGSQILKEHPVENTQLQNEKLYLYYLQNGRDMYVDQELDINRLSDYDVDHIVPQSFLKDDSIDNKVLTRSDKARGKSDNVPSEEVVKKMKNYWRQLLNAKLITQRKFDNLTKAERGGLSELDKAGFIKRQLVETRQITKHVAQILDSRMNTKYDENDKLIREVKVITLKSKLVSDFRKDFQFYKVREINNYHHAHDAYLNAVVGTALIKKYPKLESEFVYGDYKVYDVRKMIAKSEQEIGKATAKYFFYSNIMNFFKTEITLANGEIRKRPLIETNGETGEIVWDKGRDFATVRKVLSMPQVNIVKKTEVQTGGFSKESILPKRNSDKLIARKKDWDPKKYGGFDSPTVAYSVLVVAKVEKGKSKKLKSVKELLGITIMERSSFEKNPIDFLEAKGYKEVKKDLIIKLPKYSLFELENGRKRMLASAGELQKGNELALPSKYVNFLYLASHYEKLKGSPEDNEQKQLFVEQHKHYLDEIIEQISEFSKRVILADANLDKVLSAYNKHRDKPIREQAENIIHLFTLTNLGAPAAFKYFDTTIDRKRYTSTKEVLDATLIHQSITGLYETRIDLSQLGGDGGPAPAPAPAPAPGGLLGRDLLTKLKAQIQFSTEGPQVTWEDRPAMCLVLNLEEEYRLHEKPVPPSIDPSWLQLFPMVWAEKAGMGLANQVPPVVVELKSDASPVAVRQYPMSKEAREGIRPHIQRFLDLGILVPCQSPWNTPLLPVKKPGTNDYRPVQDLREVNKRVQDIHPTVPNPYNLLSSLPPSHTWYSVLDLKDAFFCLKLHPNSQPLFAFEWRDPEKGNTGQLTWTRLPQGFKNSPTLFDEALHRDLASFRALNPQVVMLQYVDDLLVAAPTYRDCKEGTRRLLQELSKLGYRVSAKKAQLCREEVTYLGYLLKGGKRWLTPARKATVMKIPTPTTPRQVREFLGTAGFCRLWIPGFASLAAPLYPLTREKVPFTWTEAHQEAFGRIKEALLSAPALALPDLTKPFALYVDEKEGVARGVLTQTLGPWRRPVAYLSKKLDPVASGWPTCLKAIAAVALLLKDADKLTLGQNVLVIAPHNLESIVRQPPDRWMTNARMTHYQSLLLNERVSFAPPAILNPATLLPVESDDTPIHICSEILAEETGTRPDLRDQPLPGVPAWYTDGSSFIMDGRRQAGAAIVDNKRTVWASNLPEGTSAQKAELIALTQALRLAEGKSINIYTDSRYAFATAHVHGAIYKQRGLLTSAGKDIKNKEEILALLEAIHLPKRVAIIHCPGHQRGTDPVATGNRKADEAAKQAAQSTRILTETTKNAGKRTADGSEFEKRTADGSEFESPKKKAKVE

SEQ ID NO: 6539 - protein, 2218 aa, synthetic construct
MPAAKRVKLDGGDKKYSIGLDIGTNSVGWAVITDEYKVPSKKFKVLGNTDRHSIKKNLIGALLFDSGETAEATRLKRTARRRYTRRKNRICYLQEIFSNEMAKVDDSFFHRLEESFLVEEDKKHERHPIFGNIVDEVAYHEKYPTIYHLRKKLVDSTDKADLRLIYLALAHMIKFRGHFLIEGDLNPDNSDVDKLFIQLVQTYNQLFEENPINASGVDAKAILSARLSKSRRLENLIAQLPGEKKNGLFGNLIALSLGLTPNFKSNFDLAEDAKLQLSKDTYDDDLDNLLAQIGDQYADLFLAAKNLSDAILLSDILRVNTEITKAPLSASMIKRYDEHHQDLTLLKALVRQQLPEKYKEIFFDQSKNGYAGYIDGGASQEEFYKFIKPILEKMDGTEELLVKLNREDLLRKQRTFDNGSIPHQIHLGELHAILRRQEDFYPFLKDNREKIEKILTFRIPYYVGPLARGNSRFAWMTRKSEETITPWNFEEVVDKGASAQSFIERMTNFDKNLPNEKVLPKHSLLYEYFTVYNELTKVKYVTEGMRKPAFLSGEQKKAIVDLLFKTNRKVTVKQLKEDYFKKIECFDSVEISGVEDRFNASLGTYHDLLKIIKDKDFLDNEENEDILEDIVLTLTLFEDREMIEERLKTYAHLFDDKVMKQLKRRRYTGWGRLSRKLINGIRDKQSGKTILDFLKSDGFANRNFMQLIHDDSLTFKEDIQKAQVSGQGDSLHEHIANLAGSPAIKKGILQTVKVVDELVKVMGRHKPENIVIEMARENQTTQKGQKNSRERMKRIEEGIKELGSQILKEHPVENTQLQNEKLYLYYLQNGRDMYVDQELDINRLSDYDVDHIVPQSFLKDDSIDNKVLTRSDKARGKSDNVPSEEVVKKMKNYWRQLLNAKLITQRKFDNLTKAERGGLSELDKAGFIKRQLVETRQITKHVAQILDSRMNTKYDENDKLIREVKVITLKSKLVSDFRKDFQFYKVREINNYHHAHDAYLNAVVGTALIKKYPKLESEFVYGDYKVYDVRKMIAKSEQEIGKATAKYFFYSNIMNFFKTEITLANGEIRKRPLIETNGETGEIVWDKGRDFATVRKVLSMPQVNIVKKTEVQTGGFSKESILPKRNSDKLIARKKDWDPKKYGGFDSPTVAYSVLVVAKVEKGKSKKLKSVKELLGITIMERSSFEKNPIDFLEAKGYKEVKKDLIIKLPKYSLFELENGRKRMLASAGELQKGNELALPSKYVNFLYLASHYEKLKGSPEDNEQKQLFVEQHKHYLDEIIEQISEFSKRVILADANLDKVLSAYNKHRDKPIREQAENIIHLFTLTNLGAPAAFKYFDTTIDRKRYTSTKEVLDATLIHQSITGLYETRIDLSQLGGDGGPAPAPAPAPAPGGTLGDQGSRGSDPLPEPRVTLTVEGIPTEFLVNTGAEHSVLTKPMGKMGSKRTVVAGATGSKVYPWTTKRLLKIGQKQVTHSFLVIPECPAPLLGRDLLTKLKAQIQFSTEGPQVTWEDRPAMCLVLNLEEEYRLHEKPVPPSIDPSWLQLFPMVWAEKAGMGLANQVPPVVVELKSDASPVAVRQYPMSKEAREGIRPHIQRFLDLGILVPCQSPWNTPLLPVKKPGTNDYRPVQDLREVNKRVQDIHPTVPNPYNLLSSLPPSHTWYSVLDLKDAFFCLKLHPNSQPLFAFEWRDPEKGNTGQLTWTRLPQGFKNSPTLFNEALHRDLASFRALNPQVVMLQYVDDLLVAAPTYRDCKEGTRRLLQELSKLGYRVSAKKAQLCREEVTYLGYLLKGGKRWLTPARKATVMKIPTPTTPRQVREFLGTAGFCRLWIPGFASLAAPLYPLTRPKVPFTWTEAHQEAFGRIKEALLSAPALALPDLTKPFALYVDEKEGVARGVLTQTLGPWRRPVAYLSKKLDPVASGWPTCLKAIAAVALLLKDADKLTLGQNVLVIAPHNLESIVRQPPDRWMTNARMTHYQSLLLNERVSFAPPAILNPATLLPVESDDTPIHICSEILAEETGTRPDLRDQPLPGVPAWYTDGSSFIMDGRRQAGAAIVDNKRTVWASNLPEGTSAQKAELIALTQALRLAEGKSINIYTDSRYAFATAHVHGAIYKQRGWLTSAGKDIKNKEEILALLEAIHLPKRVAIIHCPGHQRGTDPVATGNRKADEAAKQAAQSTRILTETTKNAGKRTADGSEFEKRTADGSEFESPKKKAKVE

SEQ ID NO: 6540 - protein, 2096 aa, synthetic construct
MPAAKRVKLDGGDKKYSIGLDIGTNSVGWAVITDEYKVPSKKFKVLGNTDRHSIKKNLIGALLFDSGETAEATRLKRTARRRYTRRKNRICYLQEIFSNEMAKVDDSFFHRLEESFLVEEDKKHERHPIFGNIVDEVAYHEKYPTIYHLRKKLVDSTDKADLRLIYLALAHMIKFRGHFLIEGDLNPDNSDVDKLFIQLVQTYNQLFEENPINASGVDAKAILSARLSKSRRLENLIAQLPGEKKNGLFGNLIALSLGLTPNFKSNFDLAEDAKLQLSKDTYDDDLDNLLAQIGDQYADLFLAAKNLSDAILLSDILRVNTEITKAPLSASMIKRYDEHHQDLTLLKALVRQQLPEKYKEIFFDQSKNGYAGYIDGGASQEEFYKFIKPILEKMDGTEELLVKLNREDLLRKQRTFDNGSIPHQIHLGELHAILRRQEDFYPFLKDNREKIEKILTFRIPYYVGPLARGNSRFAWMTRKSEETITPWNFEEVVDKGASAQSFIERMTNFDKNLPNEKVLPKHSLLYEYFTVYNELTKVKYVTEGMRKPAFLSGEQKKAIVDLLFKTNRKVTVKQLKEDYFKKIECFDSVEISGVEDRFNASLGTYHDLLKIIKDKDFLDNEENEDILEDIVLTLTLFEDREMIEERLKTYAHLFDDKVMKQLKRRRYTGWGRLSRKLINGIRDKQSGKTILDFLKSDGFANRNFMQLIHDDSLTFKEDIQKAQVSGQGDSLHEHIANLAGSPAIKKGILQTVKVVDELVKVMGRHKPENIVIEMARENQTTQKGQKNSRERMKRIEEGIKELGSQILKEHPVENTQLQNEKLYLYYLQNGRDMYVDQELDINRLSDYDVDHIVPQSFLKDDSIDNKVLTRSDKARGKSDNVPSEEVVKKMKNYWRQLLNAKLITQRKFDNLTKAERGGLSELDKAGFIKRQLVETRQITKHVAQILDSRMNTKYDENDKLIREVKVITLKSKLVSDFRKDFQFYKVREINNYHHAHDAYLNAVVGTALIKKYPKLESEFVYGDYKVYDVRKMIAKSEQEIGKATAKYFFYSNIMNFFKTEITLANGEIRKRPLIETNGETGEIVWDKGRDFATVRKVLSMPQVNIVKKTEVQTGGFSKESILPKRNSDKLIARKKDWDPKKYGGFDSPTVAYSVLVVAKVEKGKSKKLKSVKELLGITIMERSSFEKNPIDFLEAKGYKEVKKDLIIKLPKYSLFELENGRKRMLASAGELQKGNELALPSKYVNFLYLASHYEKLKGSPEDNEQKQLFVEQHKHYLDEIIEQISEFSKRVILADANLDKVLSAYNKHRDKPIREQAENIIHLFTLTNLGAPAAFKYFDTTIDRKRYTSTKEVLDATLIHQSITGLYETRIDLSQLGGDGGPAPAPAPAPAPGGLGIEDEYRLHETSTEPDVSLGSTWLSDFPQAWAETGGMGLAVRQAPLIIPLKATSTPVSIQQYPMSHEARLGIKPHIQRLLDQGILVPCQSPWNTPLLPVKKPGTNDYRPVQDLREVNKRVEDIHPTVPNPYNLLSGLPPSHQWYTVLDLKDAFFCLRLHPTSQPLFAFEWRDPGMGISGQLTWTRLPQGFKNSPTLFNEALHRDLADFRIQHPDLILLQYVDDILLAATSELDCQQGTRALLQTLGDLGYRASAKKAQICQKQVKYLGYLLREGQRWLTEARKETVMGQPVPKTPRQLREFLGKAGFCRLFIPGFAEMAAPLYPLTKPGTLFSWGPDQQKAYQEIKQALLTAPALGLPDLTKPFELFVDEKQGYAKGVLTQKLGPWRRPVAYLSKKLDPVAAGWPPCLRMVAAIAVLTKDAGKLTMGQPLVILAPHAVEALVKQPPDRWLSNARMTHYQAMLLDTDRVQFGPVVALNPATLLPLPEEGAPHDCLEILAETHGTRPDLTDQPIPDADHTWYTDGSSFLQEGQRKAGAAVTTETEVIWAGALPAGTSAQRAELIALTQALKMAEGKRLNVYTDSRYAFATAHIHGEIYRRRGWLTSEGREIKNKSEILALLKALFLPKRLSIIHCLGHQKGDSAEARGNRLADQAAREAAIKTPPDTSTLLIAGKRTADGSEFEKRTADGSEFESPKKKAKVE

SEQ ID NO: 6541 - protein, 2096 aa, synthetic construct
MPAAKRVKLDGGDKKYSIGLDIGTNSVGWAVITDEYKVPSKKFKVLGNTDRHSIKKNLIGALLFDSGETAEATRLKRTARRRYTRRKNRICYLQEIFSNEMAKVDDSFFHRLEESFLVEEDKKHERHPIFGNIVDEVAYHEKYPTIYHLRKKLVDSTDKADLRLIYLALAHMIKFRGHFLIEGDLNPDNSDVDKLFIQLVQTYNQLFEENPINASGVDAKAILSARLSKSRRLENLIAQLPGEKKNGLFGNLIALSLGLTPNFKSNFDLAEDAKLQLSKDTYDDDLDNLLAQIGDQYADLFLAAKNLSDAILLSDILRVNTEITKAPLSASMIKRYDEHHQDLTLLKALVRQQLPEKYKEIFFDQSKNGYAGYIDGGASQEEFYKFIKPILEKMDGTEELLVKLNREDLLRKQRTFDNGSIPHQIHLGELHAILRRQEDFYPFLKDNREKIEKILTFRIPYYVGPLARGNSRFAWMTRKSEETITPWNFEEVVDKGASAQSFIERMTNFDKNLPNEKVLPKHSLLYEYFTVYNELTKVKYVTEGMRKPAFLSGEQKKAIVDLLFKTNRKVTVKQLKEDYFKKIECFDSVEISGVEDRFNASLGTYHDLLKIIKDKDFLDNEENEDILEDIVLTLTLFEDREMIEERLKTYAHLFDDKVMKQLKRRRYTGWGRLSRKLINGIRDKQSGKTILDFLKSDGFANRNFMQLIHDDSLTFKEDIQKAQVSGQGDSLHEHIANLAGSPAIKKGILQTVKVVDELVKVMGRHKPENIVIEMARENQTTQKGQKNSRERMKRIEEGIKELGSQILKEHPVENTQLQNEKLYLYYLQNGRDMYVDQELDINRLSDYDVDHIVPQSFLKDDSIDNKVLTRSDKARGKSDNVPSEEVVKKMKNYWRQLLNAKLITQRKFDNLTKAERGGLSELDKAGFIKRQLVETRQITKHVAQILDSRMNTKYDENDKLIREVKVITLKSKLVSDFRKDFQFYKVREINNYHHAHDAYLNAVVGTALIKKYPKLESEFVYGDYKVYDVRKMIAKSEQEIGKATAKYFFYSNIMNFFKTEITLANGEIRKRPLIETNGETGEIVWDKGRDFATVRKVLSMPQVNIVKKTEVQTGGFSKESILPKRNSDKLIARKKDWDPKKYGGFDSPTVAYSVLVVAKVEKGKSKKLKSVKELLGITIMERSSFEKNPIDFLEAKGYKEVKKDLIIKLPKYSLFELENGRKRMLASAGELQKGNELALPSKYVNFLYLASHYEKLKGSPEDNEQKQLFVEQHKHYLDEIIEQISEFSKRVILADANLDKVLSAYNKHRDKPIREQAENIIHLFTLTNLGAPAAFKYFDTTIDRKRYTSTKEVLDATLIHQSITGLYETRIDLSQLGGDGGPAPAPAPAPAPGGTLGIEDEYRLHETSTEPDVSLGSTWLSDFPQAWAETGGMGLAVRQAPLIIPLKATSTPVSIQQYPMSHEARLGIKPHIQRLLDQGILVPCQSPWNTPLLPVKKPGTNDYRPVQDLREVNKRVEDIHPTVPNPYNLLSGLPPSHQWYTVLDLKDAFFCLRLHPTSQPLFAFEWRDPGMGISGQLTWTRLPQGFKNSPTLFDEALHRDLADFRIQHPDLILLQYVDDILLAATSELDCQQGTRALLQTLGDLGYRASAKKAQICQKQVKYLGYLLREGQRWLTEARKETVMGQPVPKTPRQLREFLGTAGFCRLWIPGFAEMAAPLYPLTKTGTLFSWGPDQQKAYQEIKQALLTAPALGLPDLTKPFELFVDEKQGYAKGVLTQKLGPWRRPVAYLSKKLDPVAAGWPPCLRMVAAIAVLTKDAGKLTMGQPLVILAPHAVEALVKQPPDRWLSNARMTHYQAMLLDTDRVQFGPVVALNPATLLPLPEEGAPHDCLEILAETHGTRPDLTDQPIPDADHTWYTDGSSFLQEGQRKAGAAVTTETEVIWAGALPAGTSAQRAELIALTQALKMAEGKRLNVYTDSRYAFATAHIHGEIYRRRGLLTSEGREIKNKSEILALLKALFLPKRLSIIHCLGHQKGDSAEARGNRLADQAAREAAIKTPPDTSTLLAGKRTADGSEFEKRTADGSEFESPKKKAKVE

SEQ ID NO: 6542 - protein, 2096 aa, synthetic construct; identical to SEQ ID NO: 6540

SEQ ID NO: 6543 - protein, 2096 aa, synthetic construct
MPAAKRVKLDGGDKKYSIGLDIGTNSVGWAVITDEYKVPSKKFKVLGNTDRHSIKKNLIGALLFDSGETAEATRLKRTARRRYTRRKNRICYLQEIFSNEMAKVDDSFFHRLEESFLVEEDKKHERHPIFGNIVDEVAYHEKYPTIYHLRKKLVDSTDKADLRLIYLALAHMIKFRGHFLIEGDLNPDNSDVDKLFIQLVQTYNQLFEENPINASGVDAKAILSARLSKSRRLENLIAQLPGEKKNGLFGNLIALSLGLTPNFKSNFDLAEDAKLQLSKDTYDDDLDNLLAQIGDQYADLFLAAKNLSDAILLSDILRVNTEITKAPLSASMIKRYDEHHQDLTLLKALVRQQLPEKYKEIFFDQSKNGYAGYIDGGASQEEFYKFIKPILEKMDGTEELLVKLNREDLLRKQRTFDNGSIPHQIHLGELHAILRRQEDFYPFLKDNREKIEKILTFRIPYYVGPLARGNSRFAWMTRKSEETITPWNFEEVVDKGASAQSFIERMTNFDKNLPNEKVLPKHSLLYEYFTVYNELTKVKYVTEGMRKPAFLSGEQKKAIVDLLFKTNRKVTVKQLKEDYFKKIECFDSVEISGVEDRFNASLGTYHDLLKIIKDKDFLDNEENEDILEDIVLTLTLFEDREMIEERLKTYAHLFDDKVMKQLKRRRYTGWGRLSRKLINGIRDKQSGKTILDFLKSDGFANRNFMQLIHDDSLTFKEDIQKAQVSGQGDSLHEHIANLAGSPAIKKGILQTVKVVDELVKVMGRHKPENIVIEMARENQTTQKGQKNSRERMKRIEEGIKELGSQILKEHPVENTQLQNEKLYLYYLQNGRDMYVDQELDINRLSDYDVDHIVPQSFLKDDSIDNKVLTRSDKARGKSDNVPSEEVVKKMKNYWRQLLNAKLITQRKFDNLTKAERGGLSELDKAGFIKRQLVETRQITKHVAQILDSRMNTKYDENDKLIREVKVITLKSKLVSDFRKDFQFYKVREINNYHHAHDAYLNAVVGTALIKKYPKLESEFVYGDYKVYDVRKMIAKSEQEIGKATAKYFFYSNIMNFFKTEITLANGEIRKRPLIETNGETGEIVWDKGRDFATVRKVLSMPQVNIVKKTEVQTGGFSKESILPKRNSDKLIARKKDWDPKKYGGFDSPTVAYSVLVVAKVEKGKSKKLKSVKELLGITIMERSSFEKNPIDFLEAKGYKEVKKDLIIKLPKYSLFELENGRKRMLASAGELQKGNELALPSKYVNFLYLASHYEKLKGSPEDNEQKQLFVEQHKHYLDEIIEQISEFSKRVILADANLDKVLSAYNKHRDKPIREQAENIIHLFTLTNLGAPAAFKYFDTTIDRKRYTSTKEVLDATLIHQSITGLYETRIDLSQLGGDGGPAPAPAPAPAPGGTLNIEDEYRLHETSKGPDVPLGSTWLSDFPQAWAETGGMGLAVRQAPLIIPLKATSTPVSIKQYPMSQEARLGIKPHIQRLLDQGILVPCQSPWNTPLLPVKKPGTNDYRPVQDLREVNKRVEDIHPTVPNPYNLLSGLPPSHQWYTVLDLKDAFFCLRLHPTSQSLFAFEWRDPEMGISGQLTWTRLPQGFKNSPTLFNEALHRDLADFRIQHPDLILLQYVDDLLLAATSELDCQQGTRALLQTLGDLGYRASAKKAQICQKQVKYLGYLLKEGQRWLTEARKETVMGQPTPKTPRQLREFLGTAGFCRLWIPGFAEMAAPLYPLTKPGTLFEWGPDQQKAYQEIKQALLTAPALGLPDLTKPFELFVDEKQGYAKGVLTQKLGPWRRPVAYLSKKLDPVAAGWPPCLRMVAAIAVLTKDAGKLTMGQPLVILAPHAVEALVKQPPDRWLSNARMTHYQALLLDTDRVQFGPIVALNPATLLPLPEEGLQHDCLDILAEAHGTRPDLTDQPLPDADHTWYTDGSSFLQEGQRKAGAAVTTETEVVWAKALPAGTSAQRAELIALTQALKMAEGKKLNVYTDSRYAFATAHIHGEIYRRRGWLTSEGKEIKNKDEILALLKALFLPKRLSIIHCPGHQKGNRAEARGNRMADQAAREVATRETPETSTLLAGKRTADGSEFEKRTADGSEFESPKKKAKVE

SEQ ID NO: 6544 - protein, 2090 aa, synthetic construct
MPAAKRVKLDGGDKKYSIGLDIGTNSVGWAVITDEYKVPSKKFKVLGNTDRHSIKKNLIGALLFDSGETAEATRLKRTARRRYTRRKNRICYLQEIFSNEMAKVDDSFFHRLEESFLVEEDKKHERHPIFGNIVDEVAYHEKYPTIYHLRKKLVDSTDKADLRLIYLALAHMIKFRGHFLIEGDLNPDNSDVDKLFIQLVQTYNQLFEENPINASGVDAKAILSARLSKSRRLENLIAQLPGEKKNGLFGNLIALSLGLTPNFKSNFDLAEDAKLQLSKDTYDDDLDNLLAQIGDQYADLFLAAKNLSDAILLSDILRVNTEITKAPLSASMIKRYDEHHQDLTLLKALVRQQLPEKYKEIFFDQSKNGYAGYIDGGASQEEFYKFIKPILEKMDGTEELLVKLNREDLLRKQRTFDNGSIPHQIHLGELHAILRRQEDFYPFLKDNREKIEKILTFRIPYYVGPLARGNSRFAWMTRKSEETITPWNFEEVVDKGASAQSFIERMTNFDKNLPNEKVLPKHSLLYEYFTVYNELTKVKYVTEGMRKPAFLSGEQKKAIVDLLFKTNRKVTVKQLKEDYFKKIECFDSVEISGVEDRFNASLGTYHDLLKIIKDKDFLDNEENEDILEDIVLTLTLFEDREMIEERLKTYAHLFDDKVMKQLKRRRYTGWGRLSRKLINGIRDKQSGKTILDFLKSDGFANRNFMQLIHDDSLTFKEDIQKAQVSGQGDSLHEHIANLAGSPAIKKGILQTVKVVDELVKVMGRHKPENIVIEMARENQTTQKGQKNSRERMKRIEEGIKELGSQILKEHPVENTQLQNEKLYLYYLQNGRDMYVDQELDINRLSDYDVDHIVPQSFLKDDSIDNKVLTRSDKARGKSDNVPSEEVVKKMKNYWRQLLNAKLITQRKFDNLTKAERGGLSELDKAGFIKRQLVETRQITKHVAQILDSRMNTKYDENDKLIREVKVITLKSKLVSDFRKDFQFYKVREINNYHHAHDAYLNAVVGTALIKKYPKLESEFVYGDYKVYDVRKMIAKSEQEIGKATAKYFFYSNIMNFFKTEITLANGEIRKRPLIETNGETGEIVWDKGRDFATVRKVLSMPQVNIVKKTEVQTGGFSKESILPKRNSDKLIARKKDWDPKKYGGFDSPTVAYSVLVVAKVEKGKSKKLKSVKELLGITIMERSSFEKNPIDFLEAKGYKEVKKDLIIKLPKYSLFELENGRKRMLASAGELQKGNELALPSKYVNFLYLASHYEKLKGSPEDNEQKQLFVEQHKHYLDEIIEQISEFSKRVILADANLDKVLSAYNKHRDKPIREQAENIIHLFTLTNLGAPAAFKYFDTTIDRKRYTSTKEVLDATLIHQSITGLYETRIDLSQLGGDGGPAPAPAPAPAPGGTLQLDDEYRLYSPLVKPDQNIQFWLEQFPQAWAETAGMGLAKQVPPQVIQLKASATPVSVRQYPLSKEAQEGIRPHVQRLIQQGILVPVQSPWNTPLLPVRKPGTNDYRPVQDLREVNKRVQDIHPTVPNPYNLLCALPPQRSWYTVLDLKDAFFCLRLHPTSQPLFAFEWRDPGTGRTGQLTWTRLPQGFKNSPTIFDEALHRDLANFRIQHPQVTLLQYVDDLLLAGATKQDCLEGTKALLLELSDLGYRASAKKAQICRREVTYLGYSLRDGQRWLTEARKKTVVQIPAPTTAKQVREFLGTAGFCRLWIPGFATLAAPLYPLTKEKGEFSWAPEHQKAFDAIKKALLSAPALALPDVTKPFTLYVDERKGVARGVLTQTLGPWRRPVAYLSKKLDPVASGWPVCLKAIAAVAILVKDADKLTLGQNITVIAPHALENIVRQPPDRWMTNARMTHYQSLLLTERVTFAPPAALNPATLLPEETDEPVTHDCHQLLIEETGVRKDLTDIPLTGEVLTWFTDGSSYVVEGKRMAGAAVVDGTRTIWASSLPEGTSAQKAELMALTQALRLAEGKSINIYTDSRYAFATAHVHGAIYKQRGLLTSAGREIKNKEEILSLLEALHLPKRLAIIHCPGHQKAKDPISRGNQMADRVAKQAAQGVNLLAGKRTADGSEFEKRTADGSEFESPKKKAKVE

SEQ ID NO: 6545 - protein, 2090 aa, synthetic construct; identical to SEQ ID NO: 6544

SEQ ID NO: 6546 - protein, 2087 aa, synthetic construct
MPAAKRVKLDGGDKKYSIGLDIGTNSVGWAVITDEYKVPSKKFKVLGNTDRHSIKKNLIGALLFDSGETAEATRLKRTARRRYTRRKNRICYLQEIFSNEMAKVDDSFFHRLEESFLVEEDKKHERHPIFGNIVDEVAYHEKYPTIYHLRKKLVDSTDKADLRLIYLALAHMIKFRGHFLIEGDLNPDNSDVDKLFIQLVQTYNQLFEENPINASGVDAKAILSARLSKSRRLENLIAQLPGEKKNGLFGNLIALSLGLTPNFKSNFDLAEDAKLQLSKDTYDDDLDNLLAQIGDQYADLFLAAKNLSDAILLSDILRVNTEITKAPLSASMIKRYDEHHQDLTLLKALVRQQLPEKYKEIFFDQSKNGYAGYIDGGASQEEFYKFIKPILEKMDGTEELLVKLNREDLLRKQRTFDNGSIPHQIHLGELHAILRRQEDFYPFLKDNREKIEKILTFRIPYYVGPLARGNSRFAWMTRKSEETITPWNFEEVVDKGASAQSFIERMTNFDKNLPNEKVLPKHSLLYEYFTVYNELTKVKYVTEGMRKPAFLSGEQKKAIVDLLFKTNRKVTVKQLKEDYFKKIECFDSVEISGVEDRFNASLGTYHDLLKIIKDKDFLDNEENEDILEDIVLTLTLFEDREMIEERLKTYAHLFDDKVMKQLKRRRYTGWGRLSRKLINGIRDKQSGKTILDFLKSDGFANRNFMQLIHDDSLTFKEDIQKAQVSGQGDSLHEHIANLAGSPAIKKGILQTVKVVDELVKVMGRHKPENIVIEMARENQTTQKGQKNSRERMKRIEEGIKELGSQILKEHPVENTQLQNEKLYLYYLQNGRDMYVDQELDINRLSDYDVDHIVPQSFLKDDSIDNKVLTRSDKARGKSDNVPSEEVVKKMKNYWRQLLNAKLITQRKFDNLTKAERGGLSELDKAGFIKRQLVETRQITKHVAQILDSRMNTKYDENDKLIREVKVITLKSKLVSDFRKDFQFYKVREINNYHHAHDAYLNAVVGTALIKKYPKLESEFVYGDYKVYDVRKMIAKSEQEIGKATAKYFFYSNIMNFFKTEITLANGEIRKRPLIETNGETGEIVWDKGRDFATVRKVLSMPQVNIVKKTEVQTGGFSKESILPKRNSDKLIARKKDWDPKKYGGFDSPTVAYSVLVVAKVEKGKSKKLKSVKELLGITIMERSSFEKNPIDFLEAKGYKEVKKDLIIKLPKYSLFELENGRKRMLASAGELQKGNELALPSKYVNFLYLASHYEKLKGSPEDNEQKQLFVEQHKHYLDEIIEQISEFSKRVILADANLDKVLSAYNKHRDKPIREQAENIIHLFTLTNLGAPAAFKYFDTTIDRKRYTSTKEVLDATLIHQSITGLYETRIDLSQLGGDGGPAPAPAPAPAPGGVPWLMKKPLQLTVLVPLHEYQERLLQQTALPKEQKELLQKLFLKYDALWQHWENQVGHRRIKPHNIATGTLAPRPQKQYPINPKAKPSIQIVIDDLLKQGVLIQQNSTMNTPVYPVPKPDGKWRMVLDYREVNKTIPLIAAQNQHSAGILSSIYRGKYKTTLDLTNGFWAHPITPESYWLTAFTWQGKQYCWTRLPQGFLNSPALFNADVVDLLKEIPNVQAYVDDIYISHDDPQEHLEQLEKIFSILLNAGYVVSLKKSEIAQREVEFLGFNITKEGRGLTDTFKQKLLNITPPKDLKQLQSILGKLNFARNFIPNYSELVKPLYTIVAPANGKFISWTEDNSNQLQHIISVLNQADNLEERNPETRLIIKVNSSPSAGYIRYYNEGSKRPIMYVNYIFSKAEAKFTQTEKLLTTMHKGLIKAMDLAMGQEILVYSPIVSMTKIQRTPLPERKALPVRWITWMTYLEDPRIQFHYDKSLPELQQIPNVTEDVIAKTKHPSEFAMVFYTDGSAIKHPDVNKSHSAGMGIAQVQFIPEYKIVHQWSIPLGDHTAQLAEIAAVEFACKKALKISGPVLIVTDSFYVAESANKELPYWKSNGFLNNKKKPLRHVSKWKSIAECLQLKPDIIIMHEKGHQQPMTTLHTEGNNLADKLATQGSYVVHAGKRTADGSEFEKRTADGSEFESPKKKAKVE

SEQ ID NO: 6547 - protein, 2176 aa, synthetic construct
MPAAKRVKLDGGDKKYSIGLDIGTNSVGWAVITDEYKVPSKKFKVLGNTDRHSIKKNLIGALLFDSGETAEATRLKRTARRRYTRRKNRICYLQEIFSNEMAKVDDSFFHRLEESFLVEEDKKHERHPIFGNIVDEVAYHEKYPTIYHLRKKLVDSTDKADLRLIYLALAHMIKFRGHFLIEGDLNPDNSDVDKLFIQLVQTYNQLFEENPINASGVDAKAILSARLSKSRRLENLIAQLPGEKKNGLFGNLIALSLGLTPNFKSNFDLAEDAKLQLSKDTYDDDLDNLLAQIGDQYADLFLAAKNLSDAILLSDILRVNTEITKAPLSASMIKRYDEHHQDLTLLKALVRQQLPEKYKEIFFDQSKNGYAGYIDGGASQEEFYKFIKPILEKMDGTEELLVKLNREDLLRKQRTFDNGSIPHQIHLGELHAILRRQEDFYPFLKDNREKIEKILTFRIPYYVGPLARGNSRFAWMTRKSEETITPWNFEEVVDKGASAQSFIERMTNFDKNLPNEKVLPKHSLLYEYFTVYNELTKVKYVTEGMRKPAFLSGEQKKAIVDLLFKTNRKVTVKQLKEDYFKKIECFDSVEISGVEDRFNASLGTYHDLLKIIKDKDFLDNEENEDILEDIVLTLTLFEDREMIEERLKTYAHLFDDKVMKQLKRRRYTGWGRLSRKLINGIRDKQSGKTILDFLKSDGFANRNFMQLIHDDSLTFKEDIQKAQVSGQGDSLHEHIANLAGSPAIKKGILQTVKVVDELVKVMGRHKPENIVIEMARENQTTQKGQKNSRERMKRIEEGIKELGSQILKEHPVENTQLQNEKLYLYYLQNGRDMYVDQELDINRLSDYDVDHIVPQSFLKDDSIDNKVLTRSDKARGKSDNVPSEEVVKKMKNYWRQLLNAKLITQRKFDNLTKAERGGLSELDKAGFIKRQLVETRQITKHVAQILDSRMNTKYDENDKLIREVKVITLKSKLVSDFRKDFQFYKVREINNYHHAHDAYLNAVVGTALIKKYPKLESEFVYGDYKVYDVRKMIAKSEQEIGKATAKYFFYSNIMNFFKTEITLANGEIRKRPLIETNGETGEIVWDKGRDFATVRKVLSMPQVNIVKKTEVQTGGFSKESILPKRNSDKLIARKKDWDPKKYGGFDSPTVAYSVLVVAKVEKGKSKKLKSVKELLGITIMERSSFEKNPIDFLEAKGYKEVKKDLIIKLPKYSLFELENGRKRMLASAGELQKGNELALPSKYVNFLYLASHYEKLKGSPEDNEQKQLFVEQHKHYLDEIIEQISEFSKRVILADANLDKVLSAYNKHRDKPIREQAENIIHLFTLTNLGAPAAFKYFDTTIDRKRYTSTKEVLDATLIHQSITGLYETRIDLSQLGGDGGPAPAPAPAPAPGGMDPLQLLQPLEAEIKGTKLKAHWNSGATITCVPEAFLEDERPIQTMLIKTIHGEKQQDVYYLTFKVQGRKVEAEVLASPYDYILLNPSDVPWLMKKPLQLTVLVPLHEYQERLLQQTALPKEQKELLQKLFLKYDALWQHWENQVGHRRIKPHNIATGTLAPRPQKQYPINPKAKPSIQIVIDDLLKQGVLIQQNSTMNTPVYPVPKPDGKWRMVLDYREVNKTIPLIAAQNQHSAGILSSIYRGKYKTTLDLTNGFWAHPITPESYWLTAFTWQGKQYCWTRLPQGFLNSPALFNADVVDLLKEIPNVQAYVDDIYISHDDPQEHLEQLEKIFSILLNAGYVVSLKKSEIAQREVEFLGFNITKEGRGLTDTFKQKLLNITPPKDLKQLQSILGLLNFARNFIPNYSELVKPLYTIVAPANGKFISWTEDNSNQLQHIISVLNQADNLEERNPETRLIIKVNSSPSAGYIRYYNEGSKRPIMYVNYIFSKAEAKFTQTEKLLTTMHKGLIKAMDLAMGQEILVYSPIVSMTKIQRTPLPERKALPVRWITWMTYLEDPRIQFHYDKSLPELQQIPNVTEDVIAKTKHPSEFAMVFYTDGSAIKHPDVNKSHSAGMGIAQVQFIPEYKIVHQWSIPLGDHTAQLAEIAAVEFACKKALKISGPVLIVTDSFYVAESANKELPYWKSNGFLNNKKKPLRHVSKWKSIAECLQLKPDIIIMHEKGHQQPMTTLHTEGNNLADKLATQGSYVVHAGKRTADGSEFEKRTADGSEFESPKKKAKVE

SEQ ID NO: 6548 - protein, 2176 aa, synthetic construct
MPAAKRVKLDGGDKKYSIGLDIGTNSVGWAVITDEYKVPSKKFKVLGNTDRHSIKKNLIGALLFDSGETAEATRLKRTARRRYTRRKNRICYLQEIFSNEMAKVDDSFFHRLEESFLVEEDKKHERHPIFGNIVDEVAYHEKYPTIYHLRKKLVDSTDKADLRLIYLALAHMIKFRGHFLIEGDLNPDNSDVDKLFIQLVQTYNQLFEENPINASGVDAKAILSARLSKSRRLENLIAQLPGEKKNGLFGNLIALSLGLTPNFKSNFDLAEDAKLQLSKDTYDDDLDNLLAQIGDQYADLFLAAKNLSDAILLSDILRVNTEITKAPLSASMIKRYDEHHQDLTLLKALVRQQLPEKYKEIFFDQSKNGYAGYIDGGASQEEFYKFIKPILEKMDGTEELLVKLNREDLLRKQRTFDNGSIPHQIHLGELHAILRRQEDFYPFLKDNREKIEKILTFRIPYYVGPLARGNSRFAWMTRKSEETITPWNFEEVVDKGASAQSFIERMTNFDKNLPNEKVLPKHSLLYEYFTVYNELTKVKYVTEGMRKPAFLSGEQKKAIVDLLFKTNRKVTVKQLKEDYFKKIECFDSVEISGVEDRFNASLGTYHDLLKIIKDKDFLDNEENEDILEDIVLTLTLFEDREMIEERLKTYAHLFDDKVMKQLKRRRYTGWGRLSRKLINGIRDKQSGKTILDFLKSDGFANRNFMQLIHDDSLTFKEDIQKAQVSGQGDSLHEHIANLAGSPAIKKGILQTVKVVDELVKVMGRHKPENIVIEMARENQTTQKGQKNSRERMKRIEEGIKELGSQILKEHPVENTQLQNEKLYLYYLQNGRDMYVDQELDINRLSDYDVDHIVPQSFLKDDSIDNKVLTRSDKARGKSDNVPSEEVVKKMKNYWRQLLNAKLITQRKFDNLTKAERGGLSELDKAGFIKRQLVETRQITKHVAQILDSRMNTKYDENDKLIREVKVITLKSKLVSDFRKDFQFYKVREINNYHHAHDAYLNAVVGTALIKKYPKLESEFVYGDYKVYDVRKMIAKSEQEIGKATAKYFFYSNIMNFFKTEITLANGEIRKRPLIETNGETGEIVWDKGRDFATVRKVLSMPQVNIVKKTEVQTGGFSKESILPKRNSDKLIARKKDWDPKKYGGFDSPTVAYSVLVVAKVEKGKSKKLKSVKELLGITIMERSSFEKNPIDFLEAKGYKEVKKDLIIKLPKYSLFELENGRKRMLASAGELQKGNELALPSKYVNFLYLASHYEKLKGSPEDNEQKQLFVEQHKHYLDEIIEQISEFSKRVILADANLDKVLSAYNKHRDKPIREQAENIIHLFTLTNLGAPAAFKYFDTTIDRKRYTSTKEVLDATLIHQSITGLYETRIDLSQLGGDGGPAPAPAPAPAPGGMDPLQLLQPLEAEIKGTKLKAHWNSGATITCVPQAFLEEEVPIKNIWIKTIHGEKEQPVYYLTFKIQGRKVEAEVISSPYDYILVSPSDIPWLMKKPLQLTTLVPLQEYEERLLKQTMLTGSYKEKLQSLFLKYDALWQHWENQVGHRRIKPHHIATGTVNPRPQKQYPINPKAKASIQTVINDLLKQGVLIQQNSIMNTPVYPVPKPDGKWRMVLDYREVNKTIPLIAAQNQHSAGILSSIFRGKYKTTLDLSNGFWAHSITPESYWLTAFTWLGQQYCWTRLPQGFLNSPALFNADVVDLLKEVPNVQVYVDDIYISHDDPREHLEQLEKVFSLLLNAGYVVSLKKSEIAQHEVEFLGFNITKEGRGLTETFKQKLLNITPPRDLKQLQSILGLLNFARNFIPNFSELVKPLYNIIATAPGKYITWTTDNSQQLQNIISMLNSAENLEERNPEVRLIMKVNTSPSAGYIRFYNEFAKRPIMYLNYVYTKAEVKFTNTEKLLTTIHKGLIKALDLGMGQEILVYSPIVSMTKIQKTPLPERKALPIRWITWMSYLEDPRIQFHYDKTLPELQQVPTVTDDIIAKIKHPSEFSMVFYTDGSAIKHPNVNKSHNAGMGIAQVQFKPEFTVINTWSIPLGDHTAQLAEVAAVEFACKKALKIDGPVLIVTDSFYVAESVNKELPYWQSNGFFNNKKKPLKHVSKWKSIADCIQLKPDIIIIHEKGHQPTASTFHTEGNNLADKLATQGSYVVNAGKRTADGSEFEKRTADGSEFESPKKKAKVE

SEQ ID NO: 6549 - protein, 2094 aa, synthetic construct
MPAAKRVKLDGGDKKYSIGLDIGTNSVGWAVITDEYKVPSKKFKVLGNTDRHSIKKNLIGALLFDSGETAEATRLKRTARRRYTRRKNRICYLQEIFSNEMAKVDDSFFHRLEESFLVEEDKKHERHPIFGNIVDEVAYHEKYPTIYHLRKKLVDSTDKADLRLIYLALAHMIKFRGHFLIEGDLNPDNSDVDKLFIQLVQTYNQLFEENPINASGVDAKAILSARLSKSRRLENLIAQLPGEKKNGLFGNLIALSLGLTPNFKSNFDLAEDAKLQLSKDTYDDDLDNLLAQIGDQYADLFLAAKNLSDAILLSDILRVNTEITKAPLSASMIKRYDEHHQDLTLLKALVRQQLPEKYKEIFFDQSKNGYAGYIDGGASQEEFYKFIKPILEKMDGTEELLVKLNREDLLRKQRTFDNGSIPHQIHLGELHAILRRQEDFYPFLKDNREKIEKILTFRIPYYVGPLARGNSRFAWMTRKSEETITPWNFEEVVDKGASAQSFIERMTNFDKNLPNEKVLPKHSLLYEYFTVYNELTKVKYVTEGMRKPAFLSGEQKKAIVDLLFKTNRKVTVKQLKEDYFKKIECFDSVEISGVEDRFNASLGTYHDLLKIIKDKDFLDNEENEDILEDIVLTLTLFEDREMIEERLKTYAHLFDDKVMKQLKRRRYTGWGRLSRKLINGIRDKQSGKTILDFLKSDGFANRNFMQLIHDDSLTFKEDIQKAQVSGQGDSLHEHIANLAGSPAIKKGILQTVKVVDELVKVMGRHKPENIVIEMARENQTTQKGQKNSRERMKRIEEGIKELGSQILKEHPVENTQLQNEKLYLYYLQNGRDMYVDQELDINRLSDYDVDHIVPQSFLKDDSIDNKVLTRSDKARGKSDNVPSEEVVKKMKNYWRQLLNAKLITQRKFDNLTKAERGGLSELDKAGFIKRQLVETRQITKHVAQILDSRMNTKYDENDKLIREVKVITLKSKLVSDFRKDFQFYKVREINNYHHAHDAYLNAVVGTALIKKYPKLESEFVYGDYKVYDVRKMIAKSEQEIGKATAKYFFYSNIMNFFKTEITLANGEIRKRPLIETNGETGEIVWDKGRDFATVRKVLSMPQVNIVKKTEVQTGGFSKESILPKRNSDKLIARKKDWDPKKYGGFDSPTVAYSVLVVAKVEKGKSKKLKSVKELLGITIMERSSFEKNPIDFLEAKGYKEVKKDLIIKLPKYSLFELENGRKRMLASAGELQKGNELALPSKYVNFLYLASHYEKLKGSPEDNEQKQLFVEQHKHYLDEIIEQISEFSKRVILADANLDKVLSAYNKHRDKPIREQAENIIHLFTLTNLGAPAAFKYFDTTIDRKRYTSTKEVLDATLIHQSITGLYETRIDLSQLGGDGGPAPAPAPAPAPGGVLNLEEEYRLHEKPVPSSIDPSWLQLFPTVWAERAGMGLANQVPPVVVELRSGASPVAVRQYPMSKEAREGIRPHIQRFLDLGVLVPCQSPWNTPLLPVKKPGTNDYRPVQDLREINKRVQDIHPTVPNPYNLLSSLPPSHTWYSVLDLKDAFFCLKLHPNSQPLFAFEWRDPEKGNTGQLTWTRLPQGFKNSPTLFNEALHRDLAPFRALNPQVVLLQYVDDLLVAAPTYRDCKEGTQKLLQELSKLGYRVSAKKAQLCQKEVTYLGYLLKEGKRWLTPARKATVMKIPPPTTPRQVREFLGKAGFCRLFIPGFASLAAPLYPLTKPSIPFIWTEEHQKAFDRIKEALLSAPALALPDLTKPFTLYVDERAGVARGVLTQTLGPWRRPVAYLSKKLDPVASGWPTCLKAVAAVALLLKDADKLTLGQNVTVIASHSLESIVRQPPDRWMTNARMTHYQSLLLNERVSFAPPAVLNPATLLPVESEATPVHRCSEILAEETGTRRDLKDQPLPGVPAWYTDGSSFIAEGKRRAGAAIVDGKRTVWASSLPEGTSAQKAELVALTQALRLAEGKDINIYTDSRYAFATAHIHGAIYKQRGWLTSAGKDIKNKEEILALLEAIHLPKRVAIIHCPGHQKGNDPVATGNRRADEAAKQAALSTRVLAETTKPAGKRTADGSEFEKRTADGSEFESPKKKAKVE

SEQ ID NO: 6550 - protein, 2096 aa, synthetic construct
MPAAKRVKLDGGDKKYSIGLDIGTNSVGWAVITDEYKVPSKKFKVLGNTDRHSIKKNLIGALLFDSGETAEATRLKRTARRRYTRRKNRICYLQEIFSNEMAKVDDSFFHRLEESFLVEEDKKHERHPIFGNIVDEVAYHEKYPTIYHLRKKLVDSTDKADLRLIYLALAHMIKFRGHFLIEGDLNPDNSDVDKLFIQLVQTYNQLFEENPINASGVDAKAILSARLSKSRRLENLIAQLPGEKKNGLFGNLIALSLGLTPNFKSNFDLAEDAKLQLSKDTYDDDLDNLLAQIGDQYADLFLAAKNLSDAILLSDILRVNTEITKAPLSASMIKRYDEHHQDLTLLKALVRQQLPEKYKEIFFDQSKNGYAGYIDGGASQEEFYKFIKPILEKMDGTEELLVKLNREDLLRKQRTFDNGSIPHQIHLGELHAILRRQEDFYPFLKDNREKIEKILTFRIPYYVGPLARGNSRFAWMTRKSEETITPWNFEEVVDKGASAQSFIERMTNFDKNLPNEKVLPKHSLLYEYFTVYNELTKVKYVTEGMRKPAFLSGEQKKAIVDLLFKTNRKVTVKQLKEDYFKKIECFDSVEISGVEDRFNASLGTYHDLLKIIKDKDFLDNEENEDILEDIVLTLTLFEDREMIEERLKTYAHLFDDKVMKQLKRRRYTGWGRLSRKLINGIRDKQSGKTILDFLKSDGFANRNFMQLIHDDSLTFKEDIQKAQVSGQGDSLHEHIANLAGSPAIKKGILQTVKVVDELVKVMGRHKPENIVIEMARENQTTQKGQKNSRERMKRIEEGIKELGSQILKEHPVENTQLQNEKLYLYYLQNGRDMYVDQELDINRLSDYDVDHIVPQSFLKDDSIDNKVLTRSDKARGKSDNVPSEEVVKKMKNYWRQLLNAKLITQRKFDNLTKAERGGLSELDKAGFIKRQLVETRQITKHVAQILDSRMNTKYDENDKLIREVKVITLKSKLVSDFRKDFQFYKVREINNYHHAHDAYLNAVVGTALIKKYPKLESEFVYGDYKVYDVRKMIAKSEQEIGKATAKYFFYSNIMNFFKTEITLANGEIRKRPLIETNGETGEIVWDKGRDFATVRKVLSMPQVNIVKKTEVQTGGFSKESILPKRNSDKLIARKKDWDPKKYGGFDSPTVAYSVLVVAKVEKGKSKKLKSVKELLGITIMERSSFEKNPIDFLEAKGYKEVKKDLIIKLPKYSLFELENGRKRMLASAGELQKGNELALPSKYVNFLYLASHYEKLKGSPEDNEQKQLFVEQHKHYLDEIIEQISEFSKRVILADANLDKVLSAYNKHRDKPIREQAENIIHLFTLTNLGAPAAFKYFDTTIDRKRYTSTKEVLDATLIHQSITGLYETRIDLSQLGGDGGPAPAPAPAPAPGGTLNIEDEYRLHETSKEPDVPLGSTWLSDFPQAWAETGGMGLAVRQAPLIIPLKATSTPVSIKQYPMSQEARLGIKPHIQRLLDQGILVPCQSPWNTPLLPVKKPGTNDYRPVQDLREVNKRVEDIHPTVPNPYNLLSGLPPSHQWYTVLDLKDAFFCLRLHPTSQPLFAFEWRDPEMGISGQLTWTRLPQGFKNSPTLFDEALHRDLADFRIQHPDLILLQYVDDLLLAATSEQDCQRGTRALLQTLGNLGYRASAKKAQICQKQVKYLGYLLKEGQRWLTEARKETVMGQPTPKTPRQLREFLGTAGFCRLWIPGFAEMAAPLYPLTKTGTLFNWGPDQQKAYQEIKQALLTAPALGLPDLTKPFELFVDEKQGYAKGVLTQKLGPWRRPVAYLSKKLDPVAAGWPPCLRMVAAIAVLTKDAGKLTMGQPLVILAPHAVEALVKQPPDRWLSNARMTHYQAMLLDTDRVQFGPVVALNPATLLPLPEKEAPHDCLEILAETHGTRPDLTDQPIPDADYTWYTDGSSFLQEGQRRAGAAVTTETEVIWARALPAGTSAQRAELIALTQALKMAEGKKLNVYTDSRYAFATAHVHGEIYRRRGLLTSEGREIKNKNEILALLKALFLPKRLSIIHCPGHQKGNSAEARGNRMADQAAREAAMKAVLETSTLLAGKRTADGSEFEKRTADGSEFESPKKKAKVE

SEQ ID NO: 6551 - protein, 2096 aa, synthetic construct
MPAAKRVKLDGGDKKYSIGLDIGTNSVGWAVITDEYKVPSKKFKVLGNTDRHSIKKNLIGALLFDSGETAEATRLKRTARRRYTRRKNRICYLQEIFSNEMAKVDDSFFHRLEESFLVEEDKKHERHPIFGNIVDEVAYHEKYPTIYHLRKKLVDSTDKADLRLIYLALAHMIKFRGHFLIEGDLNPDNSDVDKLFIQLVQTYNQLFEENPINASGVDAKAILSARLSKSRRLENLIAQLPGEKKNGLFGNLIALSLGLTPNFKSNFDLAEDAKLQLSKDTYDDDLDNLLAQIGDQYADLFLAAKNLSDAILLSDILRVNTEITKAPLSASMIKRYDEHHQDLTLLKALVRQQLPEKYKEIFFDQSKNGYAGYIDGGASQEEFYKFIKPILEKMDGTEELLVKLNREDLLRKQRTFDNGSIPHQIHLGELHAILRRQEDFYPFLKDNREKIEKILTFRIPYYVGPLARGNSRFAWMTRKSEETITPWNFEEVVDKGASAQSFIERMTNFDKNLPNEKVLPKHSLLYEYFTVYNELTKVKYVTEGMRKPAFLSGEQKKAIVDLLFKTNRKVTVKQLKEDYFKKIECFDSVEISGVEDRFNASLGTYHDLLKIIKDKDFLDNEENEDILEDIVLTLTLFEDREMIEERLKTYAHLFDDKVMKQLKRRRYTGWGRLSRKLINGIRDKQSGKTILDFLKSDGFANRNFMQLIHDDSLTFKEDIQKAQVSGQGDSLHEHIANLAGSPAIKKGILQTVKVVDELVKVMGRHKPENIVIEMARENQTTQKGQKNSRERMKRIEEGIKELGSQILKEHPVENTQLQNEKLYLYYLQNGRDMYVDQELDINRLSDYDVDHIVPQSFLKDDSIDNKVLTRSDKARGKSDNVPSEEVVKKMKNYWRQLLNAKLITQRKFDNLTKAERGGLSELDKAGFIKRQLVETRQITKHVAQILDSRMNTKYDENDKLIREVKVITLKSKLVSDFRKDFQFYKVREINNYHHAHDAYLNAVVGTALIKKYPKLESEFVYGDYKVYDVRKMIAKSEQEIGKATAKYFFYSNIMNFFKTEITLANGEIRKRPLIETNGETGEIVWDKGRDFATVRKVLSMPQVNIVKKTEVQTGGFSKESILPKRNSDKLIARKKDWDPKKYGGFDSPTVAYSVLVVAKVEKGKSKKLKSVKELLGITIMERSSFEKNPIDFLEAKGYKEVKKDLIIKLPKYSLFELENGRKRMLASAGELQKGNELALPSKYVNFLYLASHYEKLKGSPEDNEQKQLFVEQHKHYLDEIIEQISEFSKRVILADANLDKVLSAYNKHRDKPIREQAENIIHLFTLTNLGAPAAFKYFDTTIDRKRYTSTKEVLDATLIHQSITGLYETRIDLSQLGGDGGPAPAPAPAPAPGGTLNIEDEYRLHETSKEPDVPLGSTWLSDFPQAWAETGGMGLAVRQAPLIIPLKATSTPVSIKQYPMSQEARLGIKPHIQRLLDQGILVPCQSPWNTPLLPVKKPGTNDYRPVQDLREVNKRVEDIHPTVPNPYNLLSGLPPSHQWYTVLDLKDAFFCLRLHPTSQPLFAFEWRDPEMGISGQLTWTRLPQGFKNSPTLFNEALHRDLADFRIQHPDLILLQYVDDLLLAATSEQDCQRGTRALLQTLGNLGYRASAKKAQICQKQVKYLGYLLKEGQRWLTEARKETVMGQPTPKTPRQLREFLGTAGFCRLWIPGFAEMAAPLYPLTKPGTLFNWGPDQQKAYQEIKQALLTAPALGLPDLTKPFELFVDEKQGYAKGVLTQKLGPWRRPVAYLSKKLDPVAAGWPPCLRMVAAIAVLTKDAGKLTMGQPLVILAPHAVEALVKQPPDRWLSNARMTHYQAMLLDTDRVQFGPVVALNPATLLPLPEKEAPHDCLEILAETHGTRPDLTDQPIPDADYTWYTDGSSFLQEGQRRAGAAVTTETEVIWARALPAGTSAQRAELIALTQALKMAEGKKLNVYTDSRYAFATAHVHGEIYRRRGWLTSEGREIKNKNEILALLKALFLPKRLSIIHCPGHQKGNSAEARGNRMADQAAREAAMKAVLETSTLLAGKRTADGSEFEKRTADGSEFESPKKKAKVE

SEQ ID NO: 6552 - protein, 2100 aa, synthetic construct
MPAAKRVKLDGGDKKYSIGLDIGTNSVGWAVITDEYKVPSKKFKVLGNTDRHSIKKNLIGALLFDSGETAEATRLKRTARRRYTRRKNRICYLQEIFSNEMAKVDDSFFHRLEESFLVEEDKKHERHPIFGNIVDEVAYHEKYPTIYHLRKKLVDSTDKADLRLIYLALAHMIKFRGHFLIEGDLNPDNSDVDKLFIQLVQTYNQLFEENPINASGVDAKAILSARLSKSRRLENLIAQLPGEKKNGLFGNLIALSLGLTPNFKSNFDLAEDAKLQLSKDTYDDDLDNLLAQIGDQYADLFLAAKNLSDAILLSDILRVNTEITKAPLSASMIKRYDEHHQDLTLLKALVRQQLPEKYKEIFFDQSKNGYAGYIDGGASQEEFYKFIKPILEKMDGTEELLVKLNREDLLRKQRTFDNGSIPHQIHLGELHAILRRQEDFYPFLKDNREKIEKILTFRIPYYVGPLARGNSRFAWMTRKSEETITPWNFEEVVDKGASAQSFIERMTNFDKNLPNEKVLPKHSLLYEYFTVYNELTKVKYVTEGMRKPAFLSGEQKKAIVDLLFKTNRKVTVKQLKEDYFKKIECFDSVEISGVEDRFNASLGTYHDLLKIIKDKDFLDNEENEDILEDIVLTLTLFEDREMIEERLKTYAHLFDDKVMKQLKRRRYTGWGRLSRKLINGIRDKQSGKTILDFLKSDGFANRNFMQLIHDDSLTFKEDIQKAQVSGQGDSLHEHIANLAGSPAIKKGILQTVKVVDELVKVMGRHKPENIVIEMARENQTTQKGQKNSRERMKRIEEGIKELGSQILKEHPVENTQLQNEKLYLYYLQNGRDMYVDQELDINRLSDYDVDHIVPQSFLKDDSIDNKVLTRSDKARGKSDNVPSEEVVKKMKNYWRQLLNAKLITQRKFDNLTKAERGGLSELDKAGFIKRQLVETRQITKHVAQILDSRMNTKYDENDKLIREVKVITLKSKLVSDFRKDFQFYKVREINNYHHAHDAYLNAVVGTALIKKYPKLESEFVYGDYKVYDVRKMIAKSEQEIGKATAKYFFYSNIMNFFKTEITLANGEIRKRPLIETNGETGEIVWDKGRDFATVRKVLSMPQVNIVKKTEVQTGGFSKESILPKRNSDKLIARKKDWDPKKYGGFDSPTVAYSVLVVAKVEKGKSKKLKSVKELLGITIMERSSFEKNPIDFLEAKGYKEVKKDLIIKLPKYSLFELENGRKRMLASAGELQKGNELALPSKYVNFLYLASHYEKLKGSPEDNEQKQLFVEQHKHYLDEIIEQISEFSKRVILADANLDKVLSAYNKHRDKPIREQAENIIHLFTLTNLGAPAAFKYFDTTIDRKRYTSTKEVLDATLIHQSITGLYETRIDLSQLGGDGGPAPAPAPAPAPAPGGTAPLEEEYRLFLEAPIQNVTLLEQWKREIPKVWAEINPPGLASTQAPIHVQLLSTALPVRVRQYPITLEAKRSLRETIRKFRAAGILRPVHSPWNTPLLPVRKSGTSEYRMVQDLREVNKRVETIHPTVPNPYTLLSLLPPDRIWYSVLDLKDAFFCIPLAPESQLIFAFEWADAEEGESGQLTWTRLPQGFKNSPTLFDEALNRDLQGFRLDHPSVSLLQYVDDLLIAADTQAACLSATRDLLMTLAELGYRVSGKKAQLCQEEVTYLGFKIHKGSRSLSNSRTQAILQIPVPKTKRQVREFLGTIGYCRLWIPGFAELAQPLYAATRGGNDPLVWGEKEEEAFQSLKLALTQPPALALPSLDKPFQLFVEETSGAAKGVLTQALGPWKRPVAYLSKRLDPVAAGWPRCLRAIAAAALLTREASKLTFGQDIEITSSHNLESLLRSPPDKWLTNARITQYQVLLLDPPRVRFKQTAALNPATLLPETDDTLPIHHCLDTLDSLTSTRPDLTDQPLAQAEATLFTDGSSYIRDGKRYAGAAVVTLDSVIWAEPLPIGTSAQKAELIALTKALEWSKDKSVNIYTDSRYAFATLHVHGMIYRERGLLTAGGKAIKNAPEILALLTAVWLPKRVAVMHCKGHQKDDAPTSTGNRRADEVAREVAIRPLSTQATISAGKRTADGSEFEKRTADGSEFESPKKKAKVE

SEQ ID NO: 6553 - protein, 2175 aa, synthetic construct
MPAAKRVKLDGGDKKYSIGLDIGTNSVGWAVITDEYKVPSKKFKVLGNTDRHSIKKNLIGALLFDSGETAEATRLKRTARRRYTRRKNRICYLQEIFSNEMAKVDDSFFHRLEESFLVEEDKKHERHPIFGNIVDEVAYHEKYPTIYHLRKKLVDSTDKADLRLIYLALAHMIKFRGHFLIEGDLNPDNSDVDKLFIQLVQTYNQLFEENPINASGVDAKAILSARLSKSRRLENLIAQLPGEKKNGLFGNLIALSLGLTPNFKSNFDLAEDAKLQLSKDTYDDDLDNLLAQIGDQYADLFLAAKNLSDAILLSDILRVNTEITKAPLSASMIKRYDEHHQDLTLLKALVRQQLPEKYKEIFFDQSKNGYAGYIDGGASQEEFYKFIKPILEKMDGTEELLVKLNREDLLRKQRTFDNGSIPHQIHLGELHAILRRQEDFYPFLKDNREKIEKILTFRIPYYVGPLARGNSRFAWMTRKSEETITPWNFEEVVDKGASAQSFIERMTNFDKNLPNEKVLPKHSLLYEYFTVYNELTKVKYVTEGMRKPAFLSGEQKKAIVDLLFKTNRKVTVKQLKEDYFKKIECFDSVEISGVEDRFNASLGTYHDLLKIIKDKDFLDNEENEDILEDIVLTLTLFEDREMIEERLKTYAHLFDDKVMKQLKRRRYTGWGRLSRKLINGIRDKQSGKTILDFLKSDGFANRNFMQLIHDDSLTFKEDIQKAQVSGQGDSLHEHIANLAGSPAIKKGILQTVKVVDELVKVMGRHKPENIVIEMARENQTTQKGQKNSRERMKRIEEGIKELGSQILKEHPVENTQLQNEKLYLYYLQNGRDMYVDQELDINRLSDYDVDHIVPQSFLKDDSIDNKVLTRSDKARGKSDNVPSEEVVKKMKNYWRQLLNAKLITQRKFDNLTKAERGGLSELDKAGFIKRQLVETRQITKHVAQILDSRMNTKYDENDKLIREVKVITLKSKLVSDFRKDFQFYKVREINNYHHAHDAYLNAVVGTALIKKYPKLESEFVYGDYKVYDVRKMIAKSEQEIGKATAKYFFYSNIMNFFKTEITLANGEIRKRPLIETNGETGEIVWDKGRDFATVRKVLSMPQVNIVKKTEVQTGGFSKESILPKRNSDKLIARKKDWDPKKYGGFDSPTVAYSVLVVAKVEKGKSKKLKSVKELLGITIMERSSFEKNPIDFLEAKGYKEVKKDLIIKLPKYSLFELENGRKRMLASAGELQKGNELALPSKYVNFLYLASHYEKLKGSPEDNEQKQLFVEQHKHYLDEIIEQISEFSKRVILADANLDKVLSAYNKHRDKPIREQAENIIHLFTLTNLGAPAAFKYFDTTIDRKRYTSTKEVLDATLIHQSITGLYETRIDLSQLGGDGGPAPAPAPAPAPAPGGMDLLKPLTVERKGVKIKGYWNSQADITCVPKDLLQGEEPVRQQNVTTIHGTQEGDVYYVNLKIDGRRINTEVIGTTLDYAIITPGDVPWILKKPLELTIKLDLEEQQGTLLNNSILSKKGKEELKQLFEKYSALWQSWENQVGHRRIRPHKIATGTVKPTPQKQYHINPKAKPDIQIVINDLLKQGVLIQKESTMNTPVYPVPKPNGRWRMVLDYRAVNKVTPLIAVQNQHSYGILGSLFKGRYKTTIDLSNGFWAHPIVPEDYWITAFTWQGKQYCWTVLPQGFLNSPGLFNGDVVDLLQGIPNVEVYVDDVYISHDSEKEHLEYLDILFNRLKEAGYIISLKKSNIANSIVDFLGFQITNEGRGLTDTFKEKLENITAPTTLKQLQSILGLLNFARNFIPDFTELIAPLYALIPKSPKNYVPWQIEHSTTLETLITKLNGAEYLQGRKGDKTLIMKVNASYTTGYIRYYNEGEKKPISYVSIVFSKTELKFTELEKLLTTVHKGLLKALDLSMGQNIHVYSPIVSMQNIQKTPQTAKKALASRWLSWLSYLEDPRIRFFYDPQMPALKDLPAVDTGKDNKKHPSNFQHIFYTDGSAITSPTKEGHLNAGMGIVYFINKDGNLQKQQEWSISLGNHTAQFAEIAAFEFALKKCLPLGGNILVVTDSNYVAKAYNEELDVWASNGFVNNRKKPLKHISKWKSVADLKRLRPDVVVTHEPGHQKLDSSPHAYGNNLADQLATQASFKVHAGKRTADGSEFEKRTADGSEFESPKKKAKVE

SEQ ID NO: 6554 - protein, 2175 aa, synthetic construct
MPAAKRVKLDGGDKKYSIGLDIGTNSVGWAVITDEYKVPSKKFKVLGNTDRHSIKKNLIGALLFDSGETAEATRLKRTARRRYTRRKNRICYLQEIFSNEMAKVDDSFFHRLEESFLVEEDKKHERHPIFGNIVDEVAYHEKYPTIYHLRKKLVDSTDKADLRLIYLALAHMIKFRGHFLIEGDLNPDNSDVDKLFIQLVQTYNQLFEENPINASGVDAKAILSARLSKSRRLENLIAQLPGEKKNGLFGNLIALSLGLTPNFKSNFDLAEDAKLQLSKDTYDDDLDNLLAQIGDQYADLFLAAKNLSDAILLSDILRVNTEITKAPLSASMIKRYDEHHQDLTLLKALVRQQLPEKYKEIFFDQSKNGYAGYIDGGASQEEFYKFIKPILEKMDGTEELLVKLNREDLLRKQRTFDNGSIPHQIHLGELHAILRRQEDFYPFLKDNREKIEKILTFRIPYYVGPLARGNSRFAWMTRKSEETITPWNFEEVVDKGASAQSFIERMTNFDKNLPNEKVLPKHSLLYEYFTVYNELTKVKYVTEGMRKPAFLSGEQKKAIVDLLFKTNRKVTVKQLKEDYFKKIECFDSVEISGVEDRFNASLGTYHDLLKIIKDKDFLDNEENEDILEDIVLTLTLFEDREMIEERLKTYAHLFDDKVMKQLKRRRYTGWGRLSRKLINGIRDKQSGKTILDFLKSDGFANRNFMQLIHDDSLTFKEDIQKAQVSGQGDSLHEHIANLAGSPAIKKGILQTVKVVDELVKVMGRHKPENIVIEMARENQTTQKGQKNSRERMKRIEEGIKELGSQILKEHPVENTQLQNEKLYLYYLQNGRDMYVDQELDINRLSDYDVDHIVPQSFLKDDSIDNKVLTRSDKARGKSDNVPSEEVVKKMKNYWRQLLNAKLITQRKFDNLTKAERGGLSELDKAGFIKRQLVETRQITKHVAQILDSRMNTKYDENDKLIREVKVITLKSKLVSDFRKDFQFYKVREINNYHHAHDAYLNAVVGTALIKKYPKLESEFVYGDYKVYDVRKMIAKSEQEIGKATAKYFFYSNIMNFFKTEITLANGEIRKRPLIETNGETGEIVWDKGRDFATVRKVLSMPQVNIVKKTEVQTGGFSKESILPKRNSDKLIARKKDWDPKKYGGFDSPTVAYSVLVVAKVEKGKSKKLKSVKELLGITIMERSSFEKNPIDFLEAKGYKEVKKDLIIKLPKYSLFELENGRKRMLASAGELQKGNELALPSKYVNFLYLASHYEKLKGSPEDNEQKQLFVEQHKHYLDEIIEQISEFSKRVILADANLDKVLSAYNKHRDKPIREQAENIIHLFTLTNLGAPAAFKYFDTTIDRKRYTSTKEVLDATLIHQSITGLYETRIDLSQLGGDGGPAPAPAPAPAPAPGGMDLLKPLTVERKGVKIKGYWNSQADITCVPKDLLQGEEPVRQQNVTTIHGTQEGDVYYVNLKIDGRRINTEVIGTTLDYAIITPGDVPWILKKPLELTIKLDLEEQQGTLLNNSILSKKGKEELKQLFEKYSALWQSWENQVGHRRIRPHKIATGTVKPTPQKQYHINPKAKPDIQIVINDLLKQGVLIQKESTMNTPVYPVPKPNGRWRMVLDYRAVNKVTPLIAVQNQHSYGILGSLFKGRYKTTIDLSNGFWAHPIVPEDYWITAFTWQGKQYCWTVLPQGFLNSPGLFNGDVVDLLQGIPNVEVYVDDVYISHDSEKEHLEYLDILFNRLKEAGYIISLKKSNIANSIVDFLGFQITNEGRGLTDTFKEKLENITAPTTLKQLQSILGKLNFARNFIPDFTELIAPLYALIPKSPKNYVPWQIEHSTTLETLITKLNGAEYLQGRKGDKTLIMKVNASYTTGYIRYYNEGEKKPISYVSIVFSKTELKFTELEKLLTTVHKGLLKALDLSMGQNIHVYSPIVSMQNIQKTPQTAKKALASRWLSWLSYLEDPRIRFFYDPQMPALKDLPAVDTGKDNKKHPSNFQHIFYTDGSAITSPTKEGHLNAGMGIVYFINKDGNLQKQQEWSISLGNHTAQFAEIAAFEFALKKCLPLGGNILVVTDSNYVAKAYNEELDVWASNGFVNNRKKPLKHISKWKSVADLKRLRPDVVVTHEPGHQKLDSSPHAYGNNLADQLATQASFKVHAGKRTADGSEFEKRTADGSEFESPKKKAKVE

SEQ ID NO: 6555 - protein, 2097 aa, synthetic construct
MPAAKRVKLDGGDKKYSIGLDIGTNSVGWAVITDEYKVPSKKFKVLGNTDRHSIKKNLIGALLFDSGETAEATRLKRTARRRYTRRKNRICYLQEIFSNEMAKVDDSFFHRLEESFLVEEDKKHERHPIFGNIVDEVAYHEKYPTIYHLRKKLVDSTDKADLRLIYLALAHMIKFRGHFLIEGDLNPDNSDVDKLFIQLVQTYNQLFEENPINASGVDAKAILSARLSKSRRLENLIAQLPGEKKNGLFGNLIALSLGLTPNFKSNFDLAEDAKLQLSKDTYDDDLDNLLAQIGDQYADLFLAAKNLSDAILLSDILRVNTEITKAPLSASMIKRYDEHHQDLTLLKALVRQQLPEKYKEIFFDQSKNGYAGYIDGGASQEEFYKFIKPILEKMDGTEELLVKLNREDLLRKQRTFDNGSIPHQIHLGELHAILRRQEDFYPFLKDNREKIEKILTFRIPYYVGPLARGNSRFAWMTRKSEETITPWNFEEVVDKGASAQSFIERMTNFDKNLPNEKVLPKHSLLYEYFTVYNELTKVKYVTEGMRKPAFLSGEQKKAIVDLLFKTNRKVTVKQLKEDYFKKIECFDSVEISGVEDRFNASLGTYHDLLKIIKDKDFLDNEENEDILEDIVLTLTLFEDREMIEERLKTYAHLFDDKVMKQLKRRRYTGWGRLSRKLINGIRDKQSGKTILDFLKSDGFANRNFMQLIHDDSLTFKEDIQKAQVSGQGDSLHEHIANLAGSPAIKKGILQTVKVVDELVKVMGRHKPENIVIEMARENQTTQKGQKNSRERMKRIEEGIKELGSQILKEHPVENTQLQNEKLYLYYLQNGRDMYVDQELDINRLSDYDVDHIVPQSFLKDDSIDNKVLTRSDKARGKSDNVPSEEVVKKMKNYWRQLLNAKLITQRKFDNLTKAERGGLSELDKAGFIKRQLVETRQITKHVAQILDSRMNTKYDENDKLIREVKVITLKSKLVSDFRKDFQFYKVREINNYHHAHDAYLNAVVGTALIKKYPKLESEFVYGDYKVYDVRKMIAKSEQEIGKATAKYFFYSNIMNFFKTEITLANGEIRKRPLIETNGETGEIVWDKGRDFATVRKVLSMPQVNIVKKTEVQTGGFSKESILPKRNSDKLIARKKDWDPKKYGGFDSPTVAYSVLVVAKVEKGKSKKLKSVKELLGITIMERSSFEKNPIDFLEAKGYKEVKKDLIIKLPKYSLFELENGRKRMLASAGELQKGNELALPSKYVNFLYLASHYEKLKGSPEDNEQKQLFVEQHKHYLDEIIEQISEFSKRVILADANLDKVLSAYNKHRDKPIREQAENIIHLFTLTNLGAPAAFKYFDTTIDRKRYTSTKEVLDATLIHQSITGLYETRIDLSQLGGDGGPAPAPAPAPAPAPGGTLQLEEEYRLFEPESTQKQEMDIWLKNFPQAWAETGGMGTAHCQAPVLIQLKATATPISIRQYPMPHEAYQGIKPHIRRMLDQGILKPCQSPWNTPLLPVKKPGTEDYRPVQDLREVNKRVEDIHPTVPNPYNLLSTLPPSHPWYTVLDLKDAFFCLRLHSESQLLFAFEWRDPEIGLSGQLTWTRLPQGFKNSPTLFNEALHSDLADFRVRYPALVLLQYVDDLLLAAATRTECLEGTKALLETLGNKGYRASAKKAQICLQEVTYLGYSLKDGQRWLTKARKEAILSIPVPKNSRQVREFLGTAGYCRLWIPGFAELAAPLYPLTRPGTLFQWGTEQQLAFEDIKKALLSSPALGLPDITKPFELFIDENSGFAKGVLVQKLGPWKRPVAYLSKKLDTVASGWPPCLRMVAAIAILVKDAGKLTLGQPLTILTSHPVEALVRQPPNKWLSNARMTHYQAMLLDAERVHFGPTVSLNPATLLPLPSGGNHHDCLQILAETHGTRPDLTDQPLPDADLTWYTDGSSFIRNGEREAGAAVTTESEVIWAAPLPPGTSAQRAELIALTQALKMAEGKKLTVYTDSRYAFATTHVHGEIYRRRGWLTSEGKEIKNKNEILALLEALFLPKRLSIIHCPGHQKGDSPQAKGNRLADDTAKKAATETHSSLTVLPAGKRTADGSEFEKRTADGSEFESPKKKAKVE

SEQ ID NO: 6556 - protein, 2089 aa, synthetic construct
MPAAKRVKLDGGDKKYSIGLDIGTNSVGWAVITDEYKVPSKKFKVLGNTDRHSIKKNLIGALLFDSGETAEATRLKRTARRRYTRRKNRICYLQEIFSNEMAKVDDSFFHRLEESFLVEEDKKHERHPIFGNIVDEVAYHEKYPTIYHLRKKLVDSTDKADLRLIYLALAHMIKFRGHFLIEGDLNPDNSDVDKLFIQLVQTYNQLFEENPINASGVDAKAILSARLSKSRRLENLIAQLPGEKKNGLFGNLIALSLGLTPNFKSNFDLAEDAKLQLSKDTYDDDLDNLLAQIGDQYADLFLAAKNLSDAILLSDILRVNTEITKAPLSASMIKRYDEHHQDLTLLKALVRQQLPEKYKEIFFDQSKNGYAGYIDGGASQEEFYKFIKPILEKMDGTEELLVKLNREDLLRKQRTFDNGSIPHQIHLGELHAILRRQEDFYPFLKDNREKIEKILTFRIPYYVGPLARGNSRFAWMTRKSEETITPWNFEEVVDKGASAQSFIERMTNFDKNLPNEKVLPKHSLLYEYFTVYNELTKVKYVTEGMRKPAFLSGEQKKAIVDLLFKTNRKVTVKQLKEDYFKKIECFDSVEISGVEDRFNASLGTYHDLLKIIKDKDFLDNEENEDILEDIVLTLTLFEDREMIEERLKTYAHLFDDKVMKQLKRRRYTGWGRLSRKLINGIRDKQSGKTILDFLKSDGFANRNFMQLIHDDSLTFKEDIQKAQVSGQGDSLHEHIANLAGSPAIKKGILQTVKVVDELVKVMGRHKPENIVIEMARENQTTQKGQKNSRERMKRIEEGIKELGSQILKEHPVENTQLQNEKLYLYYLQNGRDMYVDQELDINRLSDYDVDHIVPQSFLKDDSIDNKVLTRSDKARGKSDNVPSEEVVKKMKNYWRQLLNAKLITQRKFDNLTKAERGGLSELDKAGFIKRQLVETRQITKHVAQILDSRMNTKYDENDKLIREVKVITLKSKLVSDFRKDFQFYKVREINNYHHAHDAYLNAVVGTALIKKYPKLESEFVYGDYKVYDVRKMIAKSEQEIGKATAKYFFYSNIMNFFKTEITLANGEIRKRPLIETNGETGEIVWDKGRDFATVRKVLSMPQVNIVKKTEVQTGGFSKESILPKRNSDKLIARKKDWDPKKYGGFDSPTVAYSVLVVAKVEKGKSKKLKSVKELLGITIMERSSFEKNPIDFLEAKGYKEVKKDLIIKLPKYSLFELENGRKRMLASAGELQKGNELALPSKYVNFLYLASHYEKLKGSPEDNEQKQLFVEQHKHYLDEIIEQISEFSKRVILADANLDKVLSAYNKHRDKPIREQAENIIHLFTLTNLGAPAAFKYFDTTIDRKRYTSTKEVLDATLIHQSITGLYETRIDLSQLGGDGGPAPAPAPAPAPAPGGVPWLTQQPLQLTILVPLQEYQEKILSKTALPEDQKQQLKTLFVKYDNLWQHWENQVGHRKIRPHNIATGDYPPRPQKQYPINPKAKPSIQIVIDDLLKQGVLTPQNSTMNTPVYPVPKPDGRWRMVLDYREVNKTIPLTAAQNQHSAGILATIVRQKYKTTLDLANGFWAHPITPESYWLTAFTWQGKQYCWTRLPQGFLNSPALFNADVVDLLKEIPNVQVYVDDIYLSHDDPKEHVQQLEKVFQILLQAGYVVSLKKSEIGQKTVEFLGFNITKEGRGLTDTFKTKLLNITPPKDLKQLQSILGKLNFARNFIPNFAELVQPLYNLIAPAKGKYIEWSEENTKQLNMVIEALNTASNLEERLPEQRLVIKVNTSPSAGYVRYYNETGKKPIMYLNYVFSKAELKFSMLEKLLTTMHKALIKAMDLAMGQEILVYSPIVSMTKIQKTPLPERKALPIRWITWMTYLEDPRIQFHYDKTLPELKHIPDVYTSSQSPVKHPSQYEGVFYTDGSAIKSPDPTKSNNAGMGIVHATYKPEYQVLNQWSIPLGNHTAQMAEIAAVEFACKKALKIPGPVLVITDSFYVAESANKELPYWKSNGFVNNKKKPLKHISKWKSIAECLSMKPDITIQHEKGISLQIPVFILKGNALADKLATQGSYVVNAGKRTADGSEFEKRTADGSEFESPKKKAKVE

SEQ ID NO: 6557 - protein, 2096 aa, synthetic construct
MPAAKRVKLDGGDKKYSIGLDIGTNSVGWAVITDEYKVPSKKFKVLGNTDRHSIKKNLIGALLFDSGETAEATRLKRTARRRYTRRKNRICYLQEIFSNEMAKVDDSFFHRLEESFLVEEDKKHERHPIFGNIVDEVAYHEKYPTIYHLRKKLVDSTDKADLRLIYLALAHMIKFRGHFLIEGDLNPDNSDVDKLFIQLVQTYNQLFEENPINASGVDAKAILSARLSKSRRLENLIAQLPGEKKNGLFGNLIALSLGLTPNFKSNFDLAEDAKLQLSKDTYDDDLDNLLAQIGDQYADLFLAAKNLSDAILLSDILRVNTEITKAPLSASMIKRYDEHHQDLTLLKALVRQQLPEKYKEIFFDQSKNGYAGYIDGGASQEEFYKFIKPILEKMDGTEELLVKLNREDLLRKQRTFDNGSIPHQIHLGELHAILRRQEDFYPFLKDNREKIEKILTFRIPYYVGPLARGNSRFAWMTRKSEETITPWNFEEVVDKGASAQSFIERMTNFDKNLPNEKVLPKHSLLYEYFTVYNELTKVKYVTEGMRKPAFLSGEQKKAIVDLLFKTNRKVTVKQLKEDYFKKIECFDSVEISGVEDRFNASLGTYHDLLKIIKDKDFLDNEENEDILEDIVLTLTLFEDREMIEERLKTYAHLFDDKVMKQLKRRRYTGWGRLSRKLINGIRDKQSGKTILDFLKSDGFANRNFMQLIHDDSLTFKEDIQKAQVSGQGDSLHEHIANLAGSPAIKKGILQTVKVVDELVKVMGRHKPENIVIEMARENQTTQKGQKNSRERMKRIEEGIKELGSQILKEHPVENTQLQNEKLYLYYLQNGRDMYVDQELDINRLSDYDVDHIVPQSFLKDDSIDNKVLTRSDKARGKSDNVPSEEVVKKMKNYWRQLLNAKLITQRKFDNLTKAERGGLSELDKAGFIKRQLVETRQITKHVAQILDSRMNTKYDENDKLIREVKVITLKSKLVSDFRKDFQFYKVREINNYHHAHDAYLNAVVGTALIKKYPKLESEFVYGDYKVYDVRKMIAKSEQEIGKATAKYFFYSNIMNFFKTEITLANGEIRKRPLIETNGETGEIVWDKGRDFATVRKVLSMPQVNIVKKTEVQTGGFSKESILPKRNSDKLIARKKDWDPKKYGGFDSPTVAYSVLVVAKVEKGKSKKLKSVKELLGITIMERSSFEKNPIDFLEAKGYKEVKKDLIIKLPKYSLFELENGRKRMLASAGELQKGNELALPSKYVNFLYLASHYEKLKGSPEDNEQKQLFVEQHKHYLDEIIEQISEFSKRVILADANLDKVLSAYNKHRDKPIREQAENIIHLFTLTNLGAPAAFKYFDTTIDRKRYTSTKEVLDATLIHQSITGLYETRIDLSQLGGDGGPAPAPAPAPAPAPGGVLNLEEEYRLHEKPVPSSIDPSWLQLFPTVWAERAGMGLANQVPPVVVELRSGASPVAVRQYPMSKEAREGIRPHIQKFLDLGVLVPCRSPWNTPLLPVKKPGTNDYRPVQDLREINKRVQDIHPTVPNPYNLLSSLPPSYTWYSVLDLKDAFFCLRLHPNSQPLFAFEWKDPEKGNTGQLTWTRLPQGFKNSPTLFNEALHRDLAPFRALNPQVVLLQYVDDLLVAAPTYEDCKKGTQKLLQELSKLGYRVSAKKAQLCQREVTYLGYLLKEGKRWLTPARKATVMKIPVPTTPRQVREFLGTAGFCRLWIPGFASLAAPLYPLTKPSIPFIWTEEHQQAFDHIKKALLSAPALALPDLTKPFTLYIDERAGVARGVLTQTLGPWRRPVAYLSKKLDPVASGWPTCLKAVAAVALLLKDADKLTLGQNVTVIASHSLESIVRQPPDRWMTNARMTHYQSLLLNERVSFAPPAVLNPATLLPVESEATPVHRCSEILAEETGTRRDLEDQPLPGVPTWYTDGSSFITEGKRRAGAPIVDGKRTVWASSLPEGTSAQKAELVALTQALRLAEGKNINIYTDSRYAFATAHIHGAIYKQRGWLTSAGKDIKNKEEILALLEAIHLPRRVAIIHCPGHQRGSNPVATGNRRADEAAKQAALSTRVLAGTTKPAGKRTADGSEFEKRTADGSEFESPKKKAKVE

SEQ ID NO: 6558 - protein, 2096 aa, synthetic construct
MPAAKRVKLDGGDKKYSIGLDIGTNSVGWAVITDEYKVPSKKFKVLGNTDRHSIKKNLIGALLFDSGETAEATRLKRTARRRYTRRKNRICYLQEIFSNEMAKVDDSFFHRLEESFLVEEDKKHERHPIFGNIVDEVAYHEKYPTIYHLRKKLVDSTDKADLRLIYLALAHMIKFRGHFLIEGDLNPDNSDVDKLFIQLVQTYNQLFEENPINASGVDAKAILSARLSKSRRLENLIAQLPGEKKNGLFGNLIALSLGLTPNFKSNFDLAEDAKLQLSKDTYDDDLDNLLAQIGDQYADLFLAAKNLSDAILLSDILRVNTEITKAPLSASMIKRYDEHHQDLTLLKALVRQQLPEKYKEIFFDQSKNGYAGYIDGGASQEEFYKFIKPILEKMDGTEELLVKLNREDLLRKQRTFDNGSIPHQIHLGELHAILRRQEDFYPFLKDNREKIEKILTFRIPYYVGPLARGNSRFAWMTRKSEETITPWNFEEVVDKGASAQSFIERMTNFDKNLPNEKVLPKHSLLYEYFTVYNELTKVKYVTEGMRKPAFLSGEQKKAIVDLLFKTNRKVTVKQLKEDYFKKIECFDSVEISGVEDRFNASLGTYHDLLKIIKDKDFLDNEENEDILEDIVLTLTLFEDREMIEERLKTYAHLFDDKVMKQLKRRRYTGWGRLSRKLINGIRDKQSGKTILDFLKSDGFANRNFMQLIHDDSLTFKEDIQKAQVSGQGDSLHEHIANLAGSPAIKKGILQTVKVVDELVKVMGRHKPENIVIEMARENQTTQKGQKNSRERMKRIEEGIKELGSQILKEHPVENTQLQNEKLYLYYLQNGRDMYVDQELDINRLSDYDVDHIVPQSFLKDDSIDNKVLTRSDKARGKSDNVPSEEVVKKMKNYWRQLLNAKLITQRKFDNLTKAERGGLSELDKAGFIKRQLVETRQITKHVAQILDSRMNTKYDENDKLIREVKVITLKSKLVSDFRKDFQFYKVREINNYHHAHDAYLNAVVGTALIKKYPKLESEFVYGDYKVYDVRKMIAKSEQEIGKATAKYFFYSNIMNFFKTEITLANGEIRKRPLIETNGETGEIVWDKGRDFATVRKVLSMPQVNIVKKTEVQTGGFSKESILPKRNSDKLIARKKDWDPKKYGGFDSPTVAYSVLVVAKVEKGKSKKLKSVKELLGITIMERSSFEKNPIDFLEAKGYKEVKKDLIIKLPKYSLFELENGRKRMLASAGELQKGNELALPSKYVNFLYLASHYEKLKGSPEDNEQKQLFVEQHKHYLDEIIEQISEFSKRVILADANLDKVLSAYNKHRDKPIREQAENIIHLFTLTNLGAPAAFKYFDTTIDRKRYTSTKEVLDATLIHQSITGLYETRIDLSQLGGDGGPAPAPAPAPAPAPGGVLNLEEEYRLHEKPVPSSIDPSWLQLFPTVWAERAGMGLANQVPPVVVELRSGASPVAVRQYPMSKEAREGIRPHIQKFLDLGVLVPCRSPWNTPLLPVKKPGTNDYRPVQDLREINKRVQDIHPTVPNPYNLLSSLPPSYTWYSVLDLKDAFFCLRLHPNSQPLFAFEWKDPEKGNTGQLTWTRLPQGFKNSPTLFNEALHRDLAPFRALNPQVVLLQYVDDLLVAAPTYEDCKKGTQKLLQELSKLGYRVSAKKAQLCQREVTYLGYLLKEGKRWLTPARKATVMKIPVPTTPRQVREFLGKAGFCRLFIPGFASLAAPLYPLTKPSIPFIWTEEHQQAFDHIKKALLSAPALALPDLTKPFTLYIDERAGVARGVLTQTLGPWRRPVAYLSKKLDPVASGWPTCLKAVAAVALLLKDADKLTLGQNVTVIASHSLESIVRQPPDRWMTNARMTHYQSLLLNERVSFAPPAVLNPATLLPVESEATPVHRCSEILAEETGTRRDLEDQPLPGVPTWYTDGSSFITEGKRRAGAPIVDGKRTVWASSLPEGTSAQKAELVALTQALRLAEGKNINIYTDSRYAFATAHIHGAIYKQRGWLTSAGKDIKNKEEILALLEAIHLPRRVAIIHCPGHQRGSNPVATGNRRADEAAKQAALSTRVLAGTTKPAGKRTADGSEFEKRTADGSEFESPKKKAKVE

SEQ ID NO: 6559 - protein, 2129 aa, synthetic construct
MPAAKRVKLDGGDKKYSIGLDIGTNSVGWAVITDEYKVPSKKFKVLGNTDRHSIKKNLIGALLFDSGETAEATRLKRTARRRYTRRKNRICYLQEIFSNEMAKVDDSFFHRLEESFLVEEDKKHERHPIFGNIVDEVAYHEKYPTIYHLRKKLVDSTDKADLRLIYLALAHMIKFRGHFLIEGDLNPDNSDVDKLFIQLVQTYNQLFEENPINASGVDAKAILSARLSKSRRLENLIAQLPGEKKNGLFGNLIALSLGLTPNFKSNFDLAEDAKLQLSKDTYDDDLDNLLAQIGDQYADLFLAAKNLSDAILLSDILRVNTEITKAPLSASMIKRYDEHHQDLTLLKALVRQQLPEKYKEIFFDQSKNGYAGYIDGGASQEEFYKFIKPILEKMDGTEELLVKLNREDLLRKQRTFDNGSIPHQIHLGELHAILRRQEDFYPFLKDNREKIEKILTFRIPYYVGPLARGNSRFAWMTRKSEETITPWNFEEVVDKGASAQSFIERMTNFDKNLPNEKVLPKHSLLYEYFTVYNELTKVKYVTEGMRKPAFLSGEQKKAIVDLLFKTNRKVTVKQLKEDYFKKIECFDSVEISGVEDRFNASLGTYHDLLKIIKDKDFLDNEENEDILEDIVLTLTLFEDREMIEERLKTYAHLFDDKVMKQLKRRRYTGWGRLSRKLINGIRDKQSGKTILDFLKSDGFANRNFMQLIHDDSLTFKEDIQKAQVSGQGDSLHEHIANLAGSPAIKKGILQTVKVVDELVKVMGRHKPENIVIEMARENQTTQKGQKNSRERMKRIEEGIKELGSQILKEHPVENTQLQNEKLYLYYLQNGRDMYVDQELDINRLSDYDVDHIVPQSFLKDDSIDNKVLTRSDKARGKSDNVPSEEVVKKMKNYWRQLLNAKLITQRKFDNLTKAERGGLSELDKAGFIKRQLVETRQITKHVAQILDSRMNTKYDENDKLIREVKVITLKSKLVSDFRKDFQFYKVREINNYHHAHDAYLNAVVGTALIKKYPKLESEFVYGDYKVYDVRKMIAKSEQEIGKATAKYFFYSNIMNFFKTEITLANGEIRKRPLIETNGETGEIVWDKGRDFATVRKVLSMPQVNIVKKTEVQTGGFSKESILPKRNSDKLIARKKDWDPKKYGGFDSPTVAYSVLVVAKVEKGKSKKLKSVKELLGITIMERSSFEKNPIDFLEAKGYKEVKKDLIIKLPKYSLFELENGRKRMLASAGELQKGNELALPSKYVNFLYLASHYEKLKGSPEDNEQKQLFVEQHKHYLDEIIEQISEFSKRVILADANLDKVLSAYNKHRDKPIREQAENIIHLFTLTNLGAPAAFKYFDTTIDRKRYTSTKEVLDATLIHQSITGLYETRIDLSQLGGDGGPAPAPAPAPAPAPGGLLGRDLLTKLKAQIQFSTEGPQVTWEDRPAMCLVLNLEEEYRLHEKPVPPSIDPSWLQLFPMVWAEKAGMGLANQVPPVVVELKSDASPVAVRQYPMSKEAREGIRPHIQRFLDLGILVPCQSPWNTPLLPVKKPGTNDYRPVQDLREVNKRVQDIHPTVPNPYNLLSSLPPSHTWYSVLDLKDAFFCLKLHPNSQPLFAFEWRDPEKGNTGQLTWTRLPQGFKNSPTLFNEALHRDLASFRALNPQVVMLQYVDDLLVAAPTYRDCKEGTRRLLQELSKLGYRVSAKKAQLCREEVTYLGYLLKGGKRWLTPARKATVMKIPTPTTPRQVREFLGTAGFCRLWIPGFASLAAPLYPLTRPKVPFTWTEAHQEAFGRIKEALLSAPALALPDLTKPFALYVDEKEGVARGVLTQTLGPWRRPVAYLSKKLDPVASGWPTCLKAIAAVALLLKDADKLTLGQNVLVIAPHNLESIVRQPPDRWMTNARMTHYQSLLLNERVSFAPPAILNPATLLPVESDDTPIHICSEILAEETGTRPDLRDQPLPGVPAWYTDGSSFIMDGRRQAGAAIVDNKRTVWASNLPEGTSAQKAELIALTQALRLAEGKSINIYTDSRYAFATAHVHGAIYKQRGWLTSAGKDIKNKEEILALLEAIHLPKRVAIIHCPGHQRGTDPVATGNRKADEAAKQAAQSTRILTETTKNAGKRTADGSEFEKRTADGSEFESPKKKAKVE

SEQ ID NO: 6560 - protein, 2220 aa, synthetic construct
MPAAKRVKLDGGDKKYSIGLDIGTNSVGWAVITDEYKVPSKKFKVLGNTDRHSIKKNLIGALLFDSGETAEATRLKRTARRRYTRRKNRICYLQEIFSNEMAKVDDSFFHRLEESFLVEEDKKHERHPIFGNIVDEVAYHEKYPTIYHLRKKLVDSTDKADLRLIYLALAHMIKFRGHFLIEGDLNPDNSDVDKLFIQLVQTYNQLFEENPINASGVDAKAILSARLSKSRRLENLIAQLPGEKKNGLFGNLIALSLGLTPNFKSNFDLAEDAKLQLSKDTYDDDLDNLLAQIGDQYADLFLAAKNLSDAILLSDILRVNTEITKAPLSASMIKRYDEHHQDLTLLKALVRQQLPEKYKEIFFDQSKNGYAGYIDGGASQEEFYKFIKPILEKMDGTEELLVKLNREDLLRKQRTFDNGSIPHQIHLGELHAILRRQEDFYPFLKDNREKIEKILTFRIPYYVGPLARGNSRFAWMTRKSEETITPWNFEEVVDKGASAQSFIERMTNFDKNLPNEKVLPKHSLLYEYFTVYNELTKVKYVTEGMRKPAFLSGEQKKAIVDLLFKTNRKVTVKQLKEDYFKKIECFDSVEISGVEDRFNASLGTYHDLLKIIKDKDFLDNEENEDILEDIVLTLTLFEDREMIEERLKTYAHLFDDKVMKQLKRRRYTGWGRLSRKLINGIRDKQSGKTILDFLKSDGFANRNFMQLIHDDSLTFKEDIQKAQVSGQGDSLHEHIANLAGSPAIKKGILQTVKVVDELVKVMGRHKPENIVIEMARENQTTQKGQKNSRERMKRIEEGIKELGSQILKEHPVENTQLQNEKLYLYYLQNGRDMYVDQELDINRLSDYDVDHIVPQSFLKDDSIDNKVLTRSDKARGKSDNVPSEEVVKKMKNYWRQLLNAKLITQRKFDNLTKAERGGLSELDKAGFIKRQLVETRQITKHVAQILDSRMNTKYDENDKLIREVKVITLKSKLVSDFRKDFQFYKVREINNYHHAHDAYLNAVVGTALIKKYPKLESEFVYGDYKVYDVRKMIAKSEQEIGKATAKYFFYSNIMNFFKTEITLANGEIRKRPLIETNGETGEIVWDKGRDFATVRKVLSMPQVNIVKKTEVQTGGFSKESILPKRNSDKLIARKKDWDPKKYGGFDSPTVAYSVLVVAKVEKGKSKKLKSVKELLGITIMERSSFEKNPIDFLEAKGYKEVKKDLIIKLPKYSLFELENGRKRMLASAGELQKGNELALPSKYVNFLYLASHYEKLKGSPEDNEQKQLFVEQHKHYLDEIIEQISEFSKRVILADANLDKVLSAYNKHRDKPIREQAENIIHLFTLTNLGAPAAFKYFDTTIDRKRYTSTKEVLDATLIHQSITGLYETRIDLSQLGGDGGPAPAPAPAPAPAPGGTLGDQGSRGSDPLPEPRVTLTVEGIPTEFLVNTGAEHSVLTKPMGKMGSKRTVVAGATGSKVYPWTTKRLLKIGQKQVTHSFLVIPECPAPLLGRDLLTKLKAQIQFSTEGPQVTWEDRPAMCLVLNLEEEYRLHEKPVPPSIDPSWLQLFPMVWAEKAGMGLANQVPPVVVELKSDASPVAVRQYPMSKEAREGIRPHIQRFLDLGILVPCQSPWNTPLLPVKKPGTNDYRPVQDLREVNKRVQDIHPTVPNPYNLLSSLPPSHTWYSVLDLKDAFFCLKLHPNSQPLFAFEWRDPEKGNTGQLTWTRLPQGFKNSPTLFNEALHRDLASFRALNPQVVMLQYVDDLLVAAPTYRDCKEGTRRLLQELSKLGYRVSAKKAQLCREEVTYLGYLLKGGKRWLTPARKATVMKIPTPTTPRQVREFLGTAGFCRLWIPGFASLAAPLYPLTRPKVPFTWTEAHQEAFGRIKEALLSAPALALPDLTKPFALYVDEKEGVARGVLTQTLGPWRRPVAYLSKKLDPVASGWPTCLKAIAAVALLLKDADKLTLGQNVLVIAPHNLESIVRQPPDRWMTNARMTHYQSLLLNERVSFAPPAILNPATLLPVESDDTPIHICSEILAEETGTRPDLRDQPLPGVPAWYTDGSSFIMDGRRQAGAAIVDNKRTVWASNLPEGTSAQKAELIALTQALRLAEGKSINIYTDSRYAFATAHVHGAIYKQRGWLTSAGKDIKNKEEILALLEAIHLPKRVAIIHCPGHQRGTDPVATGNRKADEAAKQAAQSTRILTETTKNAGKRTADGSEFEKRTADGSEFESPKKKAKVE

SEQ ID NO: 6561 - protein, 2098 aa, synthetic construct
MPAAKRVKLDGGDKKYSIGLDIGTNSVGWAVITDEYKVPSKKFKVLGNTDRHSIKKNLIGALLFDSGETAEATRLKRTARRRYTRRKNRICYLQEIFSNEMAKVDDSFFHRLEESFLVEEDKKHERHPIFGNIVDEVAYHEKYPTIYHLRKKLVDSTDKADLRLIYLALAHMIKFRGHFLIEGDLNPDNSDVDKLFIQLVQTYNQLFEENPINASGVDAKAILSARLSKSRRLENLIAQLPGEKKNGLFGNLIALSLGLTPNFKSNFDLAEDAKLQLSKDTYDDDLDNLLAQIGDQYADLFLAAKNLSDAILLSDILRVNTEITKAPLSASMIKRYDEHHQDLTLLKALVRQQLPEKYKEIFFDQSKNGYAGYIDGGASQEEFYKFIKPILEKMDGTEELLVKLNREDLLRKQRTFDNGSIPHQIHLGELHAILRRQEDFYPFLKDNREKIEKILTFRIPYYVGPLARGNSRFAWMTRKSEETITPWNFEEVVDKGASAQSFIERMTNFDKNLPNEKVLPKHSLLYEYFTVYNELTKVKYVTEGMRKPAFLSGEQKKAIVDLLFKTNRKVTVKQLKEDYFKKIECFDSVEISGVEDRFNASLGTYHDLLKIIKDKDFLDNEENEDILEDIVLTLTLFEDREMIEERLKTYAHLFDDKVMKQLKRRRYTGWGRLSRKLINGIRDKQSGKTILDFLKSDGFANRNFMQLIHDDSLTFKEDIQKAQVSGQGDSLHEHIANLAGSPAIKKGILQTVKVVDELVKVMGRHKPENIVIEMARENQTTQKGQKNSRERMKRIEEGIKELGSQILKEHPVENTQLQNEKLYLYYLQNGRDMYVDQELDINRLSDYDVDHIVPQSFLKDDSIDNKVLTRSDKARGKSDNVPSEEVVKKMKNYWRQLLNAKLITQRKFDNLTKAERGGLSELDKAGFIKRQLVETRQITKHVAQILDSRMNTKYDENDKLIREVKVITLKSKLVSDFRKDFQFYKVREINNYHHAHDAYLNAVVGTALIKKYPKLESEFVYGDYKVYDVRKMIAKSEQEIGKATAKYFFYSNIMNFFKTEITLANGEIRKRPLIETNGETGEIVWDKGRDFATVRKVLSMPQVNIVKKTEVQTGGFSKESILPKRNSDKLIARKKDWDPKKYGGFDSPTVAYSVLVVAKVEKGKSKKLKSVKELLGITIMERSSFEKNPIDFLEAKGYKEVKKDLIIKLPKYSLFELENGRKRMLASAGELQKGNELALPSKYVNFLYLASHYEKLKGSPEDNEQKQLFVEQHKHYLDEIIEQISEFSKRVILADANLDKVLSAYNKHRDKPIREQAENIIHLFTLTNLGAPAAFKYFDTTIDRKRYTSTKEVLDATLIHQSITGLYETRIDLSQLGGDGGPAPAPAPAPAPAPGGTLNIEDEYRLHETSKEPDVSLGSTWLSDFPQAWAETGGMGLAVRQAPLIIPLKATSTPVSIKQYPMSQEARLGIKPHIQRLLDQGILVPCQSPWNTPLLPVKKPGTNDYRPVQDLREVNKRVEDIHPTVPNPYNLLSGLPPSHQWYTVLDLKDAFFCLRLHPTSQPLFAFEWRDPEMGISGQLTWTRLPQGFKNSPTLFNEALHRDLAGFRIQHPDLILLQYVDDLLLAATSELDCQQGTRALLQTLGDLGYRASAKKAQICQKQVKYLGYLLKEGQRWLTEARKETVMGQPIPKTPRQLREFLGTAGFCRLWIPGFAEMAAPLYPLTKPGTLFNWGPDQQKAFQEIKQALLTAPALGLPDLTKPFELFVDEKQGYAKGVLTQKLGPWRRPVAYLSKKLDPVAAGWPPCLRMVAAIAVLTKDAGKLTMGQPLVILAPHAVEALVKQPPDRWLSNARMTHYQALLLDTDRVQFGPVVALNPATLLPLPEEGLQHDCLDILAEAHGTRSDLMDQPLPDADHTWYTDGSSFLQEGQRKAGAAVTTETEVIWARALPAGTSAQRAELIALTQALKMAEGKKLNVYTDSRYAFATAHIHGEIYRRRGWLTSEGKEIKNKDEILALLKALFLPKRLSIIHCPGHQKGNSAEARGNRMADQAAREVATRETPETSTLLAGKRTADGSEFEKRTADGSEFESPKKKAKVE

SEQ ID NO: 6562 - protein, 2098 aa, synthetic construct
MPAAKRVKLDGGDKKYSIGLDIGTNSVGWAVITDEYKVPSKKFKVLGNTDRHSIKKNLIGALLFDSGETAEATRLKRTARRRYTRRKNRICYLQEIFSNEMAKVDDSFFHRLEESFLVEEDKKHERHPIFGNIVDEVAYHEKYPTIYHLRKKLVDSTDKADLRLIYLALAHMIKFRGHFLIEGDLNPDNSDVDKLFIQLVQTYNQLFEENPINASGVDAKAILSARLSKSRRLENLIAQLPGEKKNGLFGNLIALSLGLTPNFKSNFDLAEDAKLQLSKDTYDDDLDNLLAQIGDQYADLFLAAKNLSDAILLSDILRVNTEITKAPLSASMIKRYDEHHQDLTLLKALVRQQLPEKYKEIFFDQSKNGYAGYIDGGASQEEFYKFIKPILEKMDGTEELLVKLNREDLLRKQRTFDNGSIPHQIHLGELHAILRRQEDFYPFLKDNREKIEKILTFRIPYYVGPLARGNSRFAWMTRKSEETITPWNFEEVVDKGASAQSFIERMTNFDKNLPNEKVLPKHSLLYEYFTVYNELTKVKYVTEGMRKPAFLSGEQKKAIVDLLFKTNRKVTVKQLKEDYFKKIECFDSVEISGVEDRFNASLGTYHDLLKIIKDKDFLDNEENEDILEDIVLTLTLFEDREMIEERLKTYAHLFDDKVMKQLKRRRYTGWGRLSRKLINGIRDKQSGKTILDFLKSDGFANRNFMQLIHDDSLTFKEDIQKAQVSGQGDSLHEHIANLAGSPAIKKGILQTVKVVDELVKVMGRHKPENIVIEMARENQTTQKGQKNSRERMKRIEEGIKELGSQILKEHPVENTQLQNEKLYLYYLQNGRDMYVDQELDINRLSDYDVDHIVPQSFLKDDSIDNKVLTRSDKARGKSDNVPSEEVVKKMKNYWRQLLNAKLITQRKFDNLTKAERGGLSELDKAGFIKRQLVETRQITKHVAQILDSRMNTKYDENDKLIREVKVITLKSKLVSDFRKDFQFYKVREINNYHHAHDAYLNAVVGTALIKKYPKLESEFVYGDYKVYDVRKMIAKSEQEIGKATAKYFFYSNIMNFFKTEITLANGEIRKRPLIETNGETGEIVWDKGRDFATVRKVLSMPQVNIVKKTEVQTGGFSKESILPKRNSDKLIARKKDWDPKKYGGFDSPTVAYSVLVVAKVEKGKSKKLKSVKELLGITIMERSSFEKNPIDFLEAKGYKEVKKDLIIKLPKYSLFELENGRKRMLASAGELQKGNELALPSKYVNFLYLASHYEKLKGSPEDNEQKQLFVEQHKHYLDEIIEQISEFSKRVILADANLDKVLSAYNKHRDKPIREQAENIIHLFTLTNLGAPAAFKYFDTTIDRKRYTSTKEVLDATLIHQSITGLYETRIDLSQLGGDGGPAPAPAPAPAPAPGGTLNIEDEHRLHETSKEPDVSLGSTWLSDFPQAWAETGGMGLAVRQAPLIIPLKATSTPVSIKQYPMSQEARLGIKPHIQRLLDQGILVPCQSPWNTPLLPVKKPGTNDYRPVQDLREVNKRVEDIHPTVPNPYNLLSGLPPSHQWYTVLDLKDAFFCLRLHPTSQPLFAFEWRDPEMGISGQLTWTRLPQGFKNSPTLFDEALHRDLADFRIQHPDLILLQYVDDLLLAATSELDCQQGTRALLQTLGNLGYRASAKKAQICQKQVKYLGYLLKEGQRWLTEARKETVMGQPTPKTPRQLREFLGTAGFCRLWIPGFAEMAAPLYPLTKTGTLFNWGPDQQKAYQEIKQALLTAPALGLPDLTKPFELFVDEKQGYAKGVLTQKLGPWRRPVAYLSKKLDPVAAGWPPCLRMVAAIAVLTKDAGKLTMGQPLVILAPHAVEALVKQPPDRWLSNARMTHYQALLLDTDRVQFGPVVALNPATLLPLPEEGLQHNCLDILAEAHGTRPDLTDQPLPDADHTWYTDGSSLLQEGQRKAGAAVTTETEVIWAKALPAGTSAQRAELIALTQALKMAEGKKLNVYTDSRYAFATAHIHGEIYRRRGLLTSEGKEIKNKDEILALLKALFLPKRLSIIHCPGHQKGHSAEARGNRMADQAARKAAITETPDTSTLLAGKRTADGSEFEKRTADGSEFESPKKKAKVE

SEQ ID NO: 6563 - protein, 2098 aa, synthetic construct; identical to SEQ ID NO: 6562

SEQ ID NO: 6564 - protein, 2092 aa, synthetic construct
MPAAKRVKLDGGDKKYSIGLDIGTNSVGWAVITDEYKVPSKKFKVLGNTDRHSIKKNLIGALLFDSGETAEATRLKRTARRRYTRRKNRICYLQEIFSNEMAKVDDSFFHRLEESFLVEEDKKHERHPIFGNIVDEVAYHEKYPTIYHLRKKLVDSTDKADLRLIYLALAHMIKFRGHFLIEGDLNPDNSDVDKLFIQLVQTYNQLFEENPINASGVDAKAILSARLSKSRRLENLIAQLPGEKKNGLFGNLIALSLGLTPNFKSNFDLAEDAKLQLSKDTYDDDLDNLLAQIGDQYADLFLAAKNLSDAILLSDILRVNTEITKAPLSASMIKRYDEHHQDLTLLKALVRQQLPEKYKEIFFDQSKNGYAGYIDGGASQEEFYKFIKPILEKMDGTEELLVKLNREDLLRKQRTFDNGSIPHQIHLGELHAILRRQEDFYPFLKDNREKIEKILTFRIPYYVGPLARGNSRFAWMTRKSEETITPWNFEEVVDKGASAQSFIERMTNFDKNLPNEKVLPKHSLLYEYFTVYNELTKVKYVTEGMRKPAFLSGEQKKAIVDLLFKTNRKVTVKQLKEDYFKKIECFDSVEISGVEDRFNASLGTYHDLLKIIKDKDFLDNEENEDILEDIVLTLTLFEDREMIEERLKTYAHLFDDKVMKQLKRRRYTGWGRLSRKLINGIRDKQSGKTILDFLKSDGFANRNFMQLIHDDSLTFKEDIQKAQVSGQGDSLHEHIANLAGSPAIKKGILQTVKVVDELVKVMGRHKPENIVIEMARENQTTQKGQKNSRERMKRIEEGIKELGSQILKEHPVENTQLQNEKLYLYYLQNGRDMYVDQELDINRLSDYDVDHIVPQSFLKDDSIDNKVLTRSDKARGKSDNVPSEEVVKKMKNYWRQLLNAKLITQRKFDNLTKAERGGLSELDKAGFIKRQLVETRQITKHVAQILDSRMNTKYDENDKLIREVKVITLKSKLVSDFRKDFQFYKVREINNYHHAHDAYLNAVVGTALIKKYPKLESEFVYGDYKVYDVRKMIAKSEQEIGKATAKYFFYSNIMNFFKTEITLANGEIRKRPLIETNGETGEIVWDKGRDFATVRKVLSMPQVNIVKKTEVQTGGFSKESILPKRNSDKLIARKKDWDPKKYGGFDSPTVAYSVLVVAKVEKGKSKKLKSVKELLGITIMERSSFEKNPIDFLEAKGYKEVKKDLIIKLPKYSLFELENGRKRMLASAGELQKGNELALPSKYVNFLYLASHYEKLKGSPEDNEQKQLFVEQHKHYLDEIIEQISEFSKRVILADANLDKVLSAYNKHRDKPIREQAENIIHLFTLTNLGAPAAFKYFDTTIDRKRYTSTKEVLDATLIHQSITGLYETRIDLSQLGGDGGPAPAPAPAPAPAPGGTLQLDDEYRLYSPLVKPDQNIQFWLEQFPQAWAETAGMGLAKQVPPQVIQLKASATPVSVRQYPLSKEAQEGIRPHVQRLIQQGILVPVQSPWNTPLLPVRKPGTNDYRPVQDLREVNKRVQDIHPTVPNPYNLLCALPPQRSWYTVLDLKDAFFCLRLHPTSQPLFAFEWRDPGTGRTGQLTWTRLPQGFKNSPTIFDEALHRDLANFRIQHPQVTLLQYVDDLLLAGATKQDCLEGTKALLLELSDLGYRASAKKAQICRREVTYLGYSLRDGQRWLTEARKKTVVQIPAPTTAKQVREFLGTAGFCRLWIPGFATLAAPLYPLTKEKGEFSWAPEHQKAFDAIKKALLSAPALALPDVTKPFTLYVDERKGVARGVLTQTLGPWRRPVAYLSKKLDPVASGWPVCLKAIAAVAILVKDADKLTLGQNITVIAPHALENIVRQPPDRWMTNARMTHYQSLLLTERVTFAPPAALNPATLLPEETDEPVTHDCHQLLIEETGVRKDLTDIPLTGEVLTWFTDGSSYVVEGKRMAGAAVVDGTRTIWASSLPEGTSAQKAELMALTQALRLAEGKSINIYTDSRYAFATAHVHGAIYKQRGLLTSAGREIKNKEEILSLLEALHLPKRLAIIHCPGHQKAKDPISRGNQMADRVAKQAAQGVNLLAGKRTADGSEFEKRTADGSEFESPKKKAKVE

SEQ ID NO: 6565 - protein, 2092 aa, synthetic construct; identical to SEQ ID NO: 6564

SEQ ID NO: 6566 - protein, 2178 aa, synthetic construct
MPAAKRVKLDGGDKKYSIGLDIGTNSVGWAVITDEYKVPSKKFKVLGNTDRHSIKKNLIGALLFDSGETAEATRLKRTARRRYTRRKNRICYLQEIFSNEMAKVDDSFFHRLEESFLVEEDKKHERHPIFGNIVDEVAYHEKYPTIYHLRKKLVDSTDKADLRLIYLALAHMIKFRGHFLIEGDLNPDNSDVDKLFIQLVQTYNQLFEENPINASGVDAKAILSARLSKSRRLENLIAQLPGEKKNGLFGNLIALSLGLTPNFKSNFDLAEDAKLQLSKDTYDDDLDNLLAQIGDQYADLFLAAKNLSDAILLSDILRVNTEITKAPLSASMIKRYDEHHQDLTLLKALVRQQLPEKYKEIFFDQSKNGYAGYIDGGASQEEFYKFIKPILEKMDGTEELLVKLNREDLLRKQRTFDNGSIPHQIHLGELHAILRRQEDFYPFLKDNREKIEKILTFRIPYYVGPLARGNSRFAWMTRKSEETITPWNFEEVVDKGASAQSFIERMTNFDKNLPNEKVLPKHSLLYEYFTVYNELTKVKYVTEGMRKPAFLSGEQKKAIVDLLFKTNRKVTVKQLKEDYFKKIECFDSVEISGVEDRFNASLGTYHDLLKIIKDKDFLDNEENEDILEDIVLTLTLFEDREMIEERLKTYAHLFDDKVMKQLKRRRYTGWGRLSRKLINGIRDKQSGKTILDFLKSDGFANRNFMQLIHDDSLTFKEDIQKAQVSGQGDSLHEHIANLAGSPAIKKGILQTVKVVDELVKVMGRHKPENIVIEMARENQTTQKGQKNSRERMKRIEEGIKELGSQILKEHPVENTQLQNEKLYLYYLQNGRDMYVDQELDINRLSDYDVDHIVPQSFLKDDSIDNKVLTRSDKARGKSDNVPSEEVVKKMKNYWRQLLNAKLITQRKFDNLTKAERGGLSELDKAGFIKRQLVETRQITKHVAQILDSRMNTKYDENDKLIREVKVITLKSKLVSDFRKDFQFYKVREINNYHHAHDAYLNAVVGTALIKKYPKLESEFVYGDYKVYDVRKMIAKSEQEIGKATAKYFFYSNIMNFFKTEITLANGEIRKRPLIETNGETGEIVWDKGRDFATVRKVLSMPQVNIVKKTEVQTGGFSKESILPKRNSDKLIARKKDWDPKKYGGFDSPTVAYSVLVVAKVEKGKSKKLKSVKELLGITIMERSSFEKNPIDFLEAKGYKEVKKDLIIKLPKYSLFELENGRKRMLASAGELQKGNELALPSKYVNFLYLASHYEKLKGSPEDNEQKQLFVEQHKHYLDEIIEQISEFSKRVILADANLDKVLSAYNKHRDKPIREQAENIIHLFTLTNLGAPAAFKYFDTTIDRKRYTSTKEVLDATLIHQSITGLYETRIDLSQLGGDGGPAPAPAPAPAPAPGGMDPLQLLQPLEAEIKGTKLKAHWNSGATITCVPQAFLEEEVPIKNIWIKTIHGEKEQPVYYLTFKIQGRKVEAEVISSPYDYILVSPSDIPWLMKKPLQLTTLVPLQEYEERLLKQTMLTGSYKEKLQSLFLKYDALWQHWENQVGHRRIKPHHIATGTVNPRPQKQYPINPKAKASIQTVINDLLKQGVLIQQNSIMNTPVYPVPKPDGKWRMVLDYREVNKTIPLIAAQNQHSAGILSSIFRGKYKTTLDLSNGFWAHSITPESYWLTAFTWLGQQYCWTRLPQGFLNSPALFNADVVDLLKEVPNVQVYVDDIYISHDDPREHLEQLEKVFSLLLNAGYVVSLKKSEIAQHEVEFLGFNITKEGRGLTETFKQKLLNITPPRDLKQLQSILGLLNFARNFIPNFSELVKPLYNIIATAPGKYITWTTDNSQQLQNIISMLNSAENLEERNPEVRLIMKVNTSPSAGYIRFYNEFAKRPIMYLNYVYTKAEVKFTNTEKLLTTIHKGLIKALDLGMGQEILVYSPIVSMTKIQKTPLPERKALPIRWITWMSYLEDPRIQFHYDKTLPELQQVPTVTDDIIAKIKHPSEFSMVFYTDGSAIKHPNVNKSHNAGMGIAQVQFKPEFTVINTWSIPLGDHTAQLAEVAAVEFACKKALKIDGPVLIVTDSFYVAESVNKELPYWQSNGFFNNKKKPLKHVSKWKSIADCIQLKPDIIIIHEKGHQPTASTFHTEGNNLADKLATQGSYVVNAGKRTADGSEFEKRTADGSEFESPKKKAKVE

SEQ ID NO: 6567 - protein, 2096 aa, synthetic construct; identical to SEQ ID NO: 4509

SEQ ID NO: 6568 - protein, 2098 aa, synthetic construct; identical to SEQ ID NO: 4510

SEQ ID NO: 6569 - protein, 2093 aa, synthetic construct
MPAAKRVKLDGGDKKYSIGLDIGTNSVGWAVITDEYKVPSKKFKVLGNTDRHSIKKNLIGALLFDSGETAEATRLKRTARRRYTRRKNRICYLQEIFSNEMAKVDDSFFHRLEESFLVEEDKKHERHPIFGNIVDEVAYHEKYPTIYHLRKKLVDSTDKADLRLIYLALAHMIKFRGHFLIEGDLNPDNSDVDKLFIQLVQTYNQLFEENPINASGVDAKAILSARLSKSRRLENLIAQLPGEKKNGLFGNLIALSLGLTPNFKSNFDLAEDAKLQLSKDTYDDDLDNLLAQIGDQYADLFLAAKNLSDAILLSDILRVNTEITKAPLSASMIKRYDEHHQDLTLLKALVRQQLPEKYKEIFFDQSKNGYAGYIDGGASQEEFYKFIKPILEKMDGTEELLVKLNREDLLRKQRTFDNGSIPHQIHLGELHAILRRQEDFYPFLKDNREKIEKILTFRIPYYVGPLARGNSRFAWMTRKSEETITPWNFEEVVDKGASAQSFIERMTNFDKNLPNEKVLPKHSLLYEYFTVYNELTKVKYVTEGMRKPAFLSGEQKKAIVDLLFKTNRKVTVKQLKEDYFKKIECFDSVEISGVEDRFNASLGTYHDLLKIIKDKDFLDNEENEDILEDIVLTLTLFEDREMIEERLKTYAHLFDDKVMKQLKRRRYTGWGRLSRKLINGIRDKQSGKTILDFLKSDGFANRNFMQLIHDDSLTFKEDIQKAQVSGQGDSLHEHIANLAGSPAIKKGILQTVKVVDELVKVMGRHKPENIVIEMARENQTTQKGQKNSRERMKRIEEGIKELGSQILKEHPVENTQLQNEKLYLYYLQNGRDMYVDQELDINRLSDYDVDHIVPQSFLKDDSIDNKVLTRSDKARGKSDNVPSEEVVKKMKNYWRQLLNAKLITQRKFDNLTKAERGGLSELDKAGFIKRQLVETRQITKHVAQILDSRMNTKYDENDKLIREVKVITLKSKLVSDFRKDFQFYKVREINNYHHAHDAYLNAVVGTALIKKYPKLESEFVYGDYKVYDVRKMIAKSEQEIGKATAKYFFYSNIMNFFKTEITLANGEIRKRPLIETNGETGEIVWDKGRDFATVRKVLSMPQVNIVKKTEVQTGGFSKESILPKRNSDKLIARKKDWDPKKYGGFDSPTVAYSVLVVAKVEKGKSKKLKSVKELLGITIMERSSFEKNPIDFLEAKGYKEVKKDLIIKLPKYSLFELENGRKRMLASAGELQKGNELALPSKYVNFLYLASHYEKLKGSPEDNEQKQLFVEQHKHYLDEIIEQISEFSKRVILADANLDKVLSAYNKHRDKPIREQAENIIHLFTLTNLGAPAAFKYFDTTIDRKRYTSTKEVLDATLIHQSITGLYETRIDLSQLGGDGGGGSGGGGGTAPLEEEYRLFLEAPIQNVTLLEQWKREIPKVWAEINPPGLASTQAPIHVQLLSTALPVRVRQYPITLEAKRSLRETIRKFRAAGILRPVHSPWNTPLLPVRKSGTSEYRMVQDLREVNKRVETIHPTVPNPYTLLSLLPPDRIWYSVLDLKDAFFCIPLAPESQLIFAFEWADAEEGESGQLTWTRLPQGFKNSPTLFNEALNRDLQGFRLDHPSVSLLQYVDDLLIAADTQAACLSATRDLLMTLAELGYRVSGKKAQLCQEEVTYLGFKIHKGSRSLSNSRTQAILQIPVPKTKRQVREFLGTIGYCRLWIPGFAELAQPLYAATRPGNDPLVWGEKEEEAFQSLKLALTQPPALALPSLDKPFQLFVEETSGAAKGVLTQALGPWKRPVAYLSKRLDPVAAGWPRCLRAIAAAALLTREASKLTFGQDIEITSSHNLESLLRSPPDKWLTNARITQYQVLLLDPPRVRFKQTAALNPATLLPETDDTLPIHHCLDTLDSLTSTRPDLTDQPLAQAEATLFTDGSSYIRDGKRYAGAAVVTLDSVIWAEPLPIGTSAQKAELIALTKALEWSKDKSVNIYTDSRYAFATLHVHGMIYRERGWLTAGGKAIKNAPEILALLTAVWLPKRVAVMHCKGHQKDDAPTSTGNRRADEVAREVAIRPLSTQATISAGKRTADGSEFEKRTADGSEFESPKKKAKVE

SEQ ID NO: 6570 - protein, 2082 aa, synthetic construct
MPAAKRVKLDGGDKKYSIGLDIGTNSVGWAVITDEYKVPSKKFKVLGNTDRHSIKKNLIGALLFDSGETAEATRLKRTARRRYTRRKNRICYLQEIFSNEMAKVDDSFFHRLEESFLVEEDKKHERHPIFGNIVDEVAYHEKYPTIYHLRKKLVDSTDKADLRLIYLALAHMIKFRGHFLIEGDLNPDNSDVDKLFIQLVQTYNQLFEENPINASGVDAKAILSARLSKSRRLENLIAQLPGEKKNGLFGNLIALSLGLTPNFKSNFDLAEDAKLQLSKDTYDDDLDNLLAQIGDQYADLFLAAKNLSDAILLSDILRVNTEITKAPLSASMIKRYDEHHQDLTLLKALVRQQLPEKYKEIFFDQSKNGYAGYIDGGASQEEFYKFIKPILEKMDGTEELLVKLNREDLLRKQRTFDNGSIPHQIHLGELHAILRRQEDFYPFLKDNREKIEKILTFRIPYYVGPLARGNSRFAWMTRKSEETITPWNFEEVVDKGASAQSFIERMTNFDKNLPNEKVLPKHSLLYEYFTVYNELTKVKYVTEGMRKPAFLSGEQKKAIVDLLFKTNRKVTVKQLKEDYFKKIECFDSVEISGVEDRFNASLGTYHDLLKIIKDKDFLDNEENEDILEDIVLTLTLFEDREMIEERLKTYAHLFDDKVMKQLKRRRYTGWGRLSRKLINGIRDKQSGKTILDFLKSDGFANRNFMQLIHDDSLTFKEDIQKAQVSGQGDSLHEHIANLAGSPAIKKGILQTVKVVDELVKVMGRHKPENIVIEMARENQTTQKGQKNSRERMKRIEEGIKELGSQILKEHPVENTQLQNEKLYLYYLQNGRDMYVDQELDINRLSDYDVDHIVPQSFLKDDSIDNKVLTRSDKARGKSDNVPSEEVVKKMKNYWRQLLNAKLITQRKFDNLTKAERGGLSELDKAGFIKRQLVETRQITKHVAQILDSRMNTKYDENDKLIREVKVITLKSKLVSDFRKDFQFYKVREINNYHHAHDAYLNAVVGTALIKKYPKLESEFVYGDYKVYDVRKMIAKSEQEIGKATAKYFFYSNIMNFFKTEITLANGEIRKRPLIETNGETGEIVWDKGRDFATVRKVLSMPQVNIVKKTEVQTGGFSKESILPKRNSDKLIARKKDWDPKKYGGFDSPTVAYSVLVVAKVEKGKSKKLKSVKELLGITIMERSSFEKNPIDFLEAKGYKEVKKDLIIKLPKYSLFELENGRKRMLASAGELQKGNELALPSKYVNFLYLASHYEKLKGSPEDNEQKQLFVEQHKHYLDEIIEQISEFSKRVILADANLDKVLSAYNKHRDKPIREQAENIIHLFTLTNLGAPAAFKYFDTTIDRKRYTSTKEVLDATLIHQSITGLYETRIDLSQLGGDGGGGSGGGGGVPWILKKPLELTIKLDLEEQQGTLLNNSILSKKGKEELKQLFEKYSALWQSWENQVGHRRIRPHKIATGTVKPTPQKQYHINPKAKPDIQIVINDLLKQGVLIQKESTMNTPVYPVPKPNGRWRMVLDYRAVNKVTPLIAVQNQHSYGILGSLFKGRYKTTIDLSNGFWAHPIVPEDYWITAFTWQGKQYCWTVLPQGFLNSPGLFTGDVVDLLQGIPNVEVYVDDVYISHDSEKEHLEYLDILFNRLKEAGYIISLKKSNIANSIVDFLGFQITNEGRGLTDTFKEKLENITAPTTLKQLQSILGLLNFARNFIPDFTELIAPLYALIPKSTKNYVPWQIEHSTTLETLITKLNGAEYLQGRKGDKTLIMKVNASYTTGYIRYYNEGEKKPISYVSIVFSKTELKFTELEKLLTTVHKGLLKALDLSMGQNIHVYSPIVSMQNIQKTPQTAKKALASRWLSWLSYLEDPRIRFFYDPQMPALKDLPAVDTGKDNKKHPSNFQHIFYTDGSAITSPTKEGHLNAGMGIVYFINKDGNLQKQQEWSISLGNHTAQFAEIAAFEFALKKCLPLGGNILVVTDSNYVAKAYNEELDVWASNGFVNNRKKPLKHISKWKSVADLKRLRPDVVVTHEPGHQKLDSSPHAYGNNLADQLATQASFKVHAGKRTADGSEFEKRTADGSEFESPKKKAKVE

SEQ ID NO: 6571 - protein, 2082 aa, synthetic construct
MPAAKRVKLDGGDKKYSIGLDIGTNSVGWAVITDEYKVPSKKFKVLGNTDRHSIKKNLIGALLFDSGETAEATRLKRTARRRYTRRKNRICYLQEIFSNEMAKVDDSFFHRLEESFLVEEDKKHERHPIFGNIVDEVAYHEKYPTIYHLRKKLVDSTDKADLRLIYLALAHMIKFRGHFLIEGDLNPDNSDVDKLFIQLVQTYNQLFEENPINASGVDAKAILSARLSKSRRLENLIAQLPGEKKNGLFGNLIALSLGLTPNFKSNFDLAEDAKLQLSKDTYDDDLDNLLAQIGDQYADLFLAAKNLSDAILLSDILRVNTEITKAPLSASMIKRYDEHHQDLTLLKALVRQQLPEKYKEIFFDQSKNGYAGYIDGGASQEEFYKFIKPILEKMDGTEELLVKLNREDLLRKQRTFDNGSIPHQIHLGELHAILRRQEDFYPFLKDNREKIEKILTFRIPYYVGPLARGNSRFAWMTRKSEETITPWNFEEVVDKGASAQSFIERMTNFDKNLPNEKVLPKHSLLYEYFTVYNELTKVKYVTEGMRKPAFLSGEQKKAIVDLLFKTNRKVTVKQLKEDYFKKIECFDSVEISGVEDRFNASLGTYHDLLKIIKDKDFLDNEENEDILEDIVLTLTLFEDREMIEERLKTYAHLFDDKVMKQLKRRRYTGWGRLSRKLINGIRDKQSGKTILDFLKSDGFANRNFMQLIHDDSLTFKEDIQKAQVSGQGDSLHEHIANLAGSPAIKKGILQTVKVVDELVKVMGRHKPENIVIEMARENQTTQKGQKNSRERMKRIEEGIKELGSQILKEHPVENTQLQNEKLYLYYLQNGRDMYVDQELDINRLSDYDVDHIVPQSFLKDDSIDNKVLTRSDKARGKSDNVPSEEVVKKMKNYWRQLLNAKLITQRKFDNLTKAERGGLSELDKAGFIKRQLVETRQITKHVAQILDSRMNTKYDENDKLIREVKVITLKSKLVSDFRKDFQFYKVREINNYHHAHDAYLNAVVGTALIKKYPKLESEFVYGDYKVYDVRKMIAKSEQEIGKATAKYFFYSNIMNFFKTEITLANGEIRKRPLIETNGETGEIVWDKGRDFATVRKVLSMPQVNIVKKTEVQTGGFSKESILPKRNSDKLIARKKDWDPKKYGGFDSPTVAYSVLVVAKVEKGKSKKLKSVKELLGITIMERSSFEKNPIDFLEAKGYKEVKKDLIIKLPKYSLFELENGRKRMLASAGELQKGNELALPSKYVNFLYLASHYEKLKGSPEDNEQKQLFVEQHKHYLDEIIEQISEFSKRVILADANLDKVLSAYNKHRDKPIREQAENIIHLFTLTNLGAPAAFKYFDTTIDRKRYTSTKEVLDATLIHQSITGLYETRIDLSQLGGDGGGGSGGGGGVPWILKKPLELTIKLDLEEQQGTLLNNSILSKKGKEELKQLFEKYSALWQSWENQVGHRRIRPHKIATGTVKPTPQKQYHINPKAKPDIQIVINDLLKQGVLIQKESTMNTPVYPVPKPNGRWRMVLDYRAVNKVTPLIAVQNQHSYGILGSLFKGRYKTTIDLSNGFWAHPIVPEDYWITAFTWQGKQYCWTVLPQGFLNSPGLFNGDVVDLLQGIPNVEVYVDDVYISHDSEKEHLEYLDILFNRLKEAGYIISLKKSNIANSIVDFLGFQITNEGRGLTDTFKEKLENITAPTTLKQLQSILGLLNFARNFIPDFTELIAPLYALIPKSPKNYVPWQIEHSTTLETLITKLNGAEYLQGRKGDKTLIMKVNASYTTGYIRYYNEGEKKPISYVSIVFSKTELKFTELEKLLTTVHKGLLKALDLSMGQNIHVYSPIVSMQNIQKTPQTAKKALASRWLSWLSYLEDPRIRFFYDPQMPALKDLPAVDTGKDNKKHPSNFQHIFYTDGSAITSPTKEGHLNAGMGIVYFINKDGNLQKQQEWSISLGNHTAQFAEIAAFEFALKKCLPLGGNILVVTDSNYVAKAYNEELDVWASNGFVNNRKKPLKHISKWKSVADLKRLRPDVVVTHEPGHQKLDSSPHAYGNNLADQLATQASFKVHAGKRTADGSEFEKRTADGSEFESPKKKAKVE

SEQ ID NO: 6572 - protein, 2090 aa, synthetic construct
MPAAKRVKLDGGDKKYSIGLDIGTNSVGWAVITDEYKVPSKKFKVLGNTDRHSIKKNLIGALLFDSGETAEATRLKRTARRRYTRRKNRICYLQEIFSNEMAKVDDSFFHRLEESFLVEEDKKHERHPIFGNIVDEVAYHEKYPTIYHLRKKLVDSTDKADLRLIYLALAHMIKFRGHFLIEGDLNPDNSDVDKLFIQLVQTYNQLFEENPINASGVDAKAILSARLSKSRRLENLIAQLPGEKKNGLFGNLIALSLGLTPNFKSNFDLAEDAKLQLSKDTYDDDLDNLLAQIGDQYADLFLAAKNLSDAILLSDILRVNTEITKAPLSASMIKRYDEHHQDLTLLKALVRQQLPEKYKEIFFDQSKNGYAGYIDGGASQEEFYKFIKPILEKMDGTEELLVKLNREDLLRKQRTFDNGSIPHQIHLGELHAILRRQEDFYPFLKDNREKIEKILTFRIPYYVGPLARGNSRFAWMTRKSEETITPWNFEEVVDKGASAQSFIERMTNFDKNLPNEKVLPKHSLLYEYFTVYNELTKVKYVTEGMRKPAFLSGEQKKAIVDLLFKTNRKVTVKQLKEDYFKKIECFDSVEISGVEDRFNASLGTYHDLLKIIKDKDFLDNEENEDILEDIVLTLTLFEDREMIEERLKTYAHLFDDKVMKQLKRRRYTGWGRLSRKLINGIRDKQSGKTILDFLKSDGFANRNFMQLIHDDSLTFKEDIQKAQVSGQGDSLHEHIANLAGSPAIKKGILQTVKVVDELVKVMGRHKPENIVIEMARENQTTQKGQKNSRERMKRIEEGIKELGSQILKEHPVENTQLQNEKLYLYYLQNGRDMYVDQELDINRLSDYDVDHIVPQSFLKDDSIDNKVLTRSDKARGKSDNVPSEEVVKKMKNYWRQLLNAKLITQRKFDNLTKAERGGLSELDKAGFIKRQLVETRQITKHVAQILDSRMNTKYDENDKLIREVKVITLKSKLVSDFRKDFQFYKVREINNYHHAHDAYLNAVVGTALIKKYPKLESEFVYGDYKVYDVRKMIAKSEQEIGKATAKYFFYSNIMNFFKTEITLANGEIRKRPLIETNGETGEIVWDKGRDFATVRKVLSMPQVNIVKKTEVQTGGFSKESILPKRNSDKLIARKKDWDPKKYGGFDSPTVAYSVLVVAKVEKGKSKKLKSVKELLGITIMERSSFEKNPIDFLEAKGYKEVKKDLIIKLPKYSLFELENGRKRMLASAGELQKGNELALPSKYVNFLYLASHYEKLKGSPEDNEQKQLFVEQHKHYLDEIIEQISEFSKRVILADANLDKVLSAYNKHRDKPIREQAENIIHLFTLTNLGAPAAFKYFDTTIDRKRYTSTKEVLDATLIHQSITGLYETRIDLSQLGGDGGGGSGGGGGTLQLEEEYRLFEPESTQKQEMDIWLKNFPQAWAETGGMGTAHCQAPVLIQLKATATPISIRQYPMPHEAYQGIKPHIRRMLDQGILKPCQSPWNTPLLPVKKPGTEDYRPVQDLREVNKRVEDIHPTVPNPYNLLSTLPPSHPWYTVLDLKDAFFCLRLHSESQLLFAFEWRDPEIGLSGQLTWTRLPQGFKNSPTLFNEALHSDLADFRVRYPALVLLQYVDDLLLAAATRTECLEGTKALLETLGNKGYRASAKKAQICLQEVTYLGYSLKDGQRWLTKARKEAILSIPVPKNSRQVREFLGKAGYCRLFIPGFAELAAPLYPLTRPGTLFQWGTEQQLAFEDIKKALLSSPALGLPDITKPFELFIDENSGFAKGVLVQKLGPWKRPVAYLSKKLDTVASGWPPCLRMVAAIAILVKDAGKLTLGQPLTILTSHPVEALVRQPPNKWLSNARMTHYQAMLLDAERVHFGPTVSLNPATLLPLPSGGNHHDCLQILAETHGTRPDLTDQPLPDADLTWYTDGSSFIRNGEREAGAAVTTESEVIWAAPLPPGTSAQRAELIALTQALKMAEGKKLTVYTDSRYAFATTHVHGEIYRRRGWLTSEGKEIKNKNEILALLEALFLPKRLSIIHCPGHQKGDSPQAKGNRLADDTAKKAATETHSSLTVLPAGKRTADGSEFEKRTADGSEFESPKKKAKVE

SEQ ID NO: 6573 - protein, 2082 aa, synthetic construct
MPAAKRVKLDGGDKKYSIGLDIGTNSVGWAVITDEYKVPSKKFKVLGNTDRHSIKKNLIGALLFDSGETAEATRLKRTARRRYTRRKNRICYLQEIFSNEMAKVDDSFFHRLEESFLVEEDKKHERHPIFGNIVDEVAYHEKYPTIYHLRKKLVDSTDKADLRLIYLALAHMIKFRGHFLIEGDLNPDNSDVDKLFIQLVQTYNQLFEENPINASGVDAKAILSARLSKSRRLENLIAQLPGEKKNGLFGNLIALSLGLTPNFKSNFDLAEDAKLQLSKDTYDDDLDNLLAQIGDQYADLFLAAKNLSDAILLSDILRVNTEITKAPLSASMIKRYDEHHQDLTLLKALVRQQLPEKYKEIFFDQSKNGYAGYIDGGASQEEFYKFIKPILEKMDGTEELLVKLNREDLLRKQRTFDNGSIPHQIHLGELHAILRRQEDFYPFLKDNREKIEKILTFRIPYYVGPLARGNSRFAWMTRKSEETITPWNFEEVVDKGASAQSFIERMTNFDKNLPNEKVLPKHSLLYEYFTVYNELTKVKYVTEGMRKPAFLSGEQKKAIVDLLFKTNRKVTVKQLKEDYFKKIECFDSVEISGVEDRFNASLGTYHDLLKIIKDKDFLDNEENEDILEDIVLTLTLFEDREMIEERLKTYAHLFDDKVMKQLKRRRYTGWGRLSRKLINGIRDKQSGKTILDFLKSDGFANRNFMQLIHDDSLTFKEDIQKAQVSGQGDSLHEHIANLAGSPAIKKGILQTVKVVDELVKVMGRHKPENIVIEMARENQTTQKGQKNSRERMKRIEEGIKELGSQILKEHPVENTQLQNEKLYLYYLQNGRDMYVDQELDINRLSDYDVDHIVPQSFLKDDSIDNKVLTRSDKARGKSDNVPSEEVVKKMKNYWRQLLNAKLITQRKFDNLTKAERGGLSELDKAGFIKRQLVETRQITKHVAQILDSRMNTKYDENDKLIREVKVITLKSKLVSDFRKDFQFYKVREINNYHHAHDAYLNAVVGTALIKKYPKLESEFVYGDYKVYDVRKMIAKSEQEIGKATAKYFFYSNIMNFFKTEITLANGEIRKRPLIETNGETGEIVWDKGRDFATVRKVLSMPQVNIVKKTEVQTGGFSKESILPKRNSDKLIARKKDWDPKKYGGFDSPTVAYSVLVVAKVEKGKSKKLKSVKELLGITIMERSSFEKNPIDFLEAKGYKEVKKDLIIKLPKYSLFELENGRKRMLASAGELQKGNELALPSKYVNFLYLASHYEKLKGSPEDNEQKQLFVEQHKHYLDEIIEQISEFSKRVILADANLDKVLSAYNKHRDKPIREQAENIIHLFTLTNLGAPAAFKYFDTTIDRKRYTSTKEVLDATLIHQSITGLYETRIDLSQLGGDGGGGSGGGGGVPWLTQQPLQLTILVPLQEYQEKILSKTALPEDQKQQLKTLFVKYDNLWQHWENQVGHRKIRPHNIATGDYPPRPQKQYPINPKAKPSIQIVIDDLLKQGVLTPQNSTMNTPVYPVPKPDGRWRMVLDYREVNKTIPLTAAQNQHSAGILATIVRQKYKTTLDLANGFWAHPITPESYWLTAFTWQGKQYCWTRLPQGFLNSPALFNADVVDLLKEIPNVQVYVDDIYLSHDDPKEHVQQLEKVFQILLQAGYVVSLKKSEIGQKTVEFLGFNITKEGRGLTDTFKTKLLNITPPKDLKQLQSILGLLNFARNFIPNFAELVQPLYNLIAPAKGKYIEWSEENTKQLNMVIEALNTASNLEERLPEQRLVIKVNTSPSAGYVRYYNETGKKPIMYLNYVFSKAELKFSMLEKLLTTMHKALIKAMDLAMGQEILVYSPIVSMTKIQKTPLPERKALPIRWITWMTYLEDPRIQFHYDKTLPELKHIPDVYTSSQSPVKHPSQYEGVFYTDGSAIKSPDPTKSNNAGMGIVHATYKPEYQVLNQWSIPLGNHTAQMAEIAAVEFACKKALKIPGPVLVITDSFYVAESANKELPYWKSNGFVNNKKKPLKHISKWKSIAECLSMKPDITIQHEKGISLQIPVFILKGNALADKLATQGSYVVNAGKRTADGSEFEKRTADGSEFESPKKKAKVE

SEQ ID NO: 6574 - protein, 2171 aa, synthetic construct
MPAAKRVKLDGGDKKYSIGLDIGTNSVGWAVITDEYKVPSKKFKVLGNTDRHSIKKNLIGALLFDSGETAEATRLKRTARRRYTRRKNRICYLQEIFSNEMAKVDDSFFHRLEESFLVEEDKKHERHPIFGNIVDEVAYHEKYPTIYHLRKKLVDSTDKADLRLIYLALAHMIKFRGHFLIEGDLNPDNSDVDKLFIQLVQTYNQLFEENPINASGVDAKAILSARLSKSRRLENLIAQLPGEKKNGLFGNLIALSLGLTPNFKSNFDLAEDAKLQLSKDTYDDDLDNLLAQIGDQYADLFLAAKNLSDAILLSDILRVNTEITKAPLSASMIKRYDEHHQDLTLLKALVRQQLPEKYKEIFFDQSKNGYAGYIDGGASQEEFYKFIKPILEKMDGTEELLVKLNREDLLRKQRTFDNGSIPHQIHLGELHAILRRQEDFYPFLKDNREKIEKILTFRIPYYVGPLARGNSRFAWMTRKSEETITPWNFEEVVDKGASAQSFIERMTNFDKNLPNEKVLPKHSLLYEYFTVYNELTKVKYVTEGMRKPAFLSGEQKKAIVDLLFKTNRKVTVKQLKEDYFKKIECFDSVEISGVEDRFNASLGTYHDLLKIIKDKDFLDNEENEDILEDIVLTLTLFEDREMIEERLKTYAHLFDDKVMKQLKRRRYTGWGRLSRKLINGIRDKQSGKTILDFLKSDGFANRNFMQLIHDDSLTFKEDIQKAQVSGQGDSLHEHIANLAGSPAIKKGILQTVKVVDELVKVMGRHKPENIVIEMARENQTTQKGQKNSRERMKRIEEGIKELGSQILKEHPVENTQLQNEKLYLYYLQNGRDMYVDQELDINRLSDYDVDHIVPQSFLKDDSIDNKVLTRSDKARGKSDNVPSEEVVKKMKNYWRQLLNAKLITQRKFDNLTKAERGGLSELDKAGFIKRQLVETRQITKHVAQILDSRMNTKYDENDKLIREVKVITLKSKLVSDFRKDFQFYKVREINNYHHAHDAYLNAVVGTALIKKYPKLESEFVYGDYKVYDVRKMIAKSEQEIGKATAKYFFYSNIMNFFKTEITLANGEIRKRPLIETNGETGEIVWDKGRDFATVRKVLSMPQVNIVKKTEVQTGGFSKESILPKRNSDKLIARKKDWDPKKYGGFDSPTVAYSVLVVAKVEKGKSKKLKSVKELLGITIMERSSFEKNPIDFLEAKGYKEVKKDLIIKLPKYSLFELENGRKRMLASAGELQKGNELALPSKYVNFLYLASHYEKLKGSPEDNEQKQLFVEQHKHYLDEIIEQISEFSKRVILADANLDKVLSAYNKHRDKPIREQAENIIHLFTLTNLGAPAAFKYFDTTIDRKRYTSTKEVLDATLIHQSITGLYETRIDLSQLGGDGGGGSGGGGGMNPLQLLQPLPAEIKGTKLLAHWNSGATITCIPESFLEDEQPIKKTLIKTIHGEKQQNVYYVTFKVKGRKVEAEVIASPYEYILLSPTDVPWLTQQPLQLTILVPLQEYQEKILSKTALPEDQKQQLKTLFVKYDNLWQHWENQVGHRKIRPHNIATGDYPPRPQKQYPINPKAKPSIQIVIDDLLKQGVLTPQNSTMNTPVYPVPKPDGRWRMVLDYREVNKTIPLTAAQNQHSAGILATIVRQKYKTTLDLANGFWAHPITPESYWLTAFTWQGKQYCWTRLPQGFLNSPALFNADVVDLLKEIPNVQVYVDDIYLSHDDPKEHVQQLEKVFQILLQAGYVVSLKKSEIGQKTVEFLGFNITKEGRGLTDTFKTKLLNITPPKDLKQLQSILGKLNFARNFIPNFAELVQPLYNLIAPAKGKYIEWSEENTKQLNMVIEALNTASNLEERLPEQRLVIKVNTSPSAGYVRYYNETGKKPIMYLNYVFSKAELKFSMLEKLLTTMHKALIKAMDLAMGQEILVYSPIVSMTKIQKTPLPERKALPIRWITWMTYLEDPRIQFHYDKTLPELKHIPDVYTSSQSPVKHPSQYEGVFYTDGSAIKSPDPTKSNNAGMGIVHATYKPEYQVLNQWSIPLGNHTAQMAEIAAVEFACKKALKIPGPVLVITDSFYVAESANKELPYWKSNGFVNNKKKPLKHISKWKSIAECLSMKPDITIQHEKGISLQIPVFILKGNALADKLATQGSYVVNAGKRTADGSEFEKRTADGSEFESPKKKAKVE

SEQ ID NO: 6575 - protein, 2213 aa, synthetic construct
MPAAKRVKLDGGDKKYSIGLDIGTNSVGWAVITDEYKVPSKKFKVLGNTDRHSIKKNLIGALLFDSGETAEATRLKRTARRRYTRRKNRICYLQEIFSNEMAKVDDSFFHRLEESFLVEEDKKHERHPIFGNIVDEVAYHEKYPTIYHLRKKLVDSTDKADLRLIYLALAHMIKFRGHFLIEGDLNPDNSDVDKLFIQLVQTYNQLFEENPINASGVDAKAILSARLSKSRRLENLIAQLPGEKKNGLFGNLIALSLGLTPNFKSNFDLAEDAKLQLSKDTYDDDLDNLLAQIGDQYADLFLAAKNLSDAILLSDILRVNTEITKAPLSASMIKRYDEHHQDLTLLKALVRQQLPEKYKEIFFDQSKNGYAGYIDGGASQEEFYKFIKPILEKMDGTEELLVKLNREDLLRKQRTFDNGSIPHQIHLGELHAILRRQEDFYPFLKDNREKIEKILTFRIPYYVGPLARGNSRFAWMTRKSEETITPWNFEEVVDKGASAQSFIERMTNFDKNLPNEKVLPKHSLLYEYFTVYNELTKVKYVTEGMRKPAFLSGEQKKAIVDLLFKTNRKVTVKQLKEDYFKKIECFDSVEISGVEDRFNASLGTYHDLLKIIKDKDFLDNEENEDILEDIVLTLTLFEDREMIEERLKTYAHLFDDKVMKQLKRRRYTGWGRLSRKLINGIRDKQSGKTILDFLKSDGFANRNFMQLIHDDSLTFKEDIQKAQVSGQGDSLHEHIANLAGSPAIKKGILQTVKVVDELVKVMGRHKPENIVIEMARENQTTQKGQKNSRERMKRIEEGIKELGSQILKEHPVENTQLQNEKLYLYYLQNGRDMYVDQELDINRLSDYDVDHIVPQSFLKDDSIDNKVLTRSDKARGKSDNVPSEEVVKKMKNYWRQLLNAKLITQRKFDNLTKAERGGLSELDKAGFIKRQLVETRQITKHVAQILDSRMNTKYDENDKLIREVKVITLKSKLVSDFRKDFQFYKVREINNYHHAHDAYLNAVVGTALIKKYPKLESEFVYGDYKVYDVRKMIAKSEQEIGKATAKYFFYSNIMNFFKTEITLANGEIRKRPLIETNGETGEIVWDKGRDFATVRKVLSMPQVNIVKKTEVQTGGFSKESILPKRNSDKLIARKKDWDPKKYGGFDSPTVAYSVLVVAKVEKGKSKKLKSVKELLGITIMERSSFEKNPIDFLEAKGYKEVKKDLIIKLPKYSLFELENGRKRMLASAGELQKGNELALPSKYVNFLYLASHYEKLKGSPEDNEQKQLFVEQHKHYLDEIIEQISEFSKRVILADANLDKVLSAYNKHRDKPIREQAENIIHLFTLTNLGAPAAFKYFDTTIDRKRYTSTKEVLDATLIHQSITGLYETRIDLSQLGGDGGGGSGGGGGTLGDQGSRGSDPLPEPRVTLTVEGIPTEFLVNTGAEHSVLTKPMGKMGSKRTVVAGATGSKVYPWTTKRLLKIGQKQVTHSFLVIPECPAPLLGRDLLTKLKAQIQFSTEGPQVTWEDRPAMCLVLNLEEEYRLHEKPVPPSIDPSWLQLFPMVWAEKAGMGLANQVPPVVVELKSDASPVAVRQYPMSKEAREGIRPHIQRFLDLGILVPCQSPWNTPLLPVKKPGTNDYRPVQDLREVNKRVQDIHPTVPNPYNLLSSLPPSHTWYSVLDLKDAFFCLKLHPNSQPLFAFEWRDPEKGNTGQLTWTRLPQGFKNSPTLFNEALHRDLASFRALNPQVVMLQYVDDLLVAAPTYRDCKEGTRRLLQELSKLGYRVSAKKAQLCREEVTYLGYLLKGGKRWLTPARKATVMKIPTPTTPRQVREFLGKAGFCRLFIPGFASLAAPLYPLTRPKVPFTWTEAHQEAFGRIKEALLSAPALALPDLTKPFALYVDEKEGVARGVLTQTLGPWRRPVAYLSKKLDPVASGWPTCLKAIAAVALLLKDADKLTLGQNVLVIAPHNLESIVRQPPDRWMTNARMTHYQSLLLNERVSFAPPAILNPATLLPVESDDTPIHICSEILAEETGTRPDLRDQPLPGVPAWYTDGSSFIMDGRRQAGAAIVDNKRTVWASNLPEGTSAQKAELIALTQALRLAEGKSINIYTDSRYAFATAHVHGAIYKQRGWLTSAGKDIKNKEEILALLEAIHLPKRVAIIHCPGHQRGTDPVATGNRKADEAAKQAAQSTRILTETTKNAGKRTADGSEFEKRTADGSEFESPKKKAKVE

SEQ ID NO: 6576 - protein, 2091 aa, synthetic construct
MPAAKRVKLDGGDKKYSIGLDIGTNSVGWAVITDEYKVPSKKFKVLGNTDRHSIKKNLIGALLFDSGETAEATRLKRTARRRYTRRKNRICYLQEIFSNEMAKVDDSFFHRLEESFLVEEDKKHERHPIFGNIVDEVAYHEKYPTIYHLRKKLVDSTDKADLRLIYLALAHMIKFRGHFLIEGDLNPDNSDVDKLFIQLVQTYNQLFEENPINASGVDAKAILSARLSKSRRLENLIAQLPGEKKNGLFGNLIALSLGLTPNFKSNFDLAEDAKLQLSKDTYDDDLDNLLAQIGDQYADLFLAAKNLSDAILLSDILRVNTEITKAPLSASMIKRYDEHHQDLTLLKALVRQQLPEKYKEIFFDQSKNGYAGYIDGGASQEEFYKFIKPILEKMDGTEELLVKLNREDLLRKQRTFDNGSIPHQIHLGELHAILRRQEDFYPFLKDNREKIEKILTFRIPYYVGPLARGNSRFAWMTRKSEETITPWNFEEVVDKGASAQSFIERMTNFDKNLPNEKVLPKHSLLYEYFTVYNELTKVKYVTEGMRKPAFLSGEQKKAIVDLLFKTNRKVTVKQLKEDYFKKIECFDSVEISGVEDRFNASLGTYHDLLKIIKDKDFLDNEENEDILEDIVLTLTLFEDREMIEERLKTYAHLFDDKVMKQLKRRRYTGWGRLSRKLINGIRDKQSGKTILDFLKSDGFANRNFMQLIHDDSLTFKEDIQKAQVSGQGDSLHEHIANLAGSPAIKKGILQTVKVVDELVKVMGRHKPENIVIEMARENQTTQKGQKNSRERMKRIEEGIKELGSQILKEHPVENTQLQNEKLYLYYLQNGRDMYVDQELDINRLSDYDVDHIVPQSFLKDDSIDNKVLTRSDKARGKSDNVPSEEVVKKMKNYWRQLLNAKLITQRKFDNLTKAERGGLSELDKAGFIKRQLVETRQITKHVAQILDSRMNTKYDENDKLIREVKVITLKSKLVSDFRKDFQFYKVREINNYHHAHDAYLNAVVGTALIKKYPKLESEFVYGDYKVYDVRKMIAKSEQEIGKATAKYFFYSNIMNFFKTEITLANGEIRKRPLIETNGETGEIVWDKGRDFATVRKVLSMPQVNIVKKTEVQTGGFSKESILPKRNSDKLIARKKDWDPKKYGGFDSPTVAYSVLVVAKVEKGKSKKLKSVKELLGITIMERSSFEKNPIDFLEAKGYKEVKKDLIIKLPKYSLFELENGRKRMLASAGELQKGNELALPSKYVNFLYLASHYEKLKGSPEDNEQKQLFVEQHKHYLDEIIEQISEFSKRVILADANLDKVLSAYNKHRDKPIREQAENIIHLFTLTNLGAPAAFKYFDTTIDRKRYTSTKEVLDATLIHQSITGLYETRIDLSQLGGDGGGGSGGGGGTLNLEDEYRLYETSAEPEVSPGSTWLSDFPQAWAETGGMGLAVRQAPLIIPLKATSTPVSIKQYPMSQEAKLGIKPHIQRLLDQGILVPCQSPWNTPLLPVKKPGTNDYRPVQDLREVNKRVEDIHPTVPNPYNLLSGLPPSHRWYTVLDLKDAFFCLRLHPTSQPLFAFEWRDPGMGISGQLTWTRLPQGFKNSPTLFNEALHRDLADFRIQHPDLILLQYVDDILLAATSELDCQQGTRALLLTLGNLGYRASAKKAQLCQKQVKYLGYLLKEGQRWLTEARKETVMGQPTPKTPRQLREFLGTAGFCRLWIPGFAEMAAPLYPLTKPGTLFNWGPDQQKAYQEIKQALLTAPALGLPDLTKPFELFVDEKQGYAKGVLTQKLGPWRRPVAYLSKKLDPVAAGWPPCLRMVAAIAVLRKDAGKLTMGQPLVILAPHAVEALVKQPPDRWLSNARMTHYQAMLLDTDRVQFGPVVALNPATLLPLPEEGAPHDCLEILAETHGTRPDLTDQPIPDADHTWYTDGSSFLQEGQRKAGAAVTTETEVIWARALPAGTSAQRAELIALTQALKMAEGKRLNVYTDSRYAFATAHIHGEIYRRRGWLTSEGREIKNKSEILALLKALFLPKRLSIIHCLGHQKGDSAEARGNRLADQAAREAAIKTPPDTSTLLAGKRTADGSEFEKRTADGSEFESPKKKAKVE

SEQ ID NO: 6577 - protein, 2091 aa, synthetic construct
MPAAKRVKLDGGDKKYSIGLDIGTNSVGWAVITDEYKVPSKKFKVLGNTDRHSIKKNLIGALLFDSGETAEATRLKRTARRRYTRRKNRICYLQEIFSNEMAKVDDSFFHRLEESFLVEEDKKHERHPIFGNIVDEVAYHEKYPTIYHLRKKLVDSTDKADLRLIYLALAHMIKFRGHFLIEGDLNPDNSDVDKLFIQLVQTYNQLFEENPINASGVDAKAILSARLSKSRRLENLIAQLPGEKKNGLFGNLIALSLGLTPNFKSNFDLAEDAKLQLSKDTYDDDLDNLLAQIGDQYADLFLAAKNLSDAILLSDILRVNTEITKAPLSASMIKRYDEHHQDLTLLKALVRQQLPEKYKEIFFDQSKNGYAGYIDGGASQEEFYKFIKPILEKMDGTEELLVKLNREDLLRKQRTFDNGSIPHQIHLGELHAILRRQEDFYPFLKDNREKIEKILTFRIPYYVGPLARGNSRFAWMTRKSEETITPWNFEEVVDKGASAQSFIERMTNFDKNLPNEKVLPKHSLLYEYFTVYNELTKVKYVTEGMRKPAFLSGEQKKAIVDLLFKTNRKVTVKQLKEDYFKKIECFDSVEISGVEDRFNASLGTYHDLLKIIKDKDFLDNEENEDILEDIVLTLTLFEDREMIEERLKTYAHLFDDKVMKQLKRRRYTGWGRLSRKLINGIRDKQSGKTILDFLKSDGFANRNFMQLIHDDSLTFKEDIQKAQVSGQGDSLHEHIANLAGSPAIKKGILQTVKVVDELVKVMGRHKPENIVIEMARENQTTQKGQKNSRERMKRIEEGIKELGSQILKEHPVENTQLQNEKLYLYYLQNGRDMYVDQELDINRLSDYDVDHIVPQSFLKDDSIDNKVLTRSDKARGKSDNVPSEEVVKKMKNYWRQLLNAKLITQRKFDNLTKAERGGLSELDKAGFIKRQLVETRQITKHVAQILDSRMNTKYDENDKLIREVKVITLKSKLVSDFRKDFQFYKVREINNYHHAHDAYLNAVVGTALIKKYPKLESEFVYGDYKVYDVRKMIAKSEQEIGKATAKYFFYSNIMNFFKTEITLANGEIRKRPLIETNGETGEIVWDKGRDFATVRKVLSMPQVNIVKKTEVQTGGFSKESILPKRNSDKLIARKKDWDPKKYGGFDSPTVAYSVLVVAKVEKGKSKKLKSVKELLGITIMERSSFEKNPIDFLEAKGYKEVKKDLIIKLPKYSLFELENGRKRMLASAGELQKGNELALPSKYVNFLYLASHYEKLKGSPEDNEQKQLFVEQHKHYLDEIIEQISEFSKRVILADANLDKVLSAYNKHRDKPIREQAENIIHLFTLTNLGAPAAFKYFDTTIDRKRYTSTKEVLDATLIHQSITGLYETRIDLSQLGGDGGGGSGGGGGTLGIEDEYRLHETSTEPDVSLGSTWLSDFPQAWAETGGMGLAVRQAPLIIPLKATSTPVSIQQYPMSHEARLGIKPHIQRLLDQGILVPCQSPWNTPLLPVKKPGTNDYRPVQDLREVNKRVEDIHPTVPNPYNLLSGLPPSHQWYTVLDLKDAFFCLRLHPTSQPLFAFEWRDPGMGISGQLTWTRLPQGFKNSPTLFNEALHRDLADFRIQHPDLILLQYVDDILLAATSELDCQQGTRALLQTLGDLGYRASAKKAQICQKQVKYLGYLLREGQRWLTEARKETVMGQPVPKTPRQLREFLGTAGFCRLWIPGFAEMAAPLYPLTKPGTLFSWGPDQQKAYQEIKQALLTAPALGLPDLTKPFELFVDEKQGYAKGVLTQKLGPWRRPVAYLSKKLDPVAAGWPPCLRMVAAIAVLTKDAGKLTMGQPLVILAPHAVEALVKQPPDRWLSNARMTHYQAMLLDTDRVQFGPVVALNPATLLPLPEEGAPHDCLEILAETHGTRPDLTDQPIPDADHTWYTDGSSFLQEGQRKAGAAVTTETEVIWAGALPAGTSAQRAELIALTQALKMAEGKRLNVYTDSRYAFATAHIHGEIYRRRGWLTSEGREIKNKSEILALLKALFLPKRLSIIHCLGHQKGDSAEARGNRLADQAAREAAIKTPPDTSTLLAGKRTADGSEFEKRTADGSEFESPKKKAKVE

SEQ ID NO: 6578 - protein, 2091 aa, synthetic construct
MPAAKRVKLDGGDKKYSIGLDIGTNSVGWAVITDEYKVPSKKFKVLGNTDRHSIKKNLIGALLFDSGETAEATRLKRTARRRYTRRKNRICYLQEIFSNEMAKVDDSFFHRLEESFLVEEDKKHERHPIFGNIVDEVAYHEKYPTIYHLRKKLVDSTDKADLRLIYLALAHMIKFRGHFLIEGDLNPDNSDVDKLFIQLVQTYNQLFEENPINASGVDAKAILSARLSKSRRLENLIAQLPGEKKNGLFGNLIALSLGLTPNFKSNFDLAEDAKLQLSKDTYDDDLDNLLAQIGDQYADLFLAAKNLSDAILLSDILRVNTEITKAPLSASMIKRYDEHHQDLTLLKALVRQQLPEKYKEIFFDQSKNGYAGYIDGGASQEEFYKFIKPILEKMDGTEELLVKLNREDLLRKQRTFDNGSIPHQIHLGELHAILRRQEDFYPFLKDNREKIEKILTFRIPYYVGPLARGNSRFAWMTRKSEETITPWNFEEVVDKGASAQSFIERMTNFDKNLPNEKVLPKHSLLYEYFTVYNELTKVKYVTEGMRKPAFLSGEQKKAIVDLLFKTNRKVTVKQLKEDYFKKIECFDSVEISGVEDRFNASLGTYHDLLKIIKDKDFLDNEENEDILEDIVLTLTLFEDREMIEERLKTYAHLFDDKVMKQLKRRRYTGWGRLSRKLINGIRDKQSGKTILDFLKSDGFANRNFMQLIHDDSLTFKEDIQKAQVSGQGDSLHEHIANLAGSPAIKKGILQTVKVVDELVKVMGRHKPENIVIEMARENQTTQKGQKNSRERMKRIEEGIKELGSQILKEHPVENTQLQNEKLYLYYLQNGRDMYVDQELDINRLSDYDVDHIVPQSFLKDDSIDNKVLTRSDKARGKSDNVPSEEVVKKMKNYWRQLLNAKLITQRKFDNLTKAERGGLSELDKAGFIKRQLVETRQITKHVAQILDSRMNTKYDENDKLIREVKVITLKSKLVSDFRKDFQFYKVREINNYHHAHDAYLNAVVGTALIKKYPKLESEFVYGDYKVYDVRKMIAKSEQEIGKATAKYFFYSNIMNFFKTEITLANGEIRKRPLIETNGETGEIVWDKGRDFATVRKVLSMPQVNIVKKTEVQTGGFSKESILPKRNSDKLIARKKDWDPKKYGGFDSPTVAYSVLVVAKVEKGKSKKLKSVKELLGITIMERSSFEKNPIDFLEAKGYKEVKKDLIIKLPKYSLFELENGRKRMLASAGELQKGNELALPSKYVNFLYLASHYEKLKGSPEDNEQKQLFVEQHKHYLDEIIEQISEFSKRVILADANLDKVLSAYNKHRDKPIREQAENIIHLFTLTNLGAPAAFKYFDTTIDRKRYTSTKEVLDATLIHQSITGLYETRIDLSQLGGDGGGGSGGGGGTLNIEDEHRLHETSKEPDVSLGSTWLSDFPQAWAETGGMGLAVRQAPLIIPLKATSTPVSIKQYPMSQEARLGIKPHIQRLLDQGILVPCQSPWNTPLLPVKKPGTNDYRPVQDLREVNKRVEDIHPTVPNPYNLLSGLPPSHQWYTVLDLKDAFFCLRLHPTSQPLFAFEWRDPEMGISGQLTWTRLPQGFKNSPTLFNEALHRDLADFRIQHPDLILLQYVDDLLLAATSELDCQQGTRALLQTLGNLGYRASAKKAQICQKQVKYLGYLLKEGQRWLTEARKETVMGQPTPKTPRQLREFLGTAGFCRLWIPGFAEMAAPLYPLTKPGTLFNWGPDQQKAYQEIKQALLTAPALGLPDLTKPFELFVDEKQGYAKGVLTQKLGPWRRPVAYLSKKLDPVAAGWPPCLRMVAAIAVLTKDAGKLTMGQPLVILAPHAVEALVKQPPDRWLSNARMTHYQALLLDTDRVQFGPVVALNPATLLPLPEEGLQHNCLDILAEAHGTRPDLTDQPLPDADHTWYTDGSSLLQEGQRKAGAAVTTETEVIWAKALPAGTSAQRAELIALTQALKMAEGKKLNVYTDSRYAFATAHIHGEIYRRRGWLTSEGKEIKNKDEILALLKALFLPKRLSIIHCPGHQKGHSAEARGNRMADQAARKAAITETPDTSTLLAGKRTADGSEFEKRTADGSEFESPKKKAKVE

SEQ ID NO: 6579 - protein, 2091 aa, synthetic construct; identical to SEQ ID NO: 6578

SEQ ID NO: 6580 - protein, 2082 aa, synthetic construct
MPAAKRVKLDGGDKKYSIGLDIGTNSVGWAVITDEYKVPSKKFKVLGNTDRHSIKKNLIGALLFDSGETAEATRLKRTARRRYTRRKNRICYLQEIFSNEMAKVDDSFFHRLEESFLVEEDKKHERHPIFGNIVDEVAYHEKYPTIYHLRKKLVDSTDKADLRLIYLALAHMIKFRGHFLIEGDLNPDNSDVDKLFIQLVQTYNQLFEENPINASGVDAKAILSARLSKSRRLENLIAQLPGEKKNGLFGNLIALSLGLTPNFKSNFDLAEDAKLQLSKDTYDDDLDNLLAQIGDQYADLFLAAKNLSDAILLSDILRVNTEITKAPLSASMIKRYDEHHQDLTLLKALVRQQLPEKYKEIFFDQSKNGYAGYIDGGASQEEFYKFIKPILEKMDGTEELLVKLNREDLLRKQRTFDNGSIPHQIHLGELHAILRRQEDFYPFLKDNREKIEKILTFRIPYYVGPLARGNSRFAWMTRKSEETITPWNFEEVVDKGASAQSFIERMTNFDKNLPNEKVLPKHSLLYEYFTVYNELTKVKYVTEGMRKPAFLSGEQKKAIVDLLFKTNRKVTVKQLKEDYFKKIECFDSVEISGVEDRFNASLGTYHDLLKIIKDKDFLDNEENEDILEDIVLTLTLFEDREMIEERLKTYAHLFDDKVMKQLKRRRYTGWGRLSRKLINGIRDKQSGKTILDFLKSDGFANRNFMQLIHDDSLTFKEDIQKAQVSGQGDSLHEHIANLAGSPAIKKGILQTVKVVDELVKVMGRHKPENIVIEMARENQTTQKGQKNSRERMKRIEEGIKELGSQILKEHPVENTQLQNEKLYLYYLQNGRDMYVDQELDINRLSDYDVDHIVPQSFLKDDSIDNKVLTRSDKARGKSDNVPSEEVVKKMKNYWRQLLNAKLITQRKFDNLTKAERGGLSELDKAGFIKRQLVETRQITKHVAQILDSRMNTKYDENDKLIREVKVITLKSKLVSDFRKDFQFYKVREINNYHHAHDAYLNAVVGTALIKKYPKLESEFVYGDYKVYDVRKMIAKSEQEIGKATAKYFFYSNIMNFFKTEITLANGEIRKRPLIETNGETGEIVWDKGRDFATVRKVLSMPQVNIVKKTEVQTGGFSKESILPKRNSDKLIARKKDWDPKKYGGFDSPTVAYSVLVVAKVEKGKSKKLKSVKELLGITIMERSSFEKNPIDFLEAKGYKEVKKDLIIKLPKYSLFELENGRKRMLASAGELQKGNELALPSKYVNFLYLASHYEKLKGSPEDNEQKQLFVEQHKHYLDEIIEQISEFSKRVILADANLDKVLSAYNKHRDKPIREQAENIIHLFTLTNLGAPAAFKYFDTTIDRKRYTSTKEVLDATLIHQSITGLYETRIDLSQLGGDGGGGSGGGGGIPWLMKKPLQLTTLVPLQEYEERLLKQTMLTGSYKEKLQSLFLKYDALWQHWENQVGHRRIKPHHIATGTVNPRPQKQYPINPKAKASIQTVINDLLKQGVLIQQNSIMNTPVYPVPKPDGKWRMVLDYREVNKTIPLIAAQNQHSAGILSSIFRGKYKTTLDLSNGFWAHSITPESYWLTAFTWLGQQYCWTRLPQGFLNSPALFNADVVDLLKEVPNVQVYVDDIYISHDDPREHLEQLEKVFSLLLNAGYVVSLKKSEIAQHEVEFLGFNITKEGRGLTETFKQKLLNITPPRDLKQLQSILGLLNFARNFIPNFSELVKPLYNIIATAPGKYITWTTDNSQQLQNIISMLNSAENLEERNPEVRLIMKVNTSPSAGYIRFYNEFAKRPIMYLNYVYTKAEVKFTNTEKLLTTIHKGLIKALDLGMGQEILVYSPIVSMTKIQKTPLPERKALPIRWITWMSYLEDPRIQFHYDKTLPELQQVPTVTDDIIAKIKHPSEFSMVFYTDGSAIKHPNVNKSHNAGMGIAQVQFKPEFTVINTWSIPLGDHTAQLAEVAAVEFACKKALKIDGPVLIVTDSFYVAESVNKELPYWQSNGFFNNKKKPLKHVSKWKSIADCIQLKPDIIIIHEKGHQPTASTFHTEGNNLADKLATQGSYVVNAGKRTADGSEFEKRTADGSEFESPKKKAKVE

SEQ ID NO: 6581 - protein, 2089 aa, synthetic construct
MPAAKRVKLDGGDKKYSIGLDIGTNSVGWAVITDEYKVPSKKFKVLGNTDRHSIKKNLIGALLFDSGETAEATRLKRTARRRYTRRKNRICYLQEIFSNEMAKVDDSFFHRLEESFLVEEDKKHERHPIFGNIVDEVAYHEKYPTIYHLRKKLVDSTDKADLRLIYLALAHMIKFRGHFLIEGDLNPDNSDVDKLFIQLVQTYNQLFEENPINASGVDAKAILSARLSKSRRLENLIAQLPGEKKNGLFGNLIALSLGLTPNFKSNFDLAEDAKLQLSKDTYDDDLDNLLAQIGDQYADLFLAAKNLSDAILLSDILRVNTEITKAPLSASMIKRYDEHHQDLTLLKALVRQQLPEKYKEIFFDQSKNGYAGYIDGGASQEEFYKFIKPILEKMDGTEELLVKLNREDLLRKQRTFDNGSIPHQIHLGELHAILRRQEDFYPFLKDNREKIEKILTFRIPYYVGPLARGNSRFAWMTRKSEETITPWNFEEVVDKGASAQSFIERMTNFDKNLPNEKVLPKHSLLYEYFTVYNELTKVKYVTEGMRKPAFLSGEQKKAIVDLLFKTNRKVTVKQLKEDYFKKIECFDSVEISGVEDRFNASLGTYHDLLKIIKDKDFLDNEENEDILEDIVLTLTLFEDREMIEERLKTYAHLFDDKVMKQLKRRRYTGWGRLSRKLINGIRDKQSGKTILDFLKSDGFANRNFMQLIHDDSLTFKEDIQKAQVSGQGDSLHEHIANLAGSPAIKKGILQTVKVVDELVKVMGRHKPENIVIEMARENQTTQKGQKNSRERMKRIEEGIKELGSQILKEHPVENTQLQNEKLYLYYLQNGRDMYVDQELDINRLSDYDVDHIVPQSFLKDDSIDNKVLTRSDKARGKSDNVPSEEVVKKMKNYWRQLLNAKLITQRKFDNLTKAERGGLSELDKAGFIKRQLVETRQITKHVAQILDSRMNTKYDENDKLIREVKVITLKSKLVSDFRKDFQFYKVREINNYHHAHDAYLNAVVGTALIKKYPKLESEFVYGDYKVYDVRKMIAKSEQEIGKATAKYFFYSNIMNFFKTEITLANGEIRKRPLIETNGETGEIVWDKGRDFATVRKVLSMPQVNIVKKTEVQTGGFSKESILPKRNSDKLIARKKDWDPKKYGGFDSPTVAYSVLVVAKVEKGKSKKLKSVKELLGITIMERSSFEKNPIDFLEAKGYKEVKKDLIIKLPKYSLFELENGRKRMLASAGELQKGNELALPSKYVNFLYLASHYEKLKGSPEDNEQKQLFVEQHKHYLDEIIEQISEFSKRVILADANLDKVLSAYNKHRDKPIREQAENIIHLFTLTNLGAPAAFKYFDTTIDRKRYTSTKEVLDATLIHQSITGLYETRIDLSQLGGDGGGGSGGGGGVLNLEEEYRLHEKPVPSSIDPSWLQLFPTVWAERAGMGLANQVPPVVVELRSGASPVAVRQYPMSKEAREGIRPHIQRFLDLGVLVPCQSPWNTPLLPVKKPGTNDYRPVQDLREINKRVQDIHPTVPNPYNLLSSLPPSHTWYSVLDLKDAFFCLKLHPNSQPLFAFEWRDPEKGNTGQLTWTRLPQGFKNSPTLFNEALHRDLAPFRALNPQVVLLQYVDDLLVAAPTYRDCKEGTQKLLQELSKLGYRVSAKKAQLCQKEVTYLGYLLKEGKRWLTPARKATVMKIPPPTTPRQVREFLGKAGFCRLFIPGFASLAAPLYPLTKPSIPFIWTEEHQKAFDRIKEALLSAPALALPDLTKPFTLYVDERAGVARGVLTQTLGPWRRPVAYLSKKLDPVASGWPTCLKAVAAVALLLKDADKLTLGQNVTVIASHSLESIVRQPPDRWMTNARMTHYQSLLLNERVSFAPPAVLNPATLLPVESEATPVHRCSEILAEETGTRRDLKDQPLPGVPAWYTDGSSFIAEGKRRAGAAIVDGKRTVWASSLPEGTSAQKAELVALTQALRLAEGKDINIYTDSRYAFATAHIHGAIYKQRGWLTSAGKDIKNKEEILALLEAIHLPKRVAIIHCPGHQKGNDPVATGNRRADEAAKQAALSTRVLAETTKPAGKRTADGSEFEKRTADGSEFESPKKKAKVE

SEQ ID NO: 6582 - protein, 2091 aa, synthetic construct
MPAAKRVKLDGGDKKYSIGLDIGTNSVGWAVITDEYKVPSKKFKVLGNTDRHSIKKNLIGALLFDSGETAEATRLKRTARRRYTRRKNRICYLQEIFSNEMAKVDDSFFHRLEESFLVEEDKKHERHPIFGNIVDEVAYHEKYPTIYHLRKKLVDSTDKADLRLIYLALAHMIKFRGHFLIEGDLNPDNSDVDKLFIQLVQTYNQLFEENPINASGVDAKAILSARLSKSRRLENLIAQLPGEKKNGLFGNLIALSLGLTPNFKSNFDLAEDAKLQLSKDTYDDDLDNLLAQIGDQYADLFLAAKNLSDAILLSDILRVNTEITKAPLSASMIKRYDEHHQDLTLLKALVRQQLPEKYKEIFFDQSKNGYAGYIDGGASQEEFYKFIKPILEKMDGTEELLVKLNREDLLRKQRTFDNGSIPHQIHLGELHAILRRQEDFYPFLKDNREKIEKILTFRIPYYVGPLARGNSRFAWMTRKSEETITPWNFEEVVDKGASAQSFIERMTNFDKNLPNEKVLPKHSLLYEYFTVYNELTKVKYVTEGMRKPAFLSGEQKKAIVDLLFKTNRKVTVKQLKEDYFKKIECFDSVEISGVEDRFNASLGTYHDLLKIIKDKDFLDNEENEDILEDIVLTLTLFEDREMIEERLKTYAHLFDDKVMKQLKRRRYTGWGRLSRKLINGIRDKQSGKTILDFLKSDGFANRNFMQLIHDDSLTFKEDIQKAQVSGQGDSLHEHIANLAGSPAIKKGILQTVKVVDELVKVMGRHKPENIVIEMARENQTTQKGQKNSRERMKRIEEGIKELGSQILKEHPVENTQLQNEKLYLYYLQNGRDMYVDQELDINRLSDYDVDHIVPQSFLKDDSIDNKVLTRSDKARGKSDNVPSEEVVKKMKNYWRQLLNAKLITQRKFDNLTKAERGGLSELDKAGFIKRQLVETRQITKHVAQILDSRMNTKYDENDKLIREVKVITLKSKLVSDFRKDFQFYKVREINNYHHAHDAYLNAVVGTALIKKYPKLESEFVYGDYKVYDVRKMIAKSEQEIGKATAKYFFYSNIMNFFKTEITLANGEIRKRPLIETNGETGEIVWDKGRDFATVRKVLSMPQVNIVKKTEVQTGGFSKESILPKRNSDKLIARKKDWDPKKYGGFDSPTVAYSVLVVAKVEKGKSKKLKSVKELLGITIMERSSFEKNPIDFLEAKGYKEVKKDLIIKLPKYSLFELENGRKRMLASAGELQKGNELALPSKYVNFLYLASHYEKLKGSPEDNEQKQLFVEQHKHYLDEIIEQISEFSKRVILADANLDKVLSAYNKHRDKPIREQAENIIHLFTLTNLGAPAAFKYFDTTIDRKRYTSTKEVLDATLIHQSITGLYETRIDLSQLGGDGGGGSGGGGGTLNIEDEYRLHETSKEPDVPLGSTWLSDFPQAWAETGGMGLAVRQAPLIIPLKATSTPVSIKQYPMSQEARLGIKPHIQRLLDQGILVPCQSPWNTPLLPVKKPGTNDYRPVQDLREVNKRVEDIHPTVPNPYNLLSGLPPSHQWYTVLDLKDAFFCLRLHPTSQPLFAFEWRDPEMGISGQLTWTRLPQGFKNSPTLFNEALHRDLADFRIQHPDLILLQYVDDLLLAATSEQDCQRGTRALLQTLGNLGYRASAKKAQICQKQVKYLGYLLKEGQRWLTEARKETVMGQPTPKTPRQLREFLGTAGFCRLWIPGFAEMAAPLYPLTKPGTLFNWGPDQQKAYQEIKQALLTAPALGLPDLTKPFELFVDEKQGYAKGVLTQKLGPWRRPVAYLSKKLDPVAAGWPPCLRMVAAIAVLTKDAGKLTMGQPLVILAPHAVEALVKQPPDRWLSNARMTHYQAMLLDTDRVQFGPVVALNPATLLPLPEKEAPHDCLEILAETHGTRPDLTDQPIPDADYTWYTDGSSFLQEGQRRAGAAVTTETEVIWARALPAGTSAQRAELIALTQALKMAEGKKLNVYTDSRYAFATAHVHGEIYRRRGWLTSEGREIKNKNEILALLKALFLPKRLSIIHCPGHQKGNSAEARGNRMADQAAREAAMKAVLETSTLLAGKRTADGSEFEKRTADGSEFESPKKKAKVE

SEQ ID NO: 6583 - protein, 2091 aa, synthetic construct
MPAAKRVKLDGGDKKYSIGLDIGTNSVGWAVITDEYKVPSKKFKVLGNTDRHSIKKNLIGALLFDSGETAEATRLKRTARRRYTRRKNRICYLQEIFSNEMAKVDDSFFHRLEESFLVEEDKKHERHPIFGNIVDEVAYHEKYPTIYHLRKKLVDSTDKADLRLIYLALAHMIKFRGHFLIEGDLNPDNSDVDKLFIQLVQTYNQLFEENPINASGVDAKAILSARLSKSRRLENLIAQLPGEKKNGLFGNLIALSLGLTPNFKSNFDLAEDAKLQLSKDTYDDDLDNLLAQIGDQYADLFLAAKNLSDAILLSDILRVNTEITKAPLSASMIKRYDEHHQDLTLLKALVRQQLPEKYKEIFFDQSKNGYAGYIDGGASQEEFYKFIKPILEKMDGTEELLVKLNREDLLRKQRTFDNGSIPHQIHLGELHAILRRQEDFYPFLKDNREKIEKILTFRIPYYVGPLARGNSRFAWMTRKSEETITPWNFEEVVDKGASAQSFIERMTNFDKNLPNEKVLPKHSLLYEYFTVYNELTKVKYVTEGMRKPAFLSGEQKKAIVDLLFKTNRKVTVKQLKEDYFKKIECFDSVEISGVEDRFNASLGTYHDLLKIIKDKDFLDNEENEDILEDIVLTLTLFEDREMIEERLKTYAHLFDDKVMKQLKRRRYTGWGRLSRKLINGIRDKQSGKTILDFLKSDGFANRNFMQLIHDDSLTFKEDIQKAQVSGQGDSLHEHIANLAGSPAIKKGILQTVKVVDELVKVMGRHKPENIVIEMARENQTTQKGQKNSRERMKRIEEGIKELGSQILKEHPVENTQLQNEKLYLYYLQNGRDMYVDQELDINRLSDYDVDHIVPQSFLKDDSIDNKVLTRSDKARGKSDNVPSEEVVKKMKNYWRQLLNAKLITQRKFDNLTKAERGGLSELDKAGFIKRQLVETRQITKHVAQILDSRMNTKYDENDKLIREVKVITLKSKLVSDFRKDFQFYKVREINNYHHAHDAYLNAVVGTALIKKYPKLESEFVYGDYKVYDVRKMIAKSEQEIGKATAKYFFYSNIMNFFKTEITLANGEIRKRPLIETNGETGEIVWDKGRDFATVRKVLSMPQVNIVKKTEVQTGGFSKESILPKRNSDKLIARKKDWDPKKYGGFDSPTVAYSVLVVAKVEKGKSKKLKSVKELLGITIMERSSFEKNPIDFLEAKGYKEVKKDLIIKLPKYSLFELENGRKRMLASAGELQKGNELALPSKYVNFLYLASHYEKLKGSPEDNEQKQLFVEQHKHYLDEIIEQISEFSKRVILADANLDKVLSAYNKHRDKPIREQAENIIHLFTLTNLGAPAAFKYFDTTIDRKRYTSTKEVLDATLIHQSITGLYETRIDLSQLGGDGGGGSGGGGGTLNIEDEYRLHETSKEPDVPLGSTWLSDFPQAWAETGGMGLAVRQAPLIIPLKATSTPVSIKQYPMSQEARLGIKPHIQRLLDQGILVPCQSPWNTPLLPVKKPGTNDYRPVQDLREVNKRVEDIHPTVPNPYNLLSGLPPSHQWYTVLDLKDAFFCLRLHPTSQPLFAFEWRDPEMGISGQLTWTRLPQGFKNSPTLFNEALHRDLADFRIQHPDLILLQYVDDLLLAATSEQDCQRGTRALLQTLGNLGYRASAKKAQICQKQVKYLGYLLKEGQRWLTEARKETVMGQPTPKTPRQLREFLGKAGFCRLFIPGFAEMAAPLYPLTKPGTLFNWGPDQQKAYQEIKQALLTAPALGLPDLTKPFELFVDEKQGYAKGVLTQKLGPWRRPVAYLSKKLDPVAAGWPPCLRMVAAIAVLTKDAGKLTMGQPLVILAPHAVEALVKQPPDRWLSNARMTHYQAMLLDTDRVQFGPVVALNPATLLPLPEKEAPHDCLEILAETHGTRPDLTDQPIPDADYTWYTDGSSFLQEGQRRAGAAVTTETEVIWARALPAGTSAQRAELIALTQALKMAEGKKLNVYTDSRYAFATAHVHGEIYRRRGWLTSEGREIKNKNEILALLKALFLPKRLSIIHCPGHQKGNSAEARGNRMADQAAREAAMKAVLETSTLLAGKRTADGSEFEKRTADGSEFESPKKKAKVE

SEQ ID NO: 6584 - protein, 2093 aa, synthetic construct
MPAAKRVKLDGGDKKYSIGLDIGTNSVGWAVITDEYKVPSKKFKVLGNTDRHSIKKNLIGALLFDSGETAEATRLKRTARRRYTRRKNRICYLQEIFSNEMAKVDDSFFHRLEESFLVEEDKKHERHPIFGNIVDEVAYHEKYPTIYHLRKKLVDSTDKADLRLIYLALAHMIKFRGHFLIEGDLNPDNSDVDKLFIQLVQTYNQLFEENPINASGVDAKAILSARLSKSRRLENLIAQLPGEKKNGLFGNLIALSLGLTPNFKSNFDLAEDAKLQLSKDTYDDDLDNLLAQIGDQYADLFLAAKNLSDAILLSDILRVNTEITKAPLSASMIKRYDEHHQDLTLLKALVRQQLPEKYKEIFFDQSKNGYAGYIDGGASQEEFYKFIKPILEKMDGTEELLVKLNREDLLRKQRTFDNGSIPHQIHLGELHAILRRQEDFYPFLKDNREKIEKILTFRIPYYVGPLARGNSRFAWMTRKSEETITPWNFEEVVDKGASAQSFIERMTNFDKNLPNEKVLPKHSLLYEYFTVYNELTKVKYVTEGMRKPAFLSGEQKKAIVDLLFKTNRKVTVKQLKEDYFKKIECFDSVEISGVEDRFNASLGTYHDLLKIIKDKDFLDNEENEDILEDIVLTLTLFEDREMIEERLKTYAHLFDDKVMKQLKRRRYTGWGRLSRKLINGIRDKQSGKTILDFLKSDGFANRNFMQLIHDDSLTFKEDIQKAQVSGQGDSLHEHIANLAGSPAIKKGILQTVKVVDELVKVMGRHKPENIVIEMARENQTTQKGQKNSRERMKRIEEGIKELGSQILKEHPVENTQLQNEKLYLYYLQNGRDMYVDQELDINRLSDYDVDHIVPQSFLKDDSIDNKVLTRSDKARGKSDNVPSEEVVKKMKNYWRQLLNAKLITQRKFDNLTKAERGGLSELDKAGFIKRQLVETRQITKHVAQILDSRMNTKYDENDKLIREVKVITLKSKLVSDFRKDFQFYKVREINNYHHAHDAYLNAVVGTALIKKYPKLESEFVYGDYKVYDVRKMIAKSEQEIGKATAKYFFYSNIMNFFKTEITLANGEIRKRPLIETNGETGEIVWDKGRDFATVRKVLSMPQVNIVKKTEVQTGGFSKESILPKRNSDKLIARKKDWDPKKYGGFDSPTVAYSVLVVAKVEKGKSKKLKSVKELLGITIMERSSFEKNPIDFLEAKGYKEVKKDLIIKLPKYSLFELENGRKRMLASAGELQKGNELALPSKYVNFLYLASHYEKLKGSPEDNEQKQLFVEQHKHYLDEIIEQISEFSKRVILADANLDKVLSAYNKHRDKPIREQAENIIHLFTLTNLGAPAAFKYFDTTIDRKRYTSTKEVLDATLIHQSITGLYETRIDLSQLGGDGGGGGGGSGGTAPLEEEYRLFLEAPIQNVTLLEQWKREIPKVWAEINPPGLASTQAPIHVQLLSTALPVRVRQYPITLEAKRSLRETIRKFRAAGILRPVHSPWNTPLLPVRKSGTSEYRMVQDLREVNKRVETIHPTVPNPYTLLSLLPPDRIWYSVLDLKDAFFCIPLAPESQLIFAFEWADAEEGESGQLTWTRLPQGFKNSPTLFNEALNRDLQGFRLDHPSVSLLQYVDDLLIAADTQAACLSATRDLLMTLAELGYRVSGKKAQLCQEEVTYLGFKIHKGSRSLSNSRTQAILQIPVPKTKRQVREFLGTIGYCRLWIPGFAELAQPLYAATRPGNDPLVWGEKEEEAFQSLKLALTQPPALALPSLDKPFQLFVEETSGAAKGVLTQALGPWKRPVAYLSKRLDPVAAGWPRCLRAIAAAALLTREASKLTFGQDIEITSSHNLESLLRSPPDKWLTNARITQYQVLLLDPPRVRFKQTAALNPATLLPETDDTLPIHHCLDTLDSLTSTRPDLTDQPLAQAEATLFTDGSSYIRDGKRYAGAAVVTLDSVIWAEPLPIGTSAQKAELIALTKALEWSKDKSVNIYTDSRYAFATLHVHGMIYRERGWLTAGGKAIKNAPEILALLTAVWLPKRVAVMHCKGHQKDDAPTSTGNRRADEVAREVAIRPLSTQATISAGKRTADGSEFEKRTADGSEFESPKKKAKVE

SEQ ID NO: 6585 - protein, 2093 aa, synthetic construct
MPAAKRVKLDGGDKKYSIGLDIGTNSVGWAVITDEYKVPSKKFKVLGNTDRHSIKKNLIGALLFDSGETAEATRLKRTARRRYTRRKNRICYLQEIFSNEMAKVDDSFFHRLEESFLVEEDKKHERHPIFGNIVDEVAYHEKYPTIYHLRKKLVDSTDKADLRLIYLALAHMIKFRGHFLIEGDLNPDNSDVDKLFIQLVQTYNQLFEENPINASGVDAKAILSARLSKSRRLENLIAQLPGEKKNGLFGNLIALSLGLTPNFKSNFDLAEDAKLQLSKDTYDDDLDNLLAQIGDQYADLFLAAKNLSDAILLSDILRVNTEITKAPLSASMIKRYDEHHQDLTLLKALVRQQLPEKYKEIFFDQSKNGYAGYIDGGASQEEFYKFIKPILEKMDGTEELLVKLNREDLLRKQRTFDNGSIPHQIHLGELHAILRRQEDFYPFLKDNREKIEKILTFRIPYYVGPLARGNSRFAWMTRKSEETITPWNFEEVVDKGASAQSFIERMTNFDKNLPNEKVLPKHSLLYEYFTVYNELTKVKYVTEGMRKPAFLSGEQKKAIVDLLFKTNRKVTVKQLKEDYFKKIECFDSVEISGVEDRFNASLGTYHDLLKIIKDKDFLDNEENEDILEDIVLTLTLFEDREMIEERLKTYAHLFDDKVMKQLKRRRYTGWGRLSRKLINGIRDKQSGKTILDFLKSDGFANRNFMQLIHDDSLTFKEDIQKAQVSGQGDSLHEHIANLAGSPAIKKGILQTVKVVDELVKVMGRHKPENIVIEMARENQTTQKGQKNSRERMKRIEEGIKELGSQILKEHPVENTQLQNEKLYLYYLQNGRDMYVDQELDINRLSDYDVDHIVPQSFLKDDSIDNKVLTRSDKARGKSDNVPSEEVVKKMKNYWRQLLNAKLITQRKFDNLTKAERGGLSELDKAGFIKRQLVETRQITKHVAQILDSRMNTKYDENDKLIREVKVITLKSKLVSDFRKDFQFYKVREINNYHHAHDAYLNAVVGTALIKKYPKLESEFVYGDYKVYDVRKMIAKSEQEIGKATAKYFFYSNIMNFFKTEITLANGEIRKRPLIETNGETGEIVWDKGRDFATVRKVLSMPQVNIVKKTEVQTGGFSKESILPKRNSDKLIARKKDWDPKKYGGFDSPTVAYSVLVVAKVEKGKSKKLKSVKELLGITIMERSSFEKNPIDFLEAKGYKEVKKDLIIKLPKYSLFELENGRKRMLASAGELQKGNELALPSKYVNFLYLASHYEKLKGSPEDNEQKQLFVEQHKHYLDEIIEQISEFSKRVILADANLDKVLSAYNKHRDKPIREQAENIIHLFTLTNLGAPAAFKYFDTTIDRKRYTSTKEVLDATLIHQSITGLYETRIDLSQLGGDGGGGGGGSGGTAPLEEEYRLFLEAPIQNVTLLEQWKREIPKVWAEINPPGLASTQAPIHVQLLSTALPVRVRQYPITLEAKRSLRETIRKFRAAGILRPVHSPWNTPLLPVRKSGTSEYRMVQDLREVNKRVETIHPTVPNPYTLLSLLPPDRIWYSVLDLKDAFFCIPLAPESQLIFAFEWADAEEGESGQLTWTRLPQGFKNSPTLFNEALNRDLQGFRLDHPSVSLLQYVDDLLIAADTQAACLSATRDLLMTLAELGYRVSGKKAQLCQEEVTYLGFKIHKGSRSLSNSRTQAILQIPVPKTKRQVREFLGKIGYCRLFIPGFAELAQPLYAATRPGNDPLVWGEKEEEAFQSLKLALTQPPALALPSLDKPFQLFVEETSGAAKGVLTQALGPWKRPVAYLSKRLDPVAAGWPRCLRAIAAAALLTREASKLTFGQDIEITSSHNLESLLRSPPDKWLTNARITQYQVLLLDPPRVRFKQTAALNPATLLPETDDTLPIHHCLDTLDSLTSTRPDLTDQPLAQAEATLFTDGSSYIRDGKRYAGAAVVTLDSVIWAEPLPIGTSAQKAELIALTKALEWSKDKSVNIYTDSRYAFATLHVHGMIYRERGWLTAGGKAIKNAPEILALLTAVWLPKRVAVMHCKGHQKDDAPTSTGNRRADEVAREVAIRPLSTQATISAGKRTADGSEFEKRTADGSEFESPKKKAKVE

SEQ ID NO: 6586 - protein, 2097 aa, synthetic construct
MPAAKRVKLDGGDKKYSIGLDIGTNSVGWAVITDEYKVPSKKFKVLGNTDRHSIKKNLIGALLFDSGETAEATRLKRTARRRYTRRKNRICYLQEIFSNEMAKVDDSFFHRLEESFLVEEDKKHERHPIFGNIVDEVAYHEKYPTIYHLRKKLVDSTDKADLRLIYLALAHMIKFRGHFLIEGDLNPDNSDVDKLFIQLVQTYNQLFEENPINASGVDAKAILSARLSKSRRLENLIAQLPGEKKNGLFGNLIALSLGLTPNFKSNFDLAEDAKLQLSKDTYDDDLDNLLAQIGDQYADLFLAAKNLSDAILLSDILRVNTEITKAPLSASMIKRYDEHHQDLTLLKALVRQQLPEKYKEIFFDQSKNGYAGYIDGGASQEEFYKFIKPILEKMDGTEELLVKLNREDLLRKQRTFDNGSIPHQIHLGELHAILRRQEDFYPFLKDNREKIEKILTFRIPYYVGPLARGNSRFAWMTRKSEETITPWNFEEVVDKGASAQSFIERMTNFDKNLPNEKVLPKHSLLYEYFTVYNELTKVKYVTEGMRKPAFLSGEQKKAIVDLLFKTNRKVTVKQLKEDYFKKIECFDSVEISGVEDRFNASLGTYHDLLKIIKDKDFLDNEENEDILEDIVLTLTLFEDREMIEERLKTYAHLFDDKVMKQLKRRRYTGWGRLSRKLINGIRDKQSGKTILDFLKSDGFANRNFMQLIHDDSLTFKEDIQKAQVSGQGDSLHEHIANLAGSPAIKKGILQTVKVVDELVKVMGRHKPENIVIEMARENQTTQKGQKNSRERMKRIEEGIKELGSQILKEHPVENTQLQNEKLYLYYLQNGRDMYVDQELDINRLSDYDVDHIVPQSFLKDDSIDNKVLTRSDKARGKSDNVPSEEVVKKMKNYWRQLLNAKLITQRKFDNLTKAERGGLSELDKAGFIKRQLVETRQITKHVAQILDSRMNTKYDENDKLIREVKVITLKSKLVSDFRKDFQFYKVREINNYHHAHDAYLNAVVGTALIKKYPKLESEFVYGDYKVYDVRKMIAKSEQEIGKATAKYFFYSNIMNFFKTEITLANGEIRKRPLIETNGETGEIVWDKGRDFATVRKVLSMPQVNIVKKTEVQTGGFSKESILPKRNSDKLIARKKDWDPKKYGGFDSPTVAYSVLVVAKVEKGKSKKLKSVKELLGITIMERSSFEKNPIDFLEAKGYKEVKKDLIIKLPKYSLFELENGRKRMLASAGELQKGNELALPSKYVNFLYLASHYEKLKGSPEDNEQKQLFVEQHKHYLDEIIEQISEFSKRVILADANLDKVLSAYNKHRDKPIREQAENIIHLFTLTNLGAPAAFKYFDTTIDRKRYTSTKEVLDATLIHQSITGLYETRIDLSQLGGDGGGGGGGSGGTVSLQDEHRLFDIPVTTSLPDVWLQDFPQAWAETGGLGRAKCQAPIIIDLKPTAVPVSIKQYPMSLEAHMGIRQHIIKFLELGVLRPCRSPWNTPLLPVKKPGTQDYRPVQDLREINKRTVDIHPTVPNPYNLLSTLKPDYSWYTVLDLKDAFFCLPLAPQSQELFAFEWKDPERGISGQLTWTRLPQGFKNSPTLFNEALHRDLTDFRTQHPEVTLLQYVDDLLLAAPTKKACTQGTRHLLQELGEKGYRASAKKAQICQTKVTYLGYILSEGKRWLTPGRIETVARIPPPRNPREVREFLGTAGFCRLWIPGFAELAAPLYALTKPSTPFTWQTEHQLAFEALKKALLSAPALGLPDTSKPFTLFLDERQGIAKGVLTQKLGPWKRPVAYLSKKLDPVAAGWPPCLRIMAATAMLVKDSAKLTLGQPLTVITPHTLEAIVRQPPDRWITNARLTHYQALLLDTDRVQFGPPVTLNPATLLPVPENQPSPHDCRQVLAETHGTREDLKDQELPDADHTWYTDGSSYLDSGTRRAGAAVVDGHNTIWAQSLPPGTSAQKAELIALTKALELSKGKKANIYTDSRYAFATAHTHGSIYERRGWLTSEGKEIKNKAEIIALLKALFLPQEVAIIHCPGHQKGQDPVAVGNRQADRVARQAAMAEVLTLATEPDNTSHITAGKRTADGSEFEKRTADGSEFESPKKKAKVE

SEQ ID NO: 6587 - protein, 2090 aa, synthetic construct
MPAAKRVKLDGGDKKYSIGLDIGTNSVGWAVITDEYKVPSKKFKVLGNTDRHSIKKNLIGALLFDSGETAEATRLKRTARRRYTRRKNRICYLQEIFSNEMAKVDDSFFHRLEESFLVEEDKKHERHPIFGNIVDEVAYHEKYPTIYHLRKKLVDSTDKADLRLIYLALAHMIKFRGHFLIEGDLNPDNSDVDKLFIQLVQTYNQLFEENPINASGVDAKAILSARLSKSRRLENLIAQLPGEKKNGLFGNLIALSLGLTPNFKSNFDLAEDAKLQLSKDTYDDDLDNLLAQIGDQYADLFLAAKNLSDAILLSDILRVNTEITKAPLSASMIKRYDEHHQDLTLLKALVRQQLPEKYKEIFFDQSKNGYAGYIDGGASQEEFYKFIKPILEKMDGTEELLVKLNREDLLRKQRTFDNGSIPHQIHLGELHAILRRQEDFYPFLKDNREKIEKILTFRIPYYVGPLARGNSRFAWMTRKSEETITPWNFEEVVDKGASAQSFIERMTNFDKNLPNEKVLPKHSLLYEYFTVYNELTKVKYVTEGMRKPAFLSGEQKKAIVDLLFKTNRKVTVKQLKEDYFKKIECFDSVEISGVEDRFNASLGTYHDLLKIIKDKDFLDNEENEDILEDIVLTLTLFEDREMIEERLKTYAHLFDDKVMKQLKRRRYTGWGRLSRKLINGIRDKQSGKTILDFLKSDGFANRNFMQLIHDDSLTFKEDIQKAQVSGQGDSLHEHIANLAGSPAIKKGILQTVKVVDELVKVMGRHKPENIVIEMARENQTTQKGQKNSRERMKRIEEGIKELGSQILKEHPVENTQLQNEKLYLYYLQNGRDMYVDQELDINRLSDYDVDHIVPQSFLKDDSIDNKVLTRSDKARGKSDNVPSEEVVKKMKNYWRQLLNAKLITQRKFDNLTKAERGGLSELDKAGFIKRQLVETRQITKHVAQILDSRMNTKYDENDKLIREVKVITLKSKLVSDFRKDFQFYKVREINNYHHAHDAYLNAVVGTALIKKYPKLESEFVYGDYKVYDVRKMIAKSEQEIGKATAKYFFYSNIMNFFKTEITLANGEIRKRPLIETNGETGEIVWDKGRDFATVRKVLSMPQVNIVKKTEVQTGGFSKESILPKRNSDKLIARKKDWDPKKYGGFDSPTVAYSVLVVAKVEKGKSKKLKSVKELLGITIMERSSFEKNPIDFLEAKGYKEVKKDLIIKLPKYSLFELENGRKRMLASAGELQKGNELALPSKYVNFLYLASHYEKLKGSPEDNEQKQLFVEQHKHYLDEIIEQISEFSKRVILADANLDKVLSAYNKHRDKPIREQAENIIHLFTLTNLGAPAAFKYFDTTIDRKRYTSTKEVLDATLIHQSITGLYETRIDLSQLGGDGGGGGGGSGGTLQLEEEYRLFEPESTQKQEMDIWLKNFPQAWAETGGMGTAHCQAPVLIQLKATATPISIRQYPMPHEAYQGIKPHIRRMLDQGILKPCQSPWNTPLLPVKKPGTEDYRPVQDLREVNKRVEDIHPTVPNPYNLLSTLPPSHPWYTVLDLKDAFFCLRLHSESQLLFAFEWRDPEIGLSGQLTWTRLPQGFKNSPTLFNEALHSDLADFRVRYPALVLLQYVDDLLLAAATRTECLEGTKALLETLGNKGYRASAKKAQICLQEVTYLGYSLKDGQRWLTKARKEAILSIPVPKNSRQVREFLGTAGYCRLWIPGFAELAAPLYPLTRPGTLFQWGTEQQLAFEDIKKALLSSPALGLPDITKPFELFIDENSGFAKGVLVQKLGPWKRPVAYLSKKLDTVASGWPPCLRMVAAIAILVKDAGKLTLGQPLTILTSHPVEALVRQPPNKWLSNARMTHYQAMLLDAERVHFGPTVSLNPATLLPLPSGGNHHDCLQILAETHGTRPDLTDQPLPDADLTWYTDGSSFIRNGEREAGAAVTTESEVIWAAPLPPGTSAQRAELIALTQALKMAEGKKLTVYTDSRYAFATTHVHGEIYRRRGWLTSEGKEIKNKNEILALLEALFLPKRLSIIHCPGHQKGDSPQAKGNRLADDTAKKAATETHSSLTVLPAGKRTADGSEFEKRTADGSEFESPKKKAKVE

SEQ ID NO: 6588 - protein, 2213 aa, synthetic construct
MPAAKRVKLDGGDKKYSIGLDIGTNSVGWAVITDEYKVPSKKFKVLGNTDRHSIKKNLIGALLFDSGETAEATRLKRTARRRYTRRKNRICYLQEIFSNEMAKVDDSFFHRLEESFLVEEDKKHERHPIFGNIVDEVAYHEKYPTIYHLRKKLVDSTDKADLRLIYLALAHMIKFRGHFLIEGDLNPDNSDVDKLFIQLVQTYNQLFEENPINASGVDAKAILSARLSKSRRLENLIAQLPGEKKNGLFGNLIALSLGLTPNFKSNFDLAEDAKLQLSKDTYDDDLDNLLAQIGDQYADLFLAAKNLSDAILLSDILRVNTEITKAPLSASMIKRYDEHHQDLTLLKALVRQQLPEKYKEIFFDQSKNGYAGYIDGGASQEEFYKFIKPILEKMDGTEELLVKLNREDLLRKQRTFDNGSIPHQIHLGELHAILRRQEDFYPFLKDNREKIEKILTFRIPYYVGPLARGNSRFAWMTRKSEETITPWNFEEVVDKGASAQSFIERMTNFDKNLPNEKVLPKHSLLYEYFTVYNELTKVKYVTEGMRKPAFLSGEQKKAIVDLLFKTNRKVTVKQLKEDYFKKIECFDSVEISGVEDRFNASLGTYHDLLKIIKDKDFLDNEENEDILEDIVLTLTLFEDREMIEERLKTYAHLFDDKVMKQLKRRRYTGWGRLSRKLINGIRDKQSGKTILDFLKSDGFANRNFMQLIHDDSLTFKEDIQKAQVSGQGDSLHEHIANLAGSPAIKKGILQTVKVVDELVKVMGRHKPENIVIEMARENQTTQKGQKNSRERMKRIEEGIKELGSQILKEHPVENTQLQNEKLYLYYLQNGRDMYVDQELDINRLSDYDVDHIVPQSFLKDDSIDNKVLTRSDKARGKSDNVPSEEVVKKMKNYWRQLLNAKLITQRKFDNLTKAERGGLSELDKAGFIKRQLVETRQITKHVAQILDSRMNTKYDENDKLIREVKVITLKSKLVSDFRKDFQFYKVREINNYHHAHDAYLNAVVGTALIKKYPKLESEFVYGDYKVYDVRKMIAKSEQEIGKATAKYFFYSNIMNFFKTEITLANGEIRKRPLIETNGETGEIVWDKGRDFATVRKVLSMPQVNIVKKTEVQTGGFSKESILPKRNSDKLIARKKDWDPKKYGGFDSPTVAYSVLVVAKVEKGKSKKLKSVKELLGITIMERSSFEKNPIDFLEAKGYKEVKKDLIIKLPKYSLFELENGRKRMLASAGELQKGNELALPSKYVNFLYLASHYEKLKGSPEDNEQKQLFVEQHKHYLDEIIEQISEFSKRVILADANLDKVLSAYNKHRDKPIREQAENIIHLFTLTNLGAPAAFKYFDTTIDRKRYTSTKEVLDATLIHQSITGLYETRIDLSQLGGDGGGGGGGSGGTLGDQGSRGSDPLPEPRVTLTVEGIPTEFLVNTGAEHSVLTKPMGKMGSKRTVVAGATGSKVYPWTTKRLLKIGQKQVTHSFLVIPECPAPLLGRDLLTKLKAQIQFSTEGPQVTWEDRPAMCLVLNLEEEYRLHEKPVPPSIDPSWLQLFPMVWAEKAGMGLANQVPPVVVELKSDASPVAVRQYPMSKEAREGIRPHIQRFLDLGILVPCQSPWNTPLLPVKKPGTNDYRPVQDLREVNKRVQDIHPTVPNPYNLLSSLPPSHTWYSVLDLKDAFFCLKLHPNSQPLFAFEWRDPEKGNTGQLTWTRLPQGFKNSPTLFNEALHRDLASFRALNPQVVMLQYVDDLLVAAPTYRDCKEGTRRLLQELSKLGYRVSAKKAQLCREEVTYLGYLLKGGKRWLTPARKATVMKIPTPTTPRQVREFLGKAGFCRLFIPGFASLAAPLYPLTRPKVPFTWTEAHQEAFGRIKEALLSAPALALPDLTKPFALYVDEKEGVARGVLTQTLGPWRRPVAYLSKKLDPVASGWPTCLKAIAAVALLLKDADKLTLGQNVLVIAPHNLESIVRQPPDRWMTNARMTHYQSLLLNERVSFAPPAILNPATLLPVESDDTPIHICSEILAEETGTRPDLRDQPLPGVPAWYTDGSSFIMDGRRQAGAAIVDNKRTVWASNLPEGTSAQKAELIALTQALRLAEGKSINIYTDSRYAFATAHVHGAIYKQRGWLTSAGKDIKNKEEILALLEAIHLPKRVAIIHCPGHQRGTDPVATGNRKADEAAKQAAQSTRILTETTKNAGKRTADGSEFEKRTADGSEFESPKKKAKVE

SEQ ID NO: 6589 - protein, 2091 aa, synthetic construct; identical to SEQ ID NO: 4511

SEQ ID NO: 6590 - protein, 2091 aa, synthetic construct
MPAAKRVKLDGGDKKYSIGLDIGTNSVGWAVITDEYKVPSKKFKVLGNTDRHSIKKNLIGALLFDSGETAEATRLKRTARRRYTRRKNRICYLQEIFSNEMAKVDDSFFHRLEESFLVEEDKKHERHPIFGNIVDEVAYHEKYPTIYHLRKKLVDSTDKADLRLIYLALAHMIKFRGHFLIEGDLNPDNSDVDKLFIQLVQTYNQLFEENPINASGVDAKAILSARLSKSRRLENLIAQLPGEKKNGLFGNLIALSLGLTPNFKSNFDLAEDAKLQLSKDTYDDDLDNLLAQIGDQYADLFLAAKNLSDAILLSDILRVNTEITKAPLSASMIKRYDEHHQDLTLLKALVRQQLPEKYKEIFFDQSKNGYAGYIDGGASQEEFYKFIKPILEKMDGTEELLVKLNREDLLRKQRTFDNGSIPHQIHLGELHAILRRQEDFYPFLKDNREKIEKILTFRIPYYVGPLARGNSRFAWMTRKSEETITPWNFEEVVDKGASAQSFIERMTNFDKNLPNEKVLPKHSLLYEYFTVYNELTKVKYVTEGMRKPAFLSGEQKKAIVDLLFKTNRKVTVKQLKEDYFKKIECFDSVEISGVEDRFNASLGTYHDLLKIIKDKDFLDNEENEDILEDIVLTLTLFEDREMIEERLKTYAHLFDDKVMKQLKRRRYTGWGRLSRKLINGIRDKQSGKTILDFLKSDGFANRNFMQLIHDDSLTFKEDIQKAQVSGQGDSLHEHIANLAGSPAIKKGILQTVKVVDELVKVMGRHKPENIVIEMARENQTTQKGQKNSRERMKRIEEGIKELGSQILKEHPVENTQLQNEKLYLYYLQNGRDMYVDQELDINRLSDYDVDHIVPQSFLKDDSIDNKVLTRSDKARGKSDNVPSEEVVKKMKNYWRQLLNAKLITQRKFDNLTKAERGGLSELDKAGFIKRQLVETRQITKHVAQILDSRMNTKYDENDKLIREVKVITLKSKLVSDFRKDFQFYKVREINNYHHAHDAYLNAVVGTALIKKYPKLESEFVYGDYKVYDVRKMIAKSEQEIGKATAKYFFYSNIMNFFKTEITLANGEIRKRPLIETNGETGEIVWDKGRDFATVRKVLSMPQVNIVKKTEVQTGGFSKESILPKRNSDKLIARKKDWDPKKYGGFDSPTVAYSVLVVAKVEKGKSKKLKSVKELLGITIMERSSFEKNPIDFLEAKGYKEVKKDLIIKLPKYSLFELENGRKRMLASAGELQKGNELALPSKYVNFLYLASHYEKLKGSPEDNEQKQLFVEQHKHYLDEIIEQISEFSKRVILADANLDKVLSAYNKHRDKPIREQAENIIHLFTLTNLGAPAAFKYFDTTIDRKRYTSTKEVLDATLIHQSITGLYETRIDLSQLGGDGGGGGGGSGGTLGIEDEYRLHETSTEPDVSLGSTWLSDFPQAWAETGGMGLAVRQAPLIIPLKATSTPVSIQQYPMSHEARLGIKPHIQRLLDQGILVPCQSPWNTPLLPVKKPGTNDYRPVQDLREVNKRVEDIHPTVPNPYNLLSGLPPSHQWYTVLDLKDAFFCLRLHPTSQPLFAFEWRDPGMGISGQLTWTRLPQGFKNSPTLFNEALHRDLADFRIQHPDLILLQYVDDILLAATSELDCQQGTRALLQTLGDLGYRASAKKAQICQKQVKYLGYLLREGQRWLTEARKETVMGQPVPKTPRQLREFLGTAGFCRLWIPGFAEMAAPLYPLTKPGTLFSWGPDQQKAYQEIKQALLTAPALGLPDLTKPFELFVDEKQGYAKGVLTQKLGPWRRPVAYLSKKLDPVAAGWPPCLRMVAAIAVLTKDAGKLTMGQPLVILAPHAVEALVKQPPDRWLSNARMTHYQAMLLDTDRVQFGPVVALNPATLLPLPEEGAPHDCLEILAETHGTRPDLTDQPIPDADHTWYTDGSSFLQEGQRKAGAAVTTETEVIWAGALPAGTSAQRAELIALTQALKMAEGKRLNVYTDSRYAFATAHIHGEIYRRRGWLTSEGREIKNKSEILALLKALFLPKRLSIIHCLGHQKGDSAEARGNRLADQAAREAAIKTPPDTSTLLAGKRTADGSEFEKRTADGSEFESPKKKAKVE

SEQ ID NO: 6591 - protein, 2091 aa, synthetic construct; identical to SEQ ID NO: 4511

SEQ ID NO: 6592 - protein, 2091 aa, synthetic construct
MPAAKRVKLDGGDKKYSIGLDIGTNSVGWAVITDEYKVPSKKFKVLGNTDRHSIKKNLIGALLFDSGETAEATRLKRTARRRYTRRKNRICYLQEIFSNEMAKVDDSFFHRLEESFLVEEDKKHERHPIFGNIVDEVAYHEKYPTIYHLRKKLVDSTDKADLRLIYLALAHMIKFRGHFLIEGDLNPDNSDVDKLFIQLVQTYNQLFEENPINASGVDAKAILSARLSKSRRLENLIAQLPGEKKNGLFGNLIALSLGLTPNFKSNFDLAEDAKLQLSKDTYDDDLDNLLAQIGDQYADLFLAAKNLSDAILLSDILRVNTEITKAPLSASMIKRYDEHHQDLTLLKALVRQQLPEKYKEIFFDQSKNGYAGYIDGGASQEEFYKFIKPILEKMDGTEELLVKLNREDLLRKQRTFDNGSIPHQIHLGELHAILRRQEDFYPFLKDNREKIEKILTFRIPYYVGPLARGNSRFAWMTRKSEETITPWNFEEVVDKGASAQSFIERMTNFDKNLPNEKVLPKHSLLYEYFTVYNELTKVKYVTEGMRKPAFLSGEQKKAIVDLLFKTNRKVTVKQLKEDYFKKIECFDSVEISGVEDRFNASLGTYHDLLKIIKDKDFLDNEENEDILEDIVLTLTLFEDREMIEERLKTYAHLFDDKVMKQLKRRRYTGWGRLSRKLINGIRDKQSGKTILDFLKSDGFANRNFMQLIHDDSLTFKEDIQKAQVSGQGDSLHEHIANLAGSPAIKKGILQTVKVVDELVKVMGRHKPENIVIEMARENQTTQKGQKNSRERMKRIEEGIKELGSQILKEHPVENTQLQNEKLYLYYLQNGRDMYVDQELDINRLSDYDVDHIVPQSFLKDDSIDNKVLTRSDKARGKSDNVPSEEVVKKMKNYWRQLLNAKLITQRKFDNLTKAERGGLSELDKAGFIKRQLVETRQITKHVAQILDSRMNTKYDENDKLIREVKVITLKSKLVSDFRKDFQFYKVREINNYHHAHDAYLNAVVGTALIKKYPKLESEFVYGDYKVYDVRKMIAKSEQEIGKATAKYFFYSNIMNFFKTEITLANGEIRKRPLIETNGETGEIVWDKGRDFATVRKVLSMPQVNIVKKTEVQTGGFSKESILPKRNSDKLIARKKDWDPKKYGGFDSPTVAYSVLVVAKVEKGKSKKLKSVKELLGITIMERSSFEKNPIDFLEAKGYKEVKKDLIIKLPKYSLFELENGRKRMLASAGELQKGNELALPSKYVNFLYLASHYEKLKGSPEDNEQKQLFVEQHKHYLDEIIEQISEFSKRVILADANLDKVLSAYNKHRDKPIREQAENIIHLFTLTNLGAPAAFKYFDTTIDRKRYTSTKEVLDATLIHQSITGLYETRIDLSQLGGDGGGGGGGSGGTLNIEDEYRLHETSKGPDVPLGSTWLSDFPQAWAETGGMGLAFRQAPLIISLKATSTPVSIKQYPMSQEARLGIKPHIQRLLDQGILVPCQSPWNTPLLPVKKPGTNDYRPVQDLREVNKRVEDIHPTVPNPYNLLSGLPPSHQWYTVLDLKDAFFCLRLHPTSQSLFAFEWKDPEMGISGQLTWTRLPQGFKNSPTLFDEALHRDLADFRIQHPDLILLQYVDDLLLAATSELDCQQGTRALLQTLGDLGYRASAKKAQICQKQVKYLGYLLKEGQRWLTEARKETVMGQPTPKTPRQLREFLGTAGLCRLWIPGFAEMAAPLYPLTKTGTLFKWGPDQQKAYQEIKQALLTAPALGLPDLTKPFELFVDEKQGYAKGVLTQKLGPWRRPVAYLSKKLDPVAAGWPPCLRMVAAIAVLTKDVGKLTMGQPLVILAPHAVEALVKQPPDRWLSNARMTHYQALLLDTDRVQFGPIVALNPATLLPLPEEGLQHDCLDILAEAHGTRPDLTDQPLPDADHTWYTDGSSFLQEGQRRAGAAVTTETEVIWAKALPAGTSAQRAELIALTQALKMAAGKKLNVYTDSRYAFATAHIHGEIYRRRGLLTSEGKEIKNKDEILALLKALFLPKRLSIIHCPGHQKGNHAEARGNRMADQAAREVATRETPETSTLLAGKRTADGSEFEKRTADGSEFESPKKKAKVE

SEQ ID NO: 6593 - protein, 2091 aa, synthetic construct
MPAAKRVKLDGGDKKYSIGLDIGTNSVGWAVITDEYKVPSKKFKVLGNTDRHSIKKNLIGALLFDSGETAEATRLKRTARRRYTRRKNRICYLQEIFSNEMAKVDDSFFHRLEESFLVEEDKKHERHPIFGNIVDEVAYHEKYPTIYHLRKKLVDSTDKADLRLIYLALAHMIKFRGHFLIEGDLNPDNSDVDKLFIQLVQTYNQLFEENPINASGVDAKAILSARLSKSRRLENLIAQLPGEKKNGLFGNLIALSLGLTPNFKSNFDLAEDAKLQLSKDTYDDDLDNLLAQIGDQYADLFLAAKNLSDAILLSDILRVNTEITKAPLSASMIKRYDEHHQDLTLLKALVRQQLPEKYKEIFFDQSKNGYAGYIDGGASQEEFYKFIKPILEKMDGTEELLVKLNREDLLRKQRTFDNGSIPHQIHLGELHAILRRQEDFYPFLKDNREKIEKILTFRIPYYVGPLARGNSRFAWMTRKSEETITPWNFEEVVDKGASAQSFIERMTNFDKNLPNEKVLPKHSLLYEYFTVYNELTKVKYVTEGMRKPAFLSGEQKKAIVDLLFKTNRKVTVKQLKEDYFKKIECFDSVEISGVEDRFNASLGTYHDLLKIIKDKDFLDNEENEDILEDIVLTLTLFEDREMIEERLKTYAHLFDDKVMKQLKRRRYTGWGRLSRKLINGIRDKQSGKTILDFLKSDGFANRNFMQLIHDDSLTFKEDIQKAQVSGQGDSLHEHIANLAGSPAIKKGILQTVKVVDELVKVMGRHKPENIVIEMARENQTTQKGQKNSRERMKRIEEGIKELGSQILKEHPVENTQLQNEKLYLYYLQNGRDMYVDQELDINRLSDYDVDHIVPQSFLKDDSIDNKVLTRSDKARGKSDNVPSEEVVKKMKNYWRQLLNAKLITQRKFDNLTKAERGGLSELDKAGFIKRQLVETRQITKHVAQILDSRMNTKYDENDKLIREVKVITLKSKLVSDFRKDFQFYKVREINNYHHAHDAYLNAVVGTALIKKYPKLESEFVYGDYKVYDVRKMIAKSEQEIGKATAKYFFYSNIMNFFKTEITLANGEIRKRPLIETNGETGEIVWDKGRDFATVRKVLSMPQVNIVKKTEVQTGGFSKESILPKRNSDKLIARKKDWDPKKYGGFDSPTVAYSVLVVAKVEKGKSKKLKSVKELLGITIMERSSFEKNPIDFLEAKGYKEVKKDLIIKLPKYSLFELENGRKRMLASAGELQKGNELALPSKYVNFLYLASHYEKLKGSPEDNEQKQLFVEQHKHYLDEIIEQISEFSKRVILADANLDKVLSAYNKHRDKPIREQAENIIHLFTLTNLGAPAAFKYFDTTIDRKRYTSTKEVLDATLIHQSITGLYETRIDLSQLGGDGGGGGGGSGGTLNIEDEYRLHETSKGPDVPLGSTWLSDFPQAWAETGGMGLAVRQAPLIIPLKATSTPVSIKQYPMSQEARLGIKPHIQRLLDQGILVPCQSPWNTPLLPVKKPGTNDYRPVQDLREVNKRVEDIHPTVPNPYNLLSGLPPSHQWYTVLDLKDAFFCLRLHPTSQSLFAFEWRDPEMGISGQLTWTRLPQGFKNSPTLFNEALHRDLADFRIQHPDLILLQYVDDLLLAATSELDCQQGTRALLQTLGDLGYRASAKKAQICQKQVKYLGYLLKEGQRWLTEARKETVMGQPTPKTPRQLREFLGTAGFCRLWIPGFAEMAAPLYPLTKPGTLFEWGPDQQKAYQEIKQALLTAPALGLPDLTKPFELFVDEKQGYAKGVLTQKLGPWRRPVAYLSKKLDPVAAGWPPCLRMVAAIAVLTKDAGKLTMGQPLVILAPHAVEALVKQPPDRWLSNARMTHYQALLLDTDRVQFGPIVALNPATLLPLPEEGLQHDCLDILAEAHGTRPDLTDQPLPDADHTWYTDGSSFLQEGQRKAGAAVTTETEVVWAKALPAGTSAQRAELIALTQALKMAEGKKLNVYTDSRYAFATAHIHGEIYRRRGWLTSEGKEIKNKDEILALLKALFLPKRLSIIHCPGHQKGNRAEARGNRMADQAAREVATRETPETSTLLAGKRTADGSEFEKRTADGSEFESPKKKAKVE

SEQ ID NO: 6594 - protein, 2091 aa, synthetic construct
MPAAKRVKLDGGDKKYSIGLDIGTNSVGWAVITDEYKVPSKKFKVLGNTDRHSIKKNLIGALLFDSGETAEATRLKRTARRRYTRRKNRICYLQEIFSNEMAKVDDSFFHRLEESFLVEEDKKHERHPIFGNIVDEVAYHEKYPTIYHLRKKLVDSTDKADLRLIYLALAHMIKFRGHFLIEGDLNPDNSDVDKLFIQLVQTYNQLFEENPINASGVDAKAILSARLSKSRRLENLIAQLPGEKKNGLFGNLIALSLGLTPNFKSNFDLAEDAKLQLSKDTYDDDLDNLLAQIGDQYADLFLAAKNLSDAILLSDILRVNTEITKAPLSASMIKRYDEHHQDLTLLKALVRQQLPEKYKEIFFDQSKNGYAGYIDGGASQEEFYKFIKPILEKMDGTEELLVKLNREDLLRKQRTFDNGSIPHQIHLGELHAILRRQEDFYPFLKDNREKIEKILTFRIPYYVGPLARGNSRFAWMTRKSEETITPWNFEEVVDKGASAQSFIERMTNFDKNLPNEKVLPKHSLLYEYFTVYNELTKVKYVTEGMRKPAFLSGEQKKAIVDLLFKTNRKVTVKQLKEDYFKKIECFDSVEISGVEDRFNASLGTYHDLLKIIKDKDFLDNEENEDILEDIVLTLTLFEDREMIEERLKTYAHLFDDKVMKQLKRRRYTGWGRLSRKLINGIRDKQSGKTILDFLKSDGFANRNFMQLIHDDSLTFKEDIQKAQVSGQGDSLHEHIANLAGSPAIKKGILQTVKVVDELVKVMGRHKPENIVIEMARENQTTQKGQKNSRERMKRIEEGIKELGSQILKEHPVENTQLQNEKLYLYYLQNGRDMYVDQELDINRLSDYDVDHIVPQSFLKDDSIDNKVLTRSDKARGKSDNVPSEEVVKKMKNYWRQLLNAKLITQRKFDNLTKAERGGLSELDKAGFIKRQLVETRQITKHVAQILDSRMNTKYDENDKLIREVKVITLKSKLVSDFRKDFQFYKVREINNYHHAHDAYLNAVVGTALIKKYPKLESEFVYGDYKVYDVRKMIAKSEQEIGKATAKYFFYSNIMNFFKTEITLANGEIRKRPLIETNGETGEIVWDKGRDFATVRKVLSMPQVNIVKKTEVQTGGFSKESILPKRNSDKLIARKKDWDPKKYGGFDSPTVAYSVLVVAKVEKGKSKKLKSVKELLGITIMERSSFEKNPIDFLEAKGYKEVKKDLIIKLPKYSLFELENGRKRMLASAGELQKGNELALPSKYVNFLYLASHYEKLKGSPEDNEQKQLFVEQHKHYLDEIIEQISEFSKRVILADANLDKVLSAYNKHRDKPIREQAENIIHLFTLTNLGAPAAFKYFDTTIDRKRYTSTKEVLDATLIHQSITGLYETRIDLSQLGGDGGGGGGGSGGTLNIEDEYRLHETSKGPDVPLGSTWLSDFPQAWAETGGMGLAVRQAPLIIPLKATSTPVSIKQYPMSQEARLGIKPHIQRLLDQGILVPCQSPWNTPLLPVKKPGTNDYRPVQDLREVNKRVEDIHPTVPNPYNLLSGLPPSHQWYTVLDLKDAFFCLRLHPTSQSLFAFEWRDPEMGISGQLTWTRLPQGFKNSPTLFNEALHRDLADFRIQHPDLILLQYVDDLLLAATSELDCQQGTRALLQTLGDLGYRASAKKAQICQKQVKYLGYLLKEGQRWLTEARKETVMGQPTPKTPRQLREFLGKAGFCRLFIPGFAEMAAPLYPLTKPGTLFEWGPDQQKAYQEIKQALLTAPALGLPDLTKPFELFVDEKQGYAKGVLTQKLGPWRRPVAYLSKKLDPVAAGWPPCLRMVAAIAVLTKDAGKLTMGQPLVILAPHAVEALVKQPPDRWLSNARMTHYQALLLDTDRVQFGPIVALNPATLLPLPEEGLQHDCLDILAEAHGTRPDLTDQPLPDADHTWYTDGSSFLQEGQRKAGAAVTTETEVVWAKALPAGTSAQRAELIALTQALKMAEGKKLNVYTDSRYAFATAHIHGEIYRRRGWLTSEGKEIKNKDEILALLKALFLPKRLSIIHCPGHQKGNRAEARGNRMADQAAREVATRETPETSTLLAGKRTADGSEFEKRTADGSEFESPKKKAKVE

SEQ ID NO: 6595 - protein, 2111 aa, synthetic construct
MPAAKRVKLDGGDKKYSIGLDIGTNSVGWAVITDEYKVPSKKFKVLGNTDRHSIKKNLIGALLFDSGETAEATRLKRTARRRYTRRKNRICYLQEIFSNEMAKVDDSFFHRLEESFLVEEDKKHERHPIFGNIVDEVAYHEKYPTIYHLRKKLVDSTDKADLRLIYLALAHMIKFRGHFLIEGDLNPDNSDVDKLFIQLVQTYNQLFEENPINASGVDAKAILSARLSKSRRLENLIAQLPGEKKNGLFGNLIALSLGLTPNFKSNFDLAEDAKLQLSKDTYDDDLDNLLAQIGDQYADLFLAAKNLSDAILLSDILRVNTEITKAPLSASMIKRYDEHHQDLTLLKALVRQQLPEKYKEIFFDQSKNGYAGYIDGGASQEEFYKFIKPILEKMDGTEELLVKLNREDLLRKQRTFDNGSIPHQIHLGELHAILRRQEDFYPFLKDNREKIEKILTFRIPYYVGPLARGNSRFAWMTRKSEETITPWNFEEVVDKGASAQSFIERMTNFDKNLPNEKVLPKHSLLYEYFTVYNELTKVKYVTEGMRKPAFLSGEQKKAIVDLLFKTNRKVTVKQLKEDYFKKIECFDSVEISGVEDRFNASLGTYHDLLKIIKDKDFLDNEENEDILEDIVLTLTLFEDREMIEERLKTYAHLFDDKVMKQLKRRRYTGWGRLSRKLINGIRDKQSGKTILDFLKSDGFANRNFMQLIHDDSLTFKEDIQKAQVSGQGDSLHEHIANLAGSPAIKKGILQTVKVVDELVKVMGRHKPENIVIEMARENQTTQKGQKNSRERMKRIEEGIKELGSQILKEHPVENTQLQNEKLYLYYLQNGRDMYVDQELDINRLSDYDVDHIVPQSFLKDDSIDNKVLTRSDKARGKSDNVPSEEVVKKMKNYWRQLLNAKLITQRKFDNLTKAERGGLSELDKAGFIKRQLVETRQITKHVAQILDSRMNTKYDENDKLIREVKVITLKSKLVSDFRKDFQFYKVREINNYHHAHDAYLNAVVGTALIKKYPKLESEFVYGDYKVYDVRKMIAKSEQEIGKATAKYFFYSNIMNFFKTEITLANGEIRKRPLIETNGETGEIVWDKGRDFATVRKVLSMPQVNIVKKTEVQTGGFSKESILPKRNSDKLIARKKDWDPKKYGGFDSPTVAYSVLVVAKVEKGKSKKLKSVKELLGITIMERSSFEKNPIDFLEAKGYKEVKKDLIIKLPKYSLFELENGRKRMLASAGELQKGNELALPSKYVNFLYLASHYEKLKGSPEDNEQKQLFVEQHKHYLDEIIEQISEFSKRVILADANLDKVLSAYNKHRDKPIREQAENIIHLFTLTNLGAPAAFKYFDTTIDRKRYTSTKEVLDATLIHQSITGLYETRIDLSQLGGDGGGGGGGSGGTLNIEDEYRLHETSKEPDVSLGSTWLSDFPQAWAETGGMGLAVRQAPLIIPLKATSTPVSIKQYPMSQEARLGIKPHIQRLLDQGILVPCQSPWNTPLLPVKKPGTNDYRPVQDLREVNKRVEDIHPTVPNPYNLLSGLPPSHQWYTVLDLKDAFFCLRLHPTSQPLFAFEWRDPEMGISGQLTWTRLPQGFKNSPTLFNEALHRDLADFRIQHPDLILLQYVDDLLLAATSELDCQQGTRALLQTLGNLGYRASAKKAQICQKQVKYLGYLLKEGQRWLTEARKETVMGQPTPKTPRQLREFLGKAGFCRLFIPGFAEMAAPLYPLTKPGTLFNWGPDQQKAYQEIKQALLTAPALGLPDLTKPFELFVDEKQGYAKGVLTQKLGPWRRPVAYLSKKLDPVAAGWPPCLRMVAAIAVLTKDAGKLTMGQPLVILAPHAVEALVKQPPDRWLSNARMTHYQALLLDTDRVQFGPVVALNPATLLPLPEEGLQHNCLDILAEAHGTRPDLTDQPLPDADHTWYTDGSSLLQEGQRKAGAAVTTETEVIWAKALPAGTSAQRAELIALTQALKMAEGKKLNVYTDSRYAFATAHIHGEIYRRRGWLTSEGKEIKNKDEILALLKALFLPKRLSIIHCPGHQKGHSAEARGNRMADQAARKAAITETPDTSTLLIENSSPSGGSKRTADGSEFEAGKRTADGSEFEKRTADGSEFESPKKKAKVE

SEQ ID NO: 6596 - protein, 2111 aa, synthetic construct; identical to SEQ ID NO: 6595

SEQ ID NO: 6597 - protein, 2091 aa, synthetic construct
MPAAKRVKLDGGDKKYSIGLDIGTNSVGWAVITDEYKVPSKKFKVLGNTDRHSIKKNLIGALLFDSGETAEATRLKRTARRRYTRRKNRICYLQEIFSNEMAKVDDSFFHRLEESFLVEEDKKHERHPIFGNIVDEVAYHEKYPTIYHLRKKLVDSTDKADLRLIYLALAHMIKFRGHFLIEGDLNPDNSDVDKLFIQLVQTYNQLFEENPINASGVDAKAILSARLSKSRRLENLIAQLPGEKKNGLFGNLIALSLGLTPNFKSNFDLAEDAKLQLSKDTYDDDLDNLLAQIGDQYADLFLAAKNLSDAILLSDILRVNTEITKAPLSASMIKRYDEHHQDLTLLKALVRQQLPEKYKEIFFDQSKNGYAGYIDGGASQEEFYKFIKPILEKMDGTEELLVKLNREDLLRKQRTFDNGSIPHQIHLGELHAILRRQEDFYPFLKDNREKIEKILTFRIPYYVGPLARGNSRFAWMTRKSEETITPWNFEEVVDKGASAQSFIERMTNFDKNLPNEKVLPKHSLLYEYFTVYNELTKVKYVTEGMRKPAFLSGEQKKAIVDLLFKTNRKVTVKQLKEDYFKKIECFDSVEISGVEDRFNASLGTYHDLLKIIKDKDFLDNEENEDILEDIVLTLTLFEDREMIEERLKTYAHLFDDKVMKQLKRRRYTGWGRLSRKLINGIRDKQSGKTILDFLKSDGFANRNFMQLIHDDSLTFKEDIQKAQVSGQGDSLHEHIANLAGSPAIKKGILQTVKVVDELVKVMGRHKPENIVIEMARENQTTQKGQKNSRERMKRIEEGIKELGSQILKEHPVENTQLQNEKLYLYYLQNGRDMYVDQELDINRLSDYDVDHIVPQSFLKDDSIDNKVLTRSDKARGKSDNVPSEEVVKKMKNYWRQLLNAKLITQRKFDNLTKAERGGLSELDKAGFIKRQLVETRQITKHVAQILDSRMNTKYDENDKLIREVKVITLKSKLVSDFRKDFQFYKVREINNYHHAHDAYLNAVVGTALIKKYPKLESEFVYGDYKVYDVRKMIAKSEQEIGKATAKYFFYSNIMNFFKTEITLANGEIRKRPLIETNGETGEIVWDKGRDFATVRKVLSMPQVNIVKKTEVQTGGFSKESILPKRNSDKLIARKKDWDPKKYGGFDSPTVAYSVLVVAKVEKGKSKKLKSVKELLGITIMERSSFEKNPIDFLEAKGYKEVKKDLIIKLPKYSLFELENGRKRMLASAGELQKGNELALPSKYVNFLYLASHYEKLKGSPEDNEQKQLFVEQHKHYLDEIIEQISEFSKRVILADANLDKVLSAYNKHRDKPIREQAENIIHLFTLTNLGAPAAFKYFDTTIDRKRYTSTKEVLDATLIHQSITGLYETRIDLSQLGGDGGGGGGGSGGTLNIEDEYRLHEISTEPDVSPGSTWLSDFPQAWAETGGMGLAVRQAPLIIPLKATSTPVSIKQYPMSQEAKLGIKPHIQRLLDQGILVPCQSPWNTPLLPVKKPGTNDYRPVQGLREVNKRVEDIHPTVPNPYNLLSGLPTSHRWYTVLDLKDAFFCLRLHPTSQPLFASEWRDPGMGISGQLTWTRLPQGFKNSPTLFNEALHRGLADFRIQHPDLILLQYVDDLLLAATSELDCQQGTRALLKTLGNLGYRASAKKAQICQKQVKYLGYLLREGQRWLTEARKETVMGQPTPKTPRQLREFLGTAGFCRLWIPRFAEMAAPLYPLTKPGTLFNWGPDQQKAYHEIKQALLTAPALGLPDLTKPFELFVDEKQGYAKGVLTQKLGPWRRPVAYLSKKLDPVAAGWPPCLRMVAAIAVLTKDAGKLTMGQPLVILAPHAVEALVKQPPDRWLSNARMTHYQAMLLDTDRVQFGPVVALNPATLLPLPEEGAPHDCLEILAETHGTEPDLTDQPIPDADHTWYTDGSSFLQEGQRKAGAAVTTETEVIWARALPAGTSAQRAELIALTQALKMAEGKRLNVYTDSRYAFATAHIHGEIYKRRGWLTSEGREIKNKSEILALLKALFLPKRLSIIHCLGHQKGDSAEARGNRLADQAAREAAIKTPPDTSTLLAGKRTADGSEFEKRTADGSEFESPKKKAKVE

SEQ ID NO: 6598 - protein, 2082 aa, synthetic construct
MPAAKRVKLDGGDKKYSIGLDIGTNSVGWAVITDEYKVPSKKFKVLGNTDRHSIKKNLIGALLFDSGETAEATRLKRTARRRYTRRKNRICYLQEIFSNEMAKVDDSFFHRLEESFLVEEDKKHERHPIFGNIVDEVAYHEKYPTIYHLRKKLVDSTDKADLRLIYLALAHMIKFRGHFLIEGDLNPDNSDVDKLFIQLVQTYNQLFEENPINASGVDAKAILSARLSKSRRLENLIAQLPGEKKNGLFGNLIALSLGLTPNFKSNFDLAEDAKLQLSKDTYDDDLDNLLAQIGDQYADLFLAAKNLSDAILLSDILRVNTEITKAPLSASMIKRYDEHHQDLTLLKALVRQQLPEKYKEIFFDQSKNGYAGYIDGGASQEEFYKFIKPILEKMDGTEELLVKLNREDLLRKQRTFDNGSIPHQIHLGELHAILRRQEDFYPFLKDNREKIEKILTFRIPYYVGPLARGNSRFAWMTRKSEETITPWNFEEVVDKGASAQSFIERMTNFDKNLPNEKVLPKHSLLYEYFTVYNELTKVKYVTEGMRKPAFLSGEQKKAIVDLLFKTNRKVTVKQLKEDYFKKIECFDSVEISGVEDRFNASLGTYHDLLKIIKDKDFLDNEENEDILEDIVLTLTLFEDREMIEERLKTYAHLFDDKVMKQLKRRRYTGWGRLSRKLINGIRDKQSGKTILDFLKSDGFANRNFMQLIHDDSLTFKEDIQKAQVSGQGDSLHEHIANLAGSPAIKKGILQTVKVVDELVKVMGRHKPENIVIEMARENQTTQKGQKNSRERMKRIEEGIKELGSQILKEHPVENTQLQNEKLYLYYLQNGRDMYVDQELDINRLSDYDVDHIVPQSFLKDDSIDNKVLTRSDKARGKSDNVPSEEVVKKMKNYWRQLLNAKLITQRKFDNLTKAERGGLSELDKAGFIKRQLVETRQITKHVAQILDSRMNTKYDENDKLIREVKVITLKSKLVSDFRKDFQFYKVREINNYHHAHDAYLNAVVGTALIKKYPKLESEFVYGDYKVYDVRKMIAKSEQEIGKATAKYFFYSNIMNFFKTEITLANGEIRKRPLIETNGETGEIVWDKGRDFATVRKVLSMPQVNIVKKTEVQTGGFSKESILPKRNSDKLIARKKDWDPKKYGGFDSPTVAYSVLVVAKVEKGKSKKLKSVKELLGITIMERSSFEKNPIDFLEAKGYKEVKKDLIIKLPKYSLFELENGRKRMLASAGELQKGNELALPSKYVNFLYLASHYEKLKGSPEDNEQKQLFVEQHKHYLDEIIEQISEFSKRVILADANLDKVLSAYNKHRDKPIREQAENIIHLFTLTNLGAPAAFKYFDTTIDRKRYTSTKEVLDATLIHQSITGLYETRIDLSQLGGDGGGGGGGSGGIPWLMKKPLQLTTLVPLQEYEERLLKQTMLTGSYKEKLQSLFLKYDALWQHWENQVGHRRIKPHHIATGTVNPRPQKQYPINPKAKASIQTVINDLLKQGVLIQQNSIMNTPVYPVPKPDGKWRMVLDYREVNKTIPLIAAQNQHSAGILSSIFRGKYKTTLDLSNGFWAHSITPESYWLTAFTWLGQQYCWTRLPQGFLNSPALFNADVVDLLKEVPNVQVYVDDIYISHDDPREHLEQLEKVFSLLLNAGYVVSLKKSEIAQHEVEFLGFNITKEGRGLTETFKQKLLNITPPRDLKQLQSILGKLNFARNFIPNFSELVKPLYNIIATAPGKYITWTTDNSQQLQNIISMLNSAENLEERNPEVRLIMKVNTSPSAGYIRFYNEFAKRPIMYLNYVYTKAEVKFTNTEKLLTTIHKGLIKALDLGMGQEILVYSPIVSMTKIQKTPLPERKALPIRWITWMSYLEDPRIQFHYDKTLPELQQVPTVTDDIIAKIKHPSEFSMVFYTDGSAIKHPNVNKSHNAGMGIAQVQFKPEFTVINTWSIPLGDHTAQLAEVAAVEFACKKALKIDGPVLIVTDSFYVAESVNKELPYWQSNGFFNNKKKPLKHVSKWKSIADCIQLKPDIIIIHEKGHQPTASTFHTEGNNLADKLATQGSYVVNAGKRTADGSEFEKRTADGSEFESPKKKAKVE

SEQ ID NO: 6599 - protein, 2089 aa, synthetic construct
MPAAKRVKLDGGDKKYSIGLDIGTNSVGWAVITDEYKVPSKKFKVLGNTDRHSIKKNLIGALLFDSGETAEATRLKRTARRRYTRRKNRICYLQEIFSNEMAKVDDSFFHRLEESFLVEEDKKHERHPIFGNIVDEVAYHEKYPTIYHLRKKLVDSTDKADLRLIYLALAHMIKFRGHFLIEGDLNPDNSDVDKLFIQLVQTYNQLFEENPINASGVDAKAILSARLSKSRRLENLIAQLPGEKKNGLFGNLIALSLGLTPNFKSNFDLAEDAKLQLSKDTYDDDLDNLLAQIGDQYADLFLAAKNLSDAILLSDILRVNTEITKAPLSASMIKRYDEHHQDLTLLKALVRQQLPEKYKEIFFDQSKNGYAGYIDGGASQEEFYKFIKPILEKMDGTEELLVKLNREDLLRKQRTFDNGSIPHQIHLGELHAILRRQEDFYPFLKDNREKIEKILTFRIPYYVGPLARGNSRFAWMTRKSEETITPWNFEEVVDKGASAQSFIERMTNFDKNLPNEKVLPKHSLLYEYFTVYNELTKVKYVTEGMRKPAFLSGEQKKAIVDLLFKTNRKVTVKQLKEDYFKKIECFDSVEISGVEDRFNASLGTYHDLLKIIKDKDFLDNEENEDILEDIVLTLTLFEDREMIEERLKTYAHLFDDKVMKQLKRRRYTGWGRLSRKLINGIRDKQSGKTILDFLKSDGFANRNFMQLIHDDSLTFKEDIQKAQVSGQGDSLHEHIANLAGSPAIKKGILQTVKVVDELVKVMGRHKPENIVIEMARENQTTQKGQKNSRERMKRIEEGIKELGSQILKEHPVENTQLQNEKLYLYYLQNGRDMYVDQELDINRLSDYDVDHIVPQSFLKDDSIDNKVLTRSDKARGKSDNVPSEEVVKKMKNYWRQLLNAKLITQRKFDNLTKAERGGLSELDKAGFIKRQLVETRQITKHVAQILDSRMNTKYDENDKLIREVKVITLKSKLVSDFRKDFQFYKVREINNYHHAHDAYLNAVVGTALIKKYPKLESEFVYGDYKVYDVRKMIAKSEQEIGKATAKYFFYSNIMNFFKTEITLANGEIRKRPLIETNGETGEIVWDKGRDFATVRKVLSMPQVNIVKKTEVQTGGFSKESILPKRNSDKLIARKKDWDPKKYGGFDSPTVAYSVLVVAKVEKGKSKKLKSVKELLGITIMERSSFEKNPIDFLEAKGYKEVKKDLIIKLPKYSLFELENGRKRMLASAGELQKGNELALPSKYVNFLYLASHYEKLKGSPEDNEQKQLFVEQHKHYLDEIIEQISEFSKRVILADANLDKVLSAYNKHRDKPIREQAENIIHLFTLTNLGAPAAFKYFDTTIDRKRYTSTKEVLDATLIHQSITGLYETRIDLSQLGGDGGGGGGGSGGVLNLEEEYRLHEKPVPSSIDPSWLQLFPTVWAERAGMGLANQVPPVVVELRSGASPVAVRQYPMSKEAREGIRPHIQRFLDLGVLVPCQSPWNTPLLPVKKPGTNDYRPVQDLREINKRVQDIHPTVPNPYNLLSSLPPSHTWYSVLDLKDAFFCLKLHPNSQPLFAFEWRDPEKGNTGQLTWTRLPQGFKNSPTLFNEALHRDLAPFRALNPQVVLLQYVDDLLVAAPTYRDCKEGTQKLLQELSKLGYRVSAKKAQLCQKEVTYLGYLLKEGKRWLTPARKATVMKIPPPTTPRQVREFLGTAGFCRLWIPGFASLAAPLYPLTKPSIPFIWTEEHQKAFDRIKEALLSAPALALPDLTKPFTLYVDERAGVARGVLTQTLGPWRRPVAYLSKKLDPVASGWPTCLKAVAAVALLLKDADKLTLGQNVTVIASHSLESIVRQPPDRWMTNARMTHYQSLLLNERVSFAPPAVLNPATLLPVESEATPVHRCSEILAEETGTRRDLKDQPLPGVPAWYTDGSSFIAEGKRRAGAAIVDGKRTVWASSLPEGTSAQKAELVALTQALRLAEGKDINIYTDSRYAFATAHIHGAIYKQRGWLTSAGKDIKNKEEILALLEAIHLPKRVAIIHCPGHQKGNDPVATGNRRADEAAKQAALSTRVLAETTKPAGKRTADGSEFEKRTADGSEFESPKKKAKVE

SEQ ID NO: 6600 - protein, 2089 aa, synthetic construct
MPAAKRVKLDGGDKKYSIGLDIGTNSVGWAVITDEYKVPSKKFKVLGNTDRHSIKKNLIGALLFDSGETAEATRLKRTARRRYTRRKNRICYLQEIFSNEMAKVDDSFFHRLEESFLVEEDKKHERHPIFGNIVDEVAYHEKYPTIYHLRKKLVDSTDKADLRLIYLALAHMIKFRGHFLIEGDLNPDNSDVDKLFIQLVQTYNQLFEENPINASGVDAKAILSARLSKSRRLENLIAQLPGEKKNGLFGNLIALSLGLTPNFKSNFDLAEDAKLQLSKDTYDDDLDNLLAQIGDQYADLFLAAKNLSDAILLSDILRVNTEITKAPLSASMIKRYDEHHQDLTLLKALVRQQLPEKYKEIFFDQSKNGYAGYIDGGASQEEFYKFIKPILEKMDGTEELLVKLNREDLLRKQRTFDNGSIPHQIHLGELHAILRRQEDFYPFLKDNREKIEKILTFRIPYYVGPLARGNSRFAWMTRKSEETITPWNFEEVVDKGASAQSFIERMTNFDKNLPNEKVLPKHSLLYEYFTVYNELTKVKYVTEGMRKPAFLSGEQKKAIVDLLFKTNRKVTVKQLKEDYFKKIECFDSVEISGVEDRFNASLGTYHDLLKIIKDKDFLDNEENEDILEDIVLTLTLFEDREMIEERLKTYAHLFDDKVMKQLKRRRYTGWGRLSRKLINGIRDKQSGKTILDFLKSDGFANRNFMQLIHDDSLTFKEDIQKAQVSGQGDSLHEHIANLAGSPAIKKGILQTVKVVDELVKVMGRHKPENIVIEMARENQTTQKGQKNSRERMKRIEEGIKELGSQILKEHPVENTQLQNEKLYLYYLQNGRDMYVDQELDINRLSDYDVDHIVPQSFLKDDSIDNKVLTRSDKARGKSDNVPSEEVVKKMKNYWRQLLNAKLITQRKFDNLTKAERGGLSELDKAGFIKRQLVETRQITKHVAQILDSRMNTKYDENDKLIREVKVITLKSKLVSDFRKDFQFYKVREINNYHHAHDAYLNAVVGTALIKKYPKLESEFVYGDYKVYDVRKMIAKSEQEIGKATAKYFFYSNIMNFFKTEITLANGEIRKRPLIETNGETGEIVWDKGRDFATVRKVLSMPQVNIVKKTEVQTGGFSKESILPKRNSDKLIARKKDWDPKKYGGFDSPTVAYSVLVVAKVEKGKSKKLKSVKELLGITIMERSSFEKNPIDFLEAKGYKEVKKDLIIKLPKYSLFELENGRKRMLASAGELQKGNELALPSKYVNFLYLASHYEKLKGSPEDNEQKQLFVEQHKHYLDEIIEQISEFSKRVILADANLDKVLSAYNKHRDKPIREQAENIIHLFTLTNLGAPAAFKYFDTTIDRKRYTSTKEVLDATLIHQSITGLYETRIDLSQLGGDGGGGGGGSGGVLNLEEEYRLHEKPVPSSIDPSWLQLFPTVWAERAGMGLANQVPPVVVELRSGASPVAVRQYPMSKEAREGIRPHIQRFLDLGVLVPCQSPWNTPLLPVKKPGTNDYRPVQDLREINKRVQDIHPTVPNPYNLLSSLPPSHTWYSVLDLKDAFFCLKLHPNSQPLFAFEWRDPEKGNTGQLTWTRLPQGFKNSPTLFNEALHRDLAPFRALNPQVVLLQYVDDLLVAAPTYRDCKEGTQKLLQELSKLGYRVSAKKAQLCQKEVTYLGYLLKEGKRWLTPARKATVMKIPPPTTPRQVREFLGKAGFCRLFIPGFASLAAPLYPLTKPSIPFIWTEEHQKAFDRIKEALLSAPALALPDLTKPFTLYVDERAGVARGVLTQTLGPWRRPVAYLSKKLDPVASGWPTCLKAVAAVALLLKDADKLTLGQNVTVIASHSLESIVRQPPDRWMTNARMTHYQSLLLNERVSFAPPAVLNPATLLPVESEATPVHRCSEILAEETGTRRDLKDQPLPGVPAWYTDGSSFIAEGKRRAGAAIVDGKRTVWASSLPEGTSAQKAELVALTQALRLAEGKDINIYTDSRYAFATAHIHGAIYKQRGWLTSAGKDIKNKEEILALLEAIHLPKRVAIIHCPGHQKGNDPVATGNRRADEAAKQAALSTRVLAETTKPAGKRTADGSEFEKRTADGSEFESPKKKAKVE

SEQ ID NO: 6601 - protein, 2091 aa, synthetic construct
MPAAKRVKLDGGDKKYSIGLDIGTNSVGWAVITDEYKVPSKKFKVLGNTDRHSIKKNLIGALLFDSGETAEATRLKRTARRRYTRRKNRICYLQEIFSNEMAKVDDSFFHRLEESFLVEEDKKHERHPIFGNIVDEVAYHEKYPTIYHLRKKLVDSTDKADLRLIYLALAHMIKFRGHFLIEGDLNPDNSDVDKLFIQLVQTYNQLFEENPINASGVDAKAILSARLSKSRRLENLIAQLPGEKKNGLFGNLIALSLGLTPNFKSNFDLAEDAKLQLSKDTYDDDLDNLLAQIGDQYADLFLAAKNLSDAILLSDILRVNTEITKAPLSASMIKRYDEHHQDLTLLKALVRQQLPEKYKEIFFDQSKNGYAGYIDGGASQEEFYKFIKPILEKMDGTEELLVKLNREDLLRKQRTFDNGSIPHQIHLGELHAILRRQEDFYPFLKDNREKIEKILTFRIPYYVGPLARGNSRFAWMTRKSEETITPWNFEEVVDKGASAQSFIERMTNFDKNLPNEKVLPKHSLLYEYFTVYNELTKVKYVTEGMRKPAFLSGEQKKAIVDLLFKTNRKVTVKQLKEDYFKKIECFDSVEISGVEDRFNASLGTYHDLLKIIKDKDFLDNEENEDILEDIVLTLTLFEDREMIEERLKTYAHLFDDKVMKQLKRRRYTGWGRLSRKLINGIRDKQSGKTILDFLKSDGFANRNFMQLIHDDSLTFKEDIQKAQVSGQGDSLHEHIANLAGSPAIKKGILQTVKVVDELVKVMGRHKPENIVIEMARENQTTQKGQKNSRERMKRIEEGIKELGSQILKEHPVENTQLQNEKLYLYYLQNGRDMYVDQELDINRLSDYDVDHIVPQSFLKDDSIDNKVLTRSDKARGKSDNVPSEEVVKKMKNYWRQLLNAKLITQRKFDNLTKAERGGLSELDKAGFIKRQLVETRQITKHVAQILDSRMNTKYDENDKLIREVKVITLKSKLVSDFRKDFQFYKVREINNYHHAHDAYLNAVVGTALIKKYPKLESEFVYGDYKVYDVRKMIAKSEQEIGKATAKYFFYSNIMNFFKTEITLANGEIRKRPLIETNGETGEIVWDKGRDFATVRKVLSMPQVNIVKKTEVQTGGFSKESILPKRNSDKLIARKKDWDPKKYGGFDSPTVAYSVLVVAKVEKGKSKKLKSVKELLGITIMERSSFEKNPIDFLEAKGYKEVKKDLIIKLPKYSLFELENGRKRMLASAGELQKGNELALPSKYVNFLYLASHYEKLKGSPEDNEQKQLFVEQHKHYLDEIIEQISEFSKRVILADANLDKVLSAYNKHRDKPIREQAENIIHLFTLTNLGAPAAFKYFDTTIDRKRYTSTKEVLDATLIHQSITGLYETRIDLSQLGGDGGGGGGGSGGTLNIEDEYRLHETSKEPDVPLGSTWLSDFPQAWAETGGMGLAVRQAPLIIPLKATSTPVSIKQYPMSQEARLGIKPHIQRLLDQGILVPCQSPWNTPLLPVKKPGTNDYRPVQDLREVNKRVEDIHPTVPNPYNLLSGLPPSHQWYTVLDLKDAFFCLRLHPTSQPLFAFEWRDPEMGISGQLTWTRLPQGFKNSPTLFNEALHRDLADFRIQHPDLILLQYVDDLLLAATSEQDCQRGTRALLQTLGNLGYRASAKKAQICQKQVKYLGYLLKEGQRWLTEARKETVMGQPTPKTPRQLREFLGKAGFCRLFIPGFAEMAAPLYPLTKPGTLFNWGPDQQKAYQEIKQALLTAPALGLPDLTKPFELFVDEKQGYAKGVLTQKLGPWRRPVAYLSKKLDPVAAGWPPCLRMVAAIAVLTKDAGKLTMGQPLVILAPHAVEALVKQPPDRWLSNARMTHYQAMLLDTDRVQFGPVVALNPATLLPLPEKEAPHDCLEILAETHGTRPDLTDQPIPDADYTWYTDGSSFLQEGQRRAGAAVTTETEVIWARALPAGTSAQRAELIALTQALKMAEGKKLNVYTDSRYAFATAHVHGEIYRRRGWLTSEGREIKNKNEILALLKALFLPKRLSIIHCPGHQKGNSAEARGNRMADQAAREAAMKAVLETSTLLAGKRTADGSEFEKRTADGSEFESPKKKAKVE

SEQ ID NO: 6602 - protein, 2168 aa, synthetic construct
MPAAKRVKLDGGDKKYSIGLDIGTNSVGWAVITDEYKVPSKKFKVLGNTDRHSIKKNLIGALLFDSGETAEATRLKRTARRRYTRRKNRICYLQEIFSNEMAKVDDSFFHRLEESFLVEEDKKHERHPIFGNIVDEVAYHEKYPTIYHLRKKLVDSTDKADLRLIYLALAHMIKFRGHFLIEGDLNPDNSDVDKLFIQLVQTYNQLFEENPINASGVDAKAILSARLSKSRRLENLIAQLPGEKKNGLFGNLIALSLGLTPNFKSNFDLAEDAKLQLSKDTYDDDLDNLLAQIGDQYADLFLAAKNLSDAILLSDILRVNTEITKAPLSASMIKRYDEHHQDLTLLKALVRQQLPEKYKEIFFDQSKNGYAGYIDGGASQEEFYKFIKPILEKMDGTEELLVKLNREDLLRKQRTFDNGSIPHQIHLGELHAILRRQEDFYPFLKDNREKIEKILTFRIPYYVGPLARGNSRFAWMTRKSEETITPWNFEEVVDKGASAQSFIERMTNFDKNLPNEKVLPKHSLLYEYFTVYNELTKVKYVTEGMRKPAFLSGEQKKAIVDLLFKTNRKVTVKQLKEDYFKKIECFDSVEISGVEDRFNASLGTYHDLLKIIKDKDFLDNEENEDILEDIVLTLTLFEDREMIEERLKTYAHLFDDKVMKQLKRRRYTGWGRLSRKLINGIRDKQSGKTILDFLKSDGFANRNFMQLIHDDSLTFKEDIQKAQVSGQGDSLHEHIANLAGSPAIKKGILQTVKVVDELVKVMGRHKPENIVIEMARENQTTQKGQKNSRERMKRIEEGIKELGSQILKEHPVENTQLQNEKLYLYYLQNGRDMYVDQELDINRLSDYDVDHIVPQSFLKDDSIDNKVLTRSDKARGKSDNVPSEEVVKKMKNYWRQLLNAKLITQRKFDNLTKAERGGLSELDKAGFIKRQLVETRQITKHVAQILDSRMNTKYDENDKLIREVKVITLKSKLVSDFRKDFQFYKVREINNYHHAHDAYLNAVVGTALIKKYPKLESEFVYGDYKVYDVRKMIAKSEQEIGKATAKYFFYSNIMNFFKTEITLANGEIRKRPLIETNGETGEIVWDKGRDFATVRKVLSMPQVNIVKKTEVQTGGFSKESILPKRNSDKLIARKKDWDPKKYGGFDSPTVAYSVLVVAKVEKGKSKKLKSVKELLGITIMERSSFEKNPIDFLEAKGYKEVKKDLIIKLPKYSLFELENGRKRMLASAGELQKGNELALPSKYVNFLYLASHYEKLKGSPEDNEQKQLFVEQHKHYLDEIIEQISEFSKRVILADANLDKVLSAYNKHRDKPIREQAENIIHLFTLTNLGAPAAFKYFDTTIDRKRYTSTKEVLDATLIHQSITGLYETRIDLSQLGGDGGGGSGSSGGMDLLKPLTVERKGVKIKGYWNSQADITCVPKDLLQGEEPVRQQNVTTIHGTQEGDVYYVNLKIDGRRINTEVIGTTLDYAIITPGDVPWILKKPLELTIKLDLEEQQGTLLNNSILSKKGKEELKQLFEKYSALWQSWENQVGHRRIRPHKIATGTVKPTPQKQYHINPKAKPDIQIVINDLLKQGVLIQKESTMNTPVYPVPKPNGRWRMVLDYRAVNKVTPLIAVQNQHSYGILGSLFKGRYKTTIDLSNGFWAHPIVPEDYWITAFTWQGKQYCWTVLPQGFLNSPGLFTGDVVDLLQGIPNVEVYVDDVYISHDSEKEHLEYLDILFNRLKEAGYIISLKKSNIANSIVDFLGFQITNEGRGLTDTFKEKLENITAPTTLKQLQSILGLLNFARNFIPDFTELIAPLYALIPKSTKNYVPWQIEHSTTLETLITKLNGAEYLQGRKGDKTLIMKVNASYTTGYIRYYNEGEKKPISYVSIVFSKTELKFTELEKLLTTVHKGLLKALDLSMGQNIHVYSPIVSMQNIQKTPQTAKKALASRWLSWLSYLEDPRIRFFYDPQMPALKDLPAVDTGKDNKKHPSNFQHIFYTDGSAITSPTKEGHLNAGMGIVYFINKDGNLQKQQEWSISLGNHTAQFAEIAAFEFALKKCLPLGGNILVVTDSNYVAKAYNEELDVWASNGFVNNRKKPLKHISKWKSVADLKRLRPDVVVTHEPGHQKLDSSPHAYGNNLADQLATQASFKVHAGKRTADGSEFEKRTADGSEFESPKKKAKVE

SEQ ID NO: 6603 - protein, 2090 aa, synthetic construct
MPAAKRVKLDGGDKKYSIGLDIGTNSVGWAVITDEYKVPSKKFKVLGNTDRHSIKKNLIGALLFDSGETAEATRLKRTARRRYTRRKNRICYLQEIFSNEMAKVDDSFFHRLEESFLVEEDKKHERHPIFGNIVDEVAYHEKYPTIYHLRKKLVDSTDKADLRLIYLALAHMIKFRGHFLIEGDLNPDNSDVDKLFIQLVQTYNQLFEENPINASGVDAKAILSARLSKSRRLENLIAQLPGEKKNGLFGNLIALSLGLTPNFKSNFDLAEDAKLQLSKDTYDDDLDNLLAQIGDQYADLFLAAKNLSDAILLSDILRVNTEITKAPLSASMIKRYDEHHQDLTLLKALVRQQLPEKYKEIFFDQSKNGYAGYIDGGASQEEFYKFIKPILEKMDGTEELLVKLNREDLLRKQRTFDNGSIPHQIHLGELHAILRRQEDFYPFLKDNREKIEKILTFRIPYYVGPLARGNSRFAWMTRKSEETITPWNFEEVVDKGASAQSFIERMTNFDKNLPNEKVLPKHSLLYEYFTVYNELTKVKYVTEGMRKPAFLSGEQKKAIVDLLFKTNRKVTVKQLKEDYFKKIECFDSVEISGVEDRFNASLGTYHDLLKIIKDKDFLDNEENEDILEDIVLTLTLFEDREMIEERLKTYAHLFDDKVMKQLKRRRYTGWGRLSRKLINGIRDKQSGKTILDFLKSDGFANRNFMQLIHDDSLTFKEDIQKAQVSGQGDSLHEHIANLAGSPAIKKGILQTVKVVDELVKVMGRHKPENIVIEMARENQTTQKGQKNSRERMKRIEEGIKELGSQILKEHPVENTQLQNEKLYLYYLQNGRDMYVDQELDINRLSDYDVDHIVPQSFLKDDSIDNKVLTRSDKARGKSDNVPSEEVVKKMKNYWRQLLNAKLITQRKFDNLTKAERGGLSELDKAGFIKRQLVETRQITKHVAQILDSRMNTKYDENDKLIREVKVITLKSKLVSDFRKDFQFYKVREINNYHHAHDAYLNAVVGTALIKKYPKLESEFVYGDYKVYDVRKMIAKSEQEIGKATAKYFFYSNIMNFFKTEITLANGEIRKRPLIETNGETGEIVWDKGRDFATVRKVLSMPQVNIVKKTEVQTGGFSKESILPKRNSDKLIARKKDWDPKKYGGFDSPTVAYSVLVVAKVEKGKSKKLKSVKELLGITIMERSSFEKNPIDFLEAKGYKEVKKDLIIKLPKYSLFELENGRKRMLASAGELQKGNELALPSKYVNFLYLASHYEKLKGSPEDNEQKQLFVEQHKHYLDEIIEQISEFSKRVILADANLDKVLSAYNKHRDKPIREQAENIIHLFTLTNLGAPAAFKYFDTTIDRKRYTSTKEVLDATLIHQSITGLYETRIDLSQLGGDGGGGSGSSGGTLQLEEEYRLFEPESTQKQEMDIWLKNFPQAWAETGGMGTAHCQAPVLIQLKATATPISIRQYPMPHEAYQGIKPHIRRMLDQGILKPCQSPWNTPLLPVKKPGTEDYRPVQDLREVNKRVEDIHPTVPNPYNLLSTLPPSHPWYTVLDLKDAFFCLRLHSESQLLFAFEWRDPEIGLSGQLTWTRLPQGFKNSPTLFNEALHSDLADFRVRYPALVLLQYVDDLLLAAATRTECLEGTKALLETLGNKGYRASAKKAQICLQEVTYLGYSLKDGQRWLTKARKEAILSIPVPKNSRQVREFLGKAGYCRLFIPGFAELAAPLYPLTRPGTLFQWGTEQQLAFEDIKKALLSSPALGLPDITKPFELFIDENSGFAKGVLVQKLGPWKRPVAYLSKKLDTVASGWPPCLRMVAAIAILVKDAGKLTLGQPLTILTSHPVEALVRQPPNKWLSNARMTHYQAMLLDAERVHFGPTVSLNPATLLPLPSGGNHHDCLQILAETHGTRPDLTDQPLPDADLTWYTDGSSFIRNGEREAGAAVTTESEVIWAAPLPPGTSAQRAELIALTQALKMAEGKKLTVYTDSRYAFATTHVHGEIYRRRGWLTSEGKEIKNKNEILALLEALFLPKRLSIIHCPGHQKGDSPQAKGNRLADDTAKKAATETHSSLTVLPAGKRTADGSEFEKRTADGSEFESPKKKAKVE

SEQ ID NO: 6604 - protein, 2213 aa, synthetic construct
MPAAKRVKLDGGDKKYSIGLDIGTNSVGWAVITDEYKVPSKKFKVLGNTDRHSIKKNLIGALLFDSGETAEATRLKRTARRRYTRRKNRICYLQEIFSNEMAKVDDSFFHRLEESFLVEEDKKHERHPIFGNIVDEVAYHEKYPTIYHLRKKLVDSTDKADLRLIYLALAHMIKFRGHFLIEGDLNPDNSDVDKLFIQLVQTYNQLFEENPINASGVDAKAILSARLSKSRRLENLIAQLPGEKKNGLFGNLIALSLGLTPNFKSNFDLAEDAKLQLSKDTYDDDLDNLLAQIGDQYADLFLAAKNLSDAILLSDILRVNTEITKAPLSASMIKRYDEHHQDLTLLKALVRQQLPEKYKEIFFDQSKNGYAGYIDGGASQEEFYKFIKPILEKMDGTEELLVKLNREDLLRKQRTFDNGSIPHQIHLGELHAILRRQEDFYPFLKDNREKIEKILTFRIPYYVGPLARGNSRFAWMTRKSEETITPWNFEEVVDKGASAQSFIERMTNFDKNLPNEKVLPKHSLLYEYFTVYNELTKVKYVTEGMRKPAFLSGEQKKAIVDLLFKTNRKVTVKQLKEDYFKKIECFDSVEISGVEDRFNASLGTYHDLLKIIKDKDFLDNEENEDILEDIVLTLTLFEDREMIEERLKTYAHLFDDKVMKQLKRRRYTGWGRLSRKLINGIRDKQSGKTILDFLKSDGFANRNFMQLIHDDSLTFKEDIQKAQVSGQGDSLHEHIANLAGSPAIKKGILQTVKVVDELVKVMGRHKPENIVIEMARENQTTQKGQKNSRERMKRIEEGIKELGSQILKEHPVENTQLQNEKLYLYYLQNGRDMYVDQELDINRLSDYDVDHIVPQSFLKDDSIDNKVLTRSDKARGKSDNVPSEEVVKKMKNYWRQLLNAKLITQRKFDNLTKAERGGLSELDKAGFIKRQLVETRQITKHVAQILDSRMNTKYDENDKLIREVKVITLKSKLVSDFRKDFQFYKVREINNYHHAHDAYLNAVVGTALIKKYPKLESEFVYGDYKVYDVRKMIAKSEQEIGKATAKYFFYSNIMNFFKTEITLANGEIRKRPLIETNGETGEIVWDKGRDFATVRKVLSMPQVNIVKKTEVQTGGFSKESILPKRNSDKLIARKKDWDPKKYGGFDSPTVAYSVLVVAKVEKGKSKKLKSVKELLGITIMERSSFEKNPIDFLEAKGYKEVKKDLIIKLPKYSLFELENGRKRMLASAGELQKGNELALPSKYVNFLYLASHYEKLKGSPEDNEQKQLFVEQHKHYLDEIIEQISEFSKRVILADANLDKVLSAYNKHRDKPIREQAENIIHLFTLTNLGAPAAFKYFDTTIDRKRYTSTKEVLDATLIHQSITGLYETRIDLSQLGGDGGGGSGSSGGTLGDQGSRGSDPLPEPRVTLTVEGIPTEFLVNTGAEHSVLTKPMGKMGSKRTVVAGATGSKVYPWTTKRLLKIGQKQVTHSFLVIPECPAPLLGRDLLTKLKAQIQFSTEGPQVTWEDRPAMCLVLNLEEEYRLHEKPVPPSIDPSWLQLFPMVWAEKAGMGLANQVPPVVVELKSDASPVAVRQYPMSKEAREGIRPHIQRFLDLGILVPCQSPWNTPLLPVKKPGTNDYRPVQDLREVNKRVQDIHPTVPNPYNLLSSLPPSHTWYSVLDLKDAFFCLKLHPNSQPLFAFEWRDPEKGNTGQLTWTRLPQGFKNSPTLFDEALHRDLASFRALNPQVVMLQYVDDLLVAAPTYRDCKEGTRRLLQELSKLGYRVSAKKAQLCREEVTYLGYLLKGGKRWLTPARKATVMKIPTPTTPRQVREFLGTAGFCRLWIPGFASLAAPLYPLTREKVPFTWTEAHQEAFGRIKEALLSAPALALPDLTKPFALYVDEKEGVARGVLTQTLGPWRRPVAYLSKKLDPVASGWPTCLKAIAAVALLLKDADKLTLGQNVLVIAPHNLESIVRQPPDRWMTNARMTHYQSLLLNERVSFAPPAILNPATLLPVESDDTPIHICSEILAEETGTRPDLRDQPLPGVPAWYTDGSSFIMDGRRQAGAAIVDNKRTVWASNLPEGTSAQKAELIALTQALRLAEGKSINIYTDSRYAFATAHVHGAIYKQRGLLTSAGKDIKNKEEILALLEAIHLPKRVAIIHCPGHQRGTDPVATGNRKADEAAKQAAQSTRILTETTKNAGKRTADGSEFEKRTADGSEFESPKKKAKVE

SEQ ID NO: 6605 - protein, 2091 aa, synthetic construct
MPAAKRVKLDGGDKKYSIGLDIGTNSVGWAVITDEYKVPSKKFKVLGNTDRHSIKKNLIGALLFDSGETAEATRLKRTARRRYTRRKNRICYLQEIFSNEMAKVDDSFFHRLEESFLVEEDKKHERHPIFGNIVDEVAYHEKYPTIYHLRKKLVDSTDKADLRLIYLALAHMIKFRGHFLIEGDLNPDNSDVDKLFIQLVQTYNQLFEENPINASGVDAKAILSARLSKSRRLENLIAQLPGEKKNGLFGNLIALSLGLTPNFKSNFDLAEDAKLQLSKDTYDDDLDNLLAQIGDQYADLFLAAKNLSDAILLSDILRVNTEITKAPLSASMIKRYDEHHQDLTLLKALVRQQLPEKYKEIFFDQSKNGYAGYIDGGASQEEFYKFIKPILEKMDGTEELLVKLNREDLLRKQRTFDNGSIPHQIHLGELHAILRRQEDFYPFLKDNREKIEKILTFRIPYYVGPLARGNSRFAWMTRKSEETITPWNFEEVVDKGASAQSFIERMTNFDKNLPNEKVLPKHSLLYEYFTVYNELTKVKYVTEGMRKPAFLSGEQKKAIVDLLFKTNRKVTVKQLKEDYFKKIECFDSVEISGVEDRFNASLGTYHDLLKIIKDKDFLDNEENEDILEDIVLTLTLFEDREMIEERLKTYAHLFDDKVMKQLKRRRYTGWGRLSRKLINGIRDKQSGKTILDFLKSDGFANRNFMQLIHDDSLTFKEDIQKAQVSGQGDSLHEHIANLAGSPAIKKGILQTVKVVDELVKVMGRHKPENIVIEMARENQTTQKGQKNSRERMKRIEEGIKELGSQILKEHPVENTQLQNEKLYLYYLQNGRDMYVDQELDINRLSDYDVDHIVPQSFLKDDSIDNKVLTRSDKARGKSDNVPSEEVVKKMKNYWRQLLNAKLITQRKFDNLTKAERGGLSELDKAGFIKRQLVETRQITKHVAQILDSRMNTKYDENDKLIREVKVITLKSKLVSDFRKDFQFYKVREINNYHHAHDAYLNAVVGTALIKKYPKLESEFVYGDYKVYDVRKMIAKSEQEIGKATAKYFFYSNIMNFFKTEITLANGEIRKRPLIETNGETGEIVWDKGRDFATVRKVLSMPQVNIVKKTEVQTGGFSKESILPKRNSDKLIARKKDWDPKKYGGFDSPTVAYSVLVVAKVEKGKSKKLKSVKELLGITIMERSSFEKNPIDFLEAKGYKEVKKDLIIKLPKYSLFELENGRKRMLASAGELQKGNELALPSKYVNFLYLASHYEKLKGSPEDNEQKQLFVEQHKHYLDEIIEQISEFSKRVILADANLDKVLSAYNKHRDKPIREQAENIIHLFTLTNLGAPAAFKYFDTTIDRKRYTSTKEVLDATLIHQSITGLYETRIDLSQLGGDGGGGSGSSGGTLGIEDEYRLHETSTEPDVSLGSTWLSDFPQAWAETGGMGLAVRQAPLIIPLKATSTPVSIQQYPMSHEARLGIKPHIQRLLDQGILVPCQSPWNTPLLPVKKPGTNDYRPVQDLREVNKRVEDIHPTVPNPYNLLSGLPPSHQWYTVLDLKDAFFCLRLHPTSQPLFAFEWRDPGMGISGQLTWTRLPQGFKNSPTLFDEALHRDLADFRIQHPDLILLQYVDDILLAATSELDCQQGTRALLQTLGDLGYRASAKKAQICQKQVKYLGYLLREGQRWLTEARKETVMGQPVPKTPRQLREFLGTAGFCRLWIPGFAEMAAPLYPLTKTGTLFSWGPDQQKAYQEIKQALLTAPALGLPDLTKPFELFVDEKQGYAKGVLTQKLGPWRRPVAYLSKKLDPVAAGWPPCLRMVAAIAVLTKDAGKLTMGQPLVILAPHAVEALVKQPPDRWLSNARMTHYQAMLLDTDRVQFGPVVALNPATLLPLPEEGAPHDCLEILAETHGTRPDLTDQPIPDADHTWYTDGSSFLQEGQRKAGAAVTTETEVIWAGALPAGTSAQRAELIALTQALKMAEGKRLNVYTDSRYAFATAHIHGEIYRRRGLLTSEGREIKNKSEILALLKALFLPKRLSIIHCLGHQKGDSAEARGNRLADQAAREAAIKTPPDTSTLLAGKRTADGSEFEKRTADGSEFESPKKKAKVE

SEQ ID NO: 6606 - protein, 2091 aa, synthetic construct
MPAAKRVKLDGGDKKYSIGLDIGTNSVGWAVITDEYKVPSKKFKVLGNTDRHSIKKNLIGALLFDSGETAEATRLKRTARRRYTRRKNRICYLQEIFSNEMAKVDDSFFHRLEESFLVEEDKKHERHPIFGNIVDEVAYHEKYPTIYHLRKKLVDSTDKADLRLIYLALAHMIKFRGHFLIEGDLNPDNSDVDKLFIQLVQTYNQLFEENPINASGVDAKAILSARLSKSRRLENLIAQLPGEKKNGLFGNLIALSLGLTPNFKSNFDLAEDAKLQLSKDTYDDDLDNLLAQIGDQYADLFLAAKNLSDAILLSDILRVNTEITKAPLSASMIKRYDEHHQDLTLLKALVRQQLPEKYKEIFFDQSKNGYAGYIDGGASQEEFYKFIKPILEKMDGTEELLVKLNREDLLRKQRTFDNGSIPHQIHLGELHAILRRQEDFYPFLKDNREKIEKILTFRIPYYVGPLARGNSRFAWMTRKSEETITPWNFEEVVDKGASAQSFIERMTNFDKNLPNEKVLPKHSLLYEYFTVYNELTKVKYVTEGMRKPAFLSGEQKKAIVDLLFKTNRKVTVKQLKEDYFKKIECFDSVEISGVEDRFNASLGTYHDLLKIIKDKDFLDNEENEDILEDIVLTLTLFEDREMIEERLKTYAHLFDDKVMKQLKRRRYTGWGRLSRKLINGIRDKQSGKTILDFLKSDGFANRNFMQLIHDDSLTFKEDIQKAQVSGQGDSLHEHIANLAGSPAIKKGILQTVKVVDELVKVMGRHKPENIVIEMARENQTTQKGQKNSRERMKRIEEGIKELGSQILKEHPVENTQLQNEKLYLYYLQNGRDMYVDQELDINRLSDYDVDHIVPQSFLKDDSIDNKVLTRSDKARGKSDNVPSEEVVKKMKNYWRQLLNAKLITQRKFDNLTKAERGGLSELDKAGFIKRQLVETRQITKHVAQILDSRMNTKYDENDKLIREVKVITLKSKLVSDFRKDFQFYKVREINNYHHAHDAYLNAVVGTALIKKYPKLESEFVYGDYKVYDVRKMIAKSEQEIGKATAKYFFYSNIMNFFKTEITLANGEIRKRPLIETNGETGEIVWDKGRDFATVRKVLSMPQVNIVKKTEVQTGGFSKESILPKRNSDKLIARKKDWDPKKYGGFDSPTVAYSVLVVAKVEKGKSKKLKSVKELLGITIMERSSFEKNPIDFLEAKGYKEVKKDLIIKLPKYSLFELENGRKRMLASAGELQKGNELALPSKYVNFLYLASHYEKLKGSPEDNEQKQLFVEQHKHYLDEIIEQISEFSKRVILADANLDKVLSAYNKHRDKPIREQAENIIHLFTLTNLGAPAAFKYFDTTIDRKRYTSTKEVLDATLIHQSITGLYETRIDLSQLGGDGGGGSGSSGGTLGIEDEYRLHETSTEPDVSLGSTWLSDFPQAWAETGGMGLAVRQAPLIIPLKATSTPVSIQQYPMSHEARLGIKPHIQRLLDQGILVPCQSPWNTPLLPVKKPGTNDYRPVQDLREVNKRVEDIHPTVPNPYNLLSGLPPSHQWYTVLDLKDAFFCLRLHPTSQPLFAFEWRDPGMGISGQLTWTRLPQGFKNSPTLFNEALHRDLADFRIQHPDLILLQYVDDILLAATSELDCQQGTRALLQTLGDLGYRASAKKAQICQKQVKYLGYLLREGQRWLTEARKETVMGQPVPKTPRQLREFLGTAGFCRLWIPGFAEMAAPLYPLTKPGTLFSWGPDQQKAYQEIKQALLTAPALGLPDLTKPFELFVDEKQGYAKGVLTQKLGPWRRPVAYLSKKLDPVAAGWPPCLRMVAAIAVLTKDAGKLTMGQPLVILAPHAVEALVKQPPDRWLSNARMTHYQAMLLDTDRVQFGPVVALNPATLLPLPEEGAPHDCLEILAETHGTRPDLTDQPIPDADHTWYTDGSSFLQEGQRKAGAAVTTETEVIWAGALPAGTSAQRAELIALTQALKMAEGKRLNVYTDSRYAFATAHIHGEIYRRRGWLTSEGREIKNKSEILALLKALFLPKRLSIIHCLGHQKGDSAEARGNRLADQAAREAAIKTPPDTSTLLAGKRTADGSEFEKRTADGSEFESPKKKAKVE

SEQ ID NO: 6607 - protein, 2091 aa, synthetic construct
MPAAKRVKLDGGDKKYSIGLDIGTNSVGWAVITDEYKVPSKKFKVLGNTDRHSIKKNLIGALLFDSGETAEATRLKRTARRRYTRRKNRICYLQEIFSNEMAKVDDSFFHRLEESFLVEEDKKHERHPIFGNIVDEVAYHEKYPTIYHLRKKLVDSTDKADLRLIYLALAHMIKFRGHFLIEGDLNPDNSDVDKLFIQLVQTYNQLFEENPINASGVDAKAILSARLSKSRRLENLIAQLPGEKKNGLFGNLIALSLGLTPNFKSNFDLAEDAKLQLSKDTYDDDLDNLLAQIGDQYADLFLAAKNLSDAILLSDILRVNTEITKAPLSASMIKRYDEHHQDLTLLKALVRQQLPEKYKEIFFDQSKNGYAGYIDGGASQEEFYKFIKPILEKMDGTEELLVKLNREDLLRKQRTFDNGSIPHQIHLGELHAILRRQEDFYPFLKDNREKIEKILTFRIPYYVGPLARGNSRFAWMTRKSEETITPWNFEEVVDKGASAQSFIERMTNFDKNLPNEKVLPKHSLLYEYFTVYNELTKVKYVTEGMRKPAFLSGEQKKAIVDLLFKTNRKVTVKQLKEDYFKKIECFDSVEISGVEDRFNASLGTYHDLLKIIKDKDFLDNEENEDILEDIVLTLTLFEDREMIEERLKTYAHLFDDKVMKQLKRRRYTGWGRLSRKLINGIRDKQSGKTILDFLKSDGFANRNFMQLIHDDSLTFKEDIQKAQVSGQGDSLHEHIANLAGSPAIKKGILQTVKVVDELVKVMGRHKPENIVIEMARENQTTQKGQKNSRERMKRIEEGIKELGSQILKEHPVENTQLQNEKLYLYYLQNGRDMYVDQELDINRLSDYDVDHIVPQSFLKDDSIDNKVLTRSDKARGKSDNVPSEEVVKKMKNYWRQLLNAKLITQRKFDNLTKAERGGLSELDKAGFIKRQLVETRQITKHVAQILDSRMNTKYDENDKLIREVKVITLKSKLVSDFRKDFQFYKVREINNYHHAHDAYLNAVVGTALIKKYPKLESEFVYGDYKVYDVRKMIAKSEQEIGKATAKYFFYSNIMNFFKTEITLANGEIRKRPLIETNGETGEIVWDKGRDFATVRKVLSMPQVNIVKKTEVQTGGFSKESILPKRNSDKLIARKKDWDPKKYGGFDSPTVAYSVLVVAKVEKGKSKKLKSVKELLGITIMERSSFEKNPIDFLEAKGYKEVKKDLIIKLPKYSLFELENGRKRMLASAGELQKGNELALPSKYVNFLYLASHYEKLKGSPEDNEQKQLFVEQHKHYLDEIIEQISEFSKRVILADANLDKVLSAYNKHRDKPIREQAENIIHLFTLTNLGAPAAFKYFDTTIDRKRYTSTKEVLDATLIHQSITGLYETRIDLSQLGGDGGGGSGSSGGTLNIEDEYRLHETSKGPDVPLGSTWLSDFPQAWAETGGMGLAVRQAPLIIPLKATSTPVSIKQYPMSQEARLGIKPHIQRLLDQGILVPCQSPWNTPLLPVKKPGTNDYRPVQDLREVNKRVEDIHPTVPNPYNLLSGLPPSHQWYTVLDLKDAFFCLRLHPTSQSLFAFEWRDPEMGISGQLTWTRLPQGFKNSPTLFNEALHRDLADFRIQHPDLILLQYVDDLLLAATSELDCQQGTRALLQTLGDLGYRASAKKAQICQKQVKYLGYLLKEGQRWLTEARKETVMGQPTPKTPRQLREFLGKAGFCRLFIPGFAEMAAPLYPLTKPGTLFEWGPDQQKAYQEIKQALLTAPALGLPDLTKPFELFVDEKQGYAKGVLTQKLGPWRRPVAYLSKKLDPVAAGWPPCLRMVAAIAVLTKDAGKLTMGQPLVILAPHAVEALVKQPPDRWLSNARMTHYQALLLDTDRVQFGPIVALNPATLLPLPEEGLQHDCLDILAEAHGTRPDLTDQPLPDADHTWYTDGSSFLQEGQRKAGAAVTTETEVVWAKALPAGTSAQRAELIALTQALKMAEGKKLNVYTDSRYAFATAHIHGEIYRRRGWLTSEGKEIKNKDEILALLKALFLPKRLSIIHCPGHQKGNRAEARGNRMADQAAREVATRETPETSTLLAGKRTADGSEFEKRTADGSEFESPKKKAKVE

SEQ ID NO: 6608 - protein, 2082 aa, synthetic construct
MPAAKRVKLDGGDKKYSIGLDIGTNSVGWAVITDEYKVPSKKFKVLGNTDRHSIKKNLIGALLFDSGETAEATRLKRTARRRYTRRKNRICYLQEIFSNEMAKVDDSFFHRLEESFLVEEDKKHERHPIFGNIVDEVAYHEKYPTIYHLRKKLVDSTDKADLRLIYLALAHMIKFRGHFLIEGDLNPDNSDVDKLFIQLVQTYNQLFEENPINASGVDAKAILSARLSKSRRLENLIAQLPGEKKNGLFGNLIALSLGLTPNFKSNFDLAEDAKLQLSKDTYDDDLDNLLAQIGDQYADLFLAAKNLSDAILLSDILRVNTEITKAPLSASMIKRYDEHHQDLTLLKALVRQQLPEKYKEIFFDQSKNGYAGYIDGGASQEEFYKFIKPILEKMDGTEELLVKLNREDLLRKQRTFDNGSIPHQIHLGELHAILRRQEDFYPFLKDNREKIEKILTFRIPYYVGPLARGNSRFAWMTRKSEETITPWNFEEVVDKGASAQSFIERMTNFDKNLPNEKVLPKHSLLYEYFTVYNELTKVKYVTEGMRKPAFLSGEQKKAIVDLLFKTNRKVTVKQLKEDYFKKIECFDSVEISGVEDRFNASLGTYHDLLKIIKDKDFLDNEENEDILEDIVLTLTLFEDREMIEERLKTYAHLFDDKVMKQLKRRRYTGWGRLSRKLINGIRDKQSGKTILDFLKSDGFANRNFMQLIHDDSLTFKEDIQKAQVSGQGDSLHEHIANLAGSPAIKKGILQTVKVVDELVKVMGRHKPENIVIEMARENQTTQKGQKNSRERMKRIEEGIKELGSQILKEHPVENTQLQNEKLYLYYLQNGRDMYVDQELDINRLSDYDVDHIVPQSFLKDDSIDNKVLTRSDKARGKSDNVPSEEVVKKMKNYWRQLLNAKLITQRKFDNLTKAERGGLSELDKAGFIKRQLVETRQITKHVAQILDSRMNTKYDENDKLIREVKVITLKSKLVSDFRKDFQFYKVREINNYHHAHDAYLNAVVGTALIKKYPKLESEFVYGDYKVYDVRKMIAKSEQEIGKATAKYFFYSNIMNFFKTEITLANGEIRKRPLIETNGETGEIVWDKGRDFATVRKVLSMPQVNIVKKTEVQTGGFSKESILPKRNSDKLIARKKDWDPKKYGGFDSPTVAYSVLVVAKVEKGKSKKLKSVKELLGITIMERSSFEKNPIDFLEAKGYKEVKKDLIIKLPKYSLFELENGRKRMLASAGELQKGNELALPSKYVNFLYLASHYEKLKGSPEDNEQKQLFVEQHKHYLDEIIEQISEFSKRVILADANLDKVLSAYNKHRDKPIREQAENIIHLFTLTNLGAPAAFKYFDTTIDRKRYTSTKEVLDATLIHQSITGLYETRIDLSQLGGDGGGGSGSSGGVPWLMKKPLQLTVLVPLHEYQERLLQQTALPKEQKELLQKLFLKYDALWQHWENQVGHRRIKPHNIATGTLAPRPQKQYPINPKAKPSIQIVIDDLLKQGVLIQQNSTMNTPVYPVPKPDGKWRMVLDYREVNKTIPLIAAQNQHSAGILSSIYRGKYKTTLDLTNGFWAHPITPESYWLTAFTWQGKQYCWTRLPQGFLNSPALFNADVVDLLKEIPNVQAYVDDIYISHDDPQEHLEQLEKIFSILLNAGYVVSLKKSEIAQREVEFLGFNITKEGRGLTDTFKQKLLNITPPKDLKQLQSILGLLNFARNFIPNYSELVKPLYTIVAPANGKFISWTEDNSNQLQHIISVLNQADNLEERNPETRLIIKVNSSPSAGYIRYYNEGSKRPIMYVNYIFSKAEAKFTQTEKLLTTMHKGLIKAMDLAMGQEILVYSPIVSMTKIQRTPLPERKALPVRWITWMTYLEDPRIQFHYDKSLPELQQIPNVTEDVIAKTKHPSEFAMVFYTDGSAIKHPDVNKSHSAGMGIAQVQFIPEYKIVHQWSIPLGDHTAQLAEIAAVEFACKKALKISGPVLIVTDSFYVAESANKELPYWKSNGFLNNKKKPLRHVSKWKSIAECLQLKPDIIIMHEKGHQQPMTTLHTEGNNLADKLATQGSYVVHAGKRTADGSEFEKRTADGSEFESPKKKAKVE

SEQ ID NO: 6609 - protein, 2082 aa, synthetic construct
MPAAKRVKLDGGDKKYSIGLDIGTNSVGWAVITDEYKVPSKKFKVLGNTDRHSIKKNLIGALLFDSGETAEATRLKRTARRRYTRRKNRICYLQEIFSNEMAKVDDSFFHRLEESFLVEEDKKHERHPIFGNIVDEVAYHEKYPTIYHLRKKLVDSTDKADLRLIYLALAHMIKFRGHFLIEGDLNPDNSDVDKLFIQLVQTYNQLFEENPINASGVDAKAILSARLSKSRRLENLIAQLPGEKKNGLFGNLIALSLGLTPNFKSNFDLAEDAKLQLSKDTYDDDLDNLLAQIGDQYADLFLAAKNLSDAILLSDILRVNTEITKAPLSASMIKRYDEHHQDLTLLKALVRQQLPEKYKEIFFDQSKNGYAGYIDGGASQEEFYKFIKPILEKMDGTEELLVKLNREDLLRKQRTFDNGSIPHQIHLGELHAILRRQEDFYPFLKDNREKIEKILTFRIPYYVGPLARGNSRFAWMTRKSEETITPWNFEEVVDKGASAQSFIERMTNFDKNLPNEKVLPKHSLLYEYFTVYNELTKVKYVTEGMRKPAFLSGEQKKAIVDLLFKTNRKVTVKQLKEDYFKKIECFDSVEISGVEDRFNASLGTYHDLLKIIKDKDFLDNEENEDILEDIVLTLTLFEDREMIEERLKTYAHLFDDKVMKQLKRRRYTGWGRLSRKLINGIRDKQSGKTILDFLKSDGFANRNFMQLIHDDSLTFKEDIQKAQVSGQGDSLHEHIANLAGSPAIKKGILQTVKVVDELVKVMGRHKPENIVIEMARENQTTQKGQKNSRERMKRIEEGIKELGSQILKEHPVENTQLQNEKLYLYYLQNGRDMYVDQELDINRLSDYDVDHIVPQSFLKDDSIDNKVLTRSDKARGKSDNVPSEEVVKKMKNYWRQLLNAKLITQRKFDNLTKAERGGLSELDKAGFIKRQLVETRQITKHVAQILDSRMNTKYDENDKLIREVKVITLKSKLVSDFRKDFQFYKVREINNYHHAHDAYLNAVVGTALIKKYPKLESEFVYGDYKVYDVRKMIAKSEQEIGKATAKYFFYSNIMNFFKTEITLANGEIRKRPLIETNGETGEIVWDKGRDFATVRKVLSMPQVNIVKKTEVQTGGFSKESILPKRNSDKLIARKKDWDPKKYGGFDSPTVAYSVLVVAKVEKGKSKKLKSVKELLGITIMERSSFEKNPIDFLEAKGYKEVKKDLIIKLPKYSLFELENGRKRMLASAGELQKGNELALPSKYVNFLYLASHYEKLKGSPEDNEQKQLFVEQHKHYLDEIIEQISEFSKRVILADANLDKVLSAYNKHRDKPIREQAENIIHLFTLTNLGAPAAFKYFDTTIDRKRYTSTKEVLDATLIHQSITGLYETRIDLSQLGGDGGGGSGSSGGIPWLMKKPLQLTTLVPLQEYEERLLKQTMLTGSYKEKLQSLFLKYDALWQHWENQVGHRRIKPHHIATGTVNPRPQKQYPINPKAKASIQTVINDLLKQGVLIQQNSIMNTPVYPVPKPDGKWRMVLDYREVNKTIPLIAAQNQHSAGILSSIFRGKYKTTLDLSNGFWAHSITPESYWLTAFTWLGQQYCWTRLPQGFLNSPALFNADVVDLLKEVPNVQVYVDDIYISHDDPREHLEQLEKVFSLLLNAGYVVSLKKSEIAQHEVEFLGFNITKEGRGLTETFKQKLLNITPPRDLKQLQSILGLLNFARNFIPNFSELVKPLYNIIATAPGKYITWTTDNSQQLQNIISMLNSAENLEERNPEVRLIMKVNTSPSAGYIRFYNEFAKRPIMYLNYVYTKAEVKFTNTEKLLTTIHKGLIKALDLGMGQEILVYSPIVSMTKIQKTPLPERKALPIRWITWMSYLEDPRIQFHYDKTLPELQQVPTVTDDIIAKIKHPSEFSMVFYTDGSAIKHPNVNKSHNAGMGIAQVQFKPEFTVINTWSIPLGDHTAQLAEVAAVEFACKKALKIDGPVLIVTDSFYVAESVNKELPYWQSNGFFNNKKKPLKHVSKWKSIADCIQLKPDIIIIHEKGHQPTASTFHTEGNNLADKLATQGSYVVNAGKRTADGSEFEKRTADGSEFESPKKKAKVE

SEQ ID NO: 6610 - protein, 2082 aa, synthetic construct
MPAAKRVKLDGGDKKYSIGLDIGTNSVGWAVITDEYKVPSKKFKVLGNTDRHSIKKNLIGALLFDSGETAEATRLKRTARRRYTRRKNRICYLQEIFSNEMAKVDDSFFHRLEESFLVEEDKKHERHPIFGNIVDEVAYHEKYPTIYHLRKKLVDSTDKADLRLIYLALAHMIKFRGHFLIEGDLNPDNSDVDKLFIQLVQTYNQLFEENPINASGVDAKAILSARLSKSRRLENLIAQLPGEKKNGLFGNLIALSLGLTPNFKSNFDLAEDAKLQLSKDTYDDDLDNLLAQIGDQYADLFLAAKNLSDAILLSDILRVNTEITKAPLSASMIKRYDEHHQDLTLLKALVRQQLPEKYKEIFFDQSKNGYAGYIDGGASQEEFYKFIKPILEKMDGTEELLVKLNREDLLRKQRTFDNGSIPHQIHLGELHAILRRQEDFYPFLKDNREKIEKILTFRIPYYVGPLARGNSRFAWMTRKSEETITPWNFEEVVDKGASAQSFIERMTNFDKNLPNEKVLPKHSLLYEYFTVYNELTKVKYVTEGMRKPAFLSGEQKKAIVDLLFKTNRKVTVKQLKEDYFKKIECFDSVEISGVEDRFNASLGTYHDLLKIIKDKDFLDNEENEDILEDIVLTLTLFEDREMIEERLKTYAHLFDDKVMKQLKRRRYTGWGRLSRKLINGIRDKQSGKTILDFLKSDGFANRNFMQLIHDDSLTFKEDIQKAQVSGQGDSLHEHIANLAGSPAIKKGILQTVKVVDELVKVMGRHKPENIVIEMARENQTTQKGQKNSRERMKRIEEGIKELGSQILKEHPVENTQLQNEKLYLYYLQNGRDMYVDQELDINRLSDYDVDHIVPQSFLKDDSIDNKVLTRSDKARGKSDNVPSEEVVKKMKNYWRQLLNAKLITQRKFDNLTKAERGGLSELDKAGFIKRQLVETRQITKHVAQILDSRMNTKYDENDKLIREVKVITLKSKLVSDFRKDFQFYKVREINNYHHAHDAYLNAVVGTALIKKYPKLESEFVYGDYKVYDVRKMIAKSEQEIGKATAKYFFYSNIMNFFKTEITLANGEIRKRPLIETNGETGEIVWDKGRDFATVRKVLSMPQVNIVKKTEVQTGGFSKESILPKRNSDKLIARKKDWDPKKYGGFDSPTVAYSVLVVAKVEKGKSKKLKSVKELLGITIMERSSFEKNPIDFLEAKGYKEVKKDLIIKLPKYSLFELENGRKRMLASAGELQKGNELALPSKYVNFLYLASHYEKLKGSPEDNEQKQLFVEQHKHYLDEIIEQISEFSKRVILADANLDKVLSAYNKHRDKPIREQAENIIHLFTLTNLGAPAAFKYFDTTIDRKRYTSTKEVLDATLIHQSITGLYETRIDLSQLGGDGGGGSGSSGGIPWLMKKPLQLTTLVPLQEYEERLLKQTMLTGSYKEKLQSLFLKYDALWQHWENQVGHRRIKPHHIATGTVNPRPQKQYPINPKAKASIQTVINDLLKQGVLIQQNSIMNTPVYPVPKPDGKWRMVLDYREVNKTIPLIAAQNQHSAGILSSIFRGKYKTTLDLSNGFWAHSITPESYWLTAFTWLGQQYCWTRLPQGFLNSPALFNADVVDLLKEVPNVQVYVDDIYISHDDPREHLEQLEKVFSLLLNAGYVVSLKKSEIAQHEVEFLGFNITKEGRGLTETFKQKLLNITPPRDLKQLQSILGKLNFARNFIPNFSELVKPLYNIIATAPGKYITWTTDNSQQLQNIISMLNSAENLEERNPEVRLIMKVNTSPSAGYIRFYNEFAKRPIMYLNYVYTKAEVKFTNTEKLLTTIHKGLIKALDLGMGQEILVYSPIVSMTKIQKTPLPERKALPIRWITWMSYLEDPRIQFHYDKTLPELQQVPTVTDDIIAKIKHPSEFSMVFYTDGSAIKHPNVNKSHNAGMGIAQVQFKPEFTVINTWSIPLGDHTAQLAEVAAVEFACKKALKIDGPVLIVTDSFYVAESVNKELPYWQSNGFFNNKKKPLKHVSKWKSIADCIQLKPDIIIIHEKGHQPTASTFHTEGNNLADKLATQGSYVVNAGKRTADGSEFEKRTADGSEFESPKKKAKVE

SEQ ID NO: 6611 - protein, 2089 aa, synthetic construct
MPAAKRVKLDGGDKKYSIGLDIGTNSVGWAVITDEYKVPSKKFKVLGNTDRHSIKKNLIGALLFDSGETAEATRLKRTARRRYTRRKNRICYLQEIFSNEMAKVDDSFFHRLEESFLVEEDKKHERHPIFGNIVDEVAYHEKYPTIYHLRKKLVDSTDKADLRLIYLALAHMIKFRGHFLIEGDLNPDNSDVDKLFIQLVQTYNQLFEENPINASGVDAKAILSARLSKSRRLENLIAQLPGEKKNGLFGNLIALSLGLTPNFKSNFDLAEDAKLQLSKDTYDDDLDNLLAQIGDQYADLFLAAKNLSDAILLSDILRVNTEITKAPLSASMIKRYDEHHQDLTLLKALVRQQLPEKYKEIFFDQSKNGYAGYIDGGASQEEFYKFIKPILEKMDGTEELLVKLNREDLLRKQRTFDNGSIPHQIHLGELHAILRRQEDFYPFLKDNREKIEKILTFRIPYYVGPLARGNSRFAWMTRKSEETITPWNFEEVVDKGASAQSFIERMTNFDKNLPNEKVLPKHSLLYEYFTVYNELTKVKYVTEGMRKPAFLSGEQKKAIVDLLFKTNRKVTVKQLKEDYFKKIECFDSVEISGVEDRFNASLGTYHDLLKIIKDKDFLDNEENEDILEDIVLTLTLFEDREMIEERLKTYAHLFDDKVMKQLKRRRYTGWGRLSRKLINGIRDKQSGKTILDFLKSDGFANRNFMQLIHDDSLTFKEDIQKAQVSGQGDSLHEHIANLAGSPAIKKGILQTVKVVDELVKVMGRHKPENIVIEMARENQTTQKGQKNSRERMKRIEEGIKELGSQILKEHPVENTQLQNEKLYLYYLQNGRDMYVDQELDINRLSDYDVDHIVPQSFLKDDSIDNKVLTRSDKARGKSDNVPSEEVVKKMKNYWRQLLNAKLITQRKFDNLTKAERGGLSELDKAGFIKRQLVETRQITKHVAQILDSRMNTKYDENDKLIREVKVITLKSKLVSDFRKDFQFYKVREINNYHHAHDAYLNAVVGTALIKKYPKLESEFVYGDYKVYDVRKMIAKSEQEIGKATAKYFFYSNIMNFFKTEITLANGEIRKRPLIETNGETGEIVWDKGRDFATVRKVLSMPQVNIVKKTEVQTGGFSKESILPKRNSDKLIARKKDWDPKKYGGFDSPTVAYSVLVVAKVEKGKSKKLKSVKELLGITIMERSSFEKNPIDFLEAKGYKEVKKDLIIKLPKYSLFELENGRKRMLASAGELQKGNELALPSKYVNFLYLASHYEKLKGSPEDNEQKQLFVEQHKHYLDEIIEQISEFSKRVILADANLDKVLSAYNKHRDKPIREQAENIIHLFTLTNLGAPAAFKYFDTTIDRKRYTSTKEVLDATLIHQSITGLYETRIDLSQLGGDGGGGSGSSGGVLNLEEEYRLHEKPVPSSIDPSWLQLFPTVWAERAGMGLANQVPPVVVELRSGASPVAVRQYPMSKEAREGIRPHIQRFLDLGVLVPCQSPWNTPLLPVKKPGTNDYRPVQDLREINKRVQDIHPTVPNPYNLLSSLPPSHTWYSVLDLKDAFFCLKLHPNSQPLFAFEWRDPEKGNTGQLTWTRLPQGFKNSPTLFNEALHRDLAPFRALNPQVVLLQYVDDLLVAAPTYRDCKEGTQKLLQELSKLGYRVSAKKAQLCQKEVTYLGYLLKEGKRWLTPARKATVMKIPPPTTPRQVREFLGTAGFCRLWIPGFASLAAPLYPLTKPSIPFIWTEEHQKAFDRIKEALLSAPALALPDLTKPFTLYVDERAGVARGVLTQTLGPWRRPVAYLSKKLDPVASGWPTCLKAVAAVALLLKDADKLTLGQNVTVIASHSLESIVRQPPDRWMTNARMTHYQSLLLNERVSFAPPAVLNPATLLPVESEATPVHRCSEILAEETGTRRDLKDQPLPGVPAWYTDGSSFIAEGKRRAGAAIVDGKRTVWASSLPEGTSAQKAELVALTQALRLAEGKDINIYTDSRYAFATAHIHGAIYKQRGWLTSAGKDIKNKEEILALLEAIHLPKRVAIIHCPGHQKGNDPVATGNRRADEAAKQAALSTRVLAETTKPAGKRTADGSEFEKRTADGSEFESPKKKAKVE

SEQ ID NO: 6612 - protein, 2091 aa, synthetic construct
MPAAKRVKLDGGDKKYSIGLDIGTNSVGWAVITDEYKVPSKKFKVLGNTDRHSIKKNLIGALLFDSGETAEATRLKRTARRRYTRRKNRICYLQEIFSNEMAKVDDSFFHRLEESFLVEEDKKHERHPIFGNIVDEVAYHEKYPTIYHLRKKLVDSTDKADLRLIYLALAHMIKFRGHFLIEGDLNPDNSDVDKLFIQLVQTYNQLFEENPINASGVDAKAILSARLSKSRRLENLIAQLPGEKKNGLFGNLIALSLGLTPNFKSNFDLAEDAKLQLSKDTYDDDLDNLLAQIGDQYADLFLAAKNLSDAILLSDILRVNTEITKAPLSASMIKRYDEHHQDLTLLKALVRQQLPEKYKEIFFDQSKNGYAGYIDGGASQEEFYKFIKPILEKMDGTEELLVKLNREDLLRKQRTFDNGSIPHQIHLGELHAILRRQEDFYPFLKDNREKIEKILTFRIPYYVGPLARGNSRFAWMTRKSEETITPWNFEEVVDKGASAQSFIERMTNFDKNLPNEKVLPKHSLLYEYFTVYNELTKVKYVTEGMRKPAFLSGEQKKAIVDLLFKTNRKVTVKQLKEDYFKKIECFDSVEISGVEDRFNASLGTYHDLLKIIKDKDFLDNEENEDILEDIVLTLTLFEDREMIEERLKTYAHLFDDKVMKQLKRRRYTGWGRLSRKLINGIRDKQSGKTILDFLKSDGFANRNFMQLIHDDSLTFKEDIQKAQVSGQGDSLHEHIANLAGSPAIKKGILQTVKVVDELVKVMGRHKPENIVIEMARENQTTQKGQKNSRERMKRIEEGIKELGSQILKEHPVENTQLQNEKLYLYYLQNGRDMYVDQELDINRLSDYDVDHIVPQSFLKDDSIDNKVLTRSDKARGKSDNVPSEEVVKKMKNYWRQLLNAKLITQRKFDNLTKAERGGLSELDKAGFIKRQLVETRQITKHVAQILDSRMNTKYDENDKLIREVKVITLKSKLVSDFRKDFQFYKVREINNYHHAHDAYLNAVVGTALIKKYPKLESEFVYGDYKVYDVRKMIAKSEQEIGKATAKYFFYSNIMNFFKTEITLANGEIRKRPLIETNGETGEIVWDKGRDFATVRKVLSMPQVNIVKKTEVQTGGFSKESILPKRNSDKLIARKKDWDPKKYGGFDSPTVAYSVLVVAKVEKGKSKKLKSVKELLGITIMERSSFEKNPIDFLEAKGYKEVKKDLIIKLPKYSLFELENGRKRMLASAGELQKGNELALPSKYVNFLYLASHYEKLKGSPEDNEQKQLFVEQHKHYLDEIIEQISEFSKRVILADANLDKVLSAYNKHRDKPIREQAENIIHLFTLTNLGAPAAFKYFDTTIDRKRYTSTKEVLDATLIHQSITGLYETRIDLSQLGGDGGGGSGSSGGTLNIEDEYRLHETSKEPDVPLGSTWLSDFPQAWAETGGMGLAVRQAPLIIPLKATSTPVSIKQYPMSQEARLGIKPHIQRLLDQGILVPCQSPWNTPLLPVKKPGTNDYRPVQDLREVNKRVEDIHPTVPNPYNLLSGLPPSHQWYTVLDLKDAFFCLRLHPTSQPLFAFEWRDPEMGISGQLTWTRLPQGFKNSPTLFNEALHRDLADFRIQHPDLILLQYVDDLLLAATSEQDCQRGTRALLQTLGNLGYRASAKKAQICQKQVKYLGYLLKEGQRWLTEARKETVMGQPTPKTPRQLREFLGTAGFCRLWIPGFAEMAAPLYPLTKPGTLFNWGPDQQKAYQEIKQALLTAPALGLPDLTKPFELFVDEKQGYAKGVLTQKLGPWRRPVAYLSKKLDPVAAGWPPCLRMVAAIAVLTKDAGKLTMGQPLVILAPHAVEALVKQPPDRWLSNARMTHYQAMLLDTDRVQFGPVVALNPATLLPLPEKEAPHDCLEILAETHGTRPDLTDQPIPDADYTWYTDGSSFLQEGQRRAGAAVTTETEVIWARALPAGTSAQRAELIALTQALKMAEGKKLNVYTDSRYAFATAHVHGEIYRRRGWLTSEGREIKNKNEILALLKALFLPKRLSIIHCPGHQKGNSAEARGNRMADQAAREAAMKAVLETSTLLAGKRTADGSEFEKRTADGSEFESPKKKAKVE

SEQ ID NO: 6613 - protein, 2093 aa, synthetic construct
MPAAKRVKLDGGDKKYSIGLDIGTNSVGWAVITDEYKVPSKKFKVLGNTDRHSIKKNLIGALLFDSGETAEATRLKRTARRRYTRRKNRICYLQEIFSNEMAKVDDSFFHRLEESFLVEEDKKHERHPIFGNIVDEVAYHEKYPTIYHLRKKLVDSTDKADLRLIYLALAHMIKFRGHFLIEGDLNPDNSDVDKLFIQLVQTYNQLFEENPINASGVDAKAILSARLSKSRRLENLIAQLPGEKKNGLFGNLIALSLGLTPNFKSNFDLAEDAKLQLSKDTYDDDLDNLLAQIGDQYADLFLAAKNLSDAILLSDILRVNTEITKAPLSASMIKRYDEHHQDLTLLKALVRQQLPEKYKEIFFDQSKNGYAGYIDGGASQEEFYKFIKPILEKMDGTEELLVKLNREDLLRKQRTFDNGSIPHQIHLGELHAILRRQEDFYPFLKDNREKIEKILTFRIPYYVGPLARGNSRFAWMTRKSEETITPWNFEEVVDKGASAQSFIERMTNFDKNLPNEKVLPKHSLLYEYFTVYNELTKVKYVTEGMRKPAFLSGEQKKAIVDLLFKTNRKVTVKQLKEDYFKKIECFDSVEISGVEDRFNASLGTYHDLLKIIKDKDFLDNEENEDILEDIVLTLTLFEDREMIEERLKTYAHLFDDKVMKQLKRRRYTGWGRLSRKLINGIRDKQSGKTILDFLKSDGFANRNFMQLIHDDSLTFKEDIQKAQVSGQGDSLHEHIANLAGSPAIKKGILQTVKVVDELVKVMGRHKPENIVIEMARENQTTQKGQKNSRERMKRIEEGIKELGSQILKEHPVENTQLQNEKLYLYYLQNGRDMYVDQELDINRLSDYDVDHIVPQSFLKDDSIDNKVLTRSDKARGKSDNVPSEEVVKKMKNYWRQLLNAKLITQRKFDNLTKAERGGLSELDKAGFIKRQLVETRQITKHVAQILDSRMNTKYDENDKLIREVKVITLKSKLVSDFRKDFQFYKVREINNYHHAHDAYLNAVVGTALIKKYPKLESEFVYGDYKVYDVRKMIAKSEQEIGKATAKYFFYSNIMNFFKTEITLANGEIRKRPLIETNGETGEIVWDKGRDFATVRKVLSMPQVNIVKKTEVQTGGFSKESILPKRNSDKLIARKKDWDPKKYGGFDSPTVAYSVLVVAKVEKGKSKKLKSVKELLGITIMERSSFEKNPIDFLEAKGYKEVKKDLIIKLPKYSLFELENGRKRMLASAGELQKGNELALPSKYVNFLYLASHYEKLKGSPEDNEQKQLFVEQHKHYLDEIIEQISEFSKRVILADANLDKVLSAYNKHRDKPIREQAENIIHLFTLTNLGAPAAFKYFDTTIDRKRYTSTKEVLDATLIHQSITGLYETRIDLSQLGGDGGGSSGGSGGTAPLEEEYRLFLEAPIQNVTLLEQWKREIPKVWAEINPPGLASTQAPIHVQLLSTALPVRVRQYPITLEAKRSLRETIRKFRAAGILRPVHSPWNTPLLPVRKSGTSEYRMVQDLREVNKRVETIHPTVPNPYTLLSLLPPDRIWYSVLDLKDAFFCIPLAPESQLIFAFEWADAEEGESGQLTWTRLPQGFKNSPTLFDEALNRDLQGFRLDHPSVSLLQYVDDLLIAADTQAACLSATRDLLMTLAELGYRVSGKKAQLCQEEVTYLGFKIHKGSRSLSNSRTQAILQIPVPKTKRQVREFLGTIGYCRLWIPGFAELAQPLYAATRGGNDPLVWGEKEEEAFQSLKLALTQPPALALPSLDKPFQLFVEETSGAAKGVLTQALGPWKRPVAYLSKRLDPVAAGWPRCLRAIAAAALLTREASKLTFGQDIEITSSHNLESLLRSPPDKWLTNARITQYQVLLLDPPRVRFKQTAALNPATLLPETDDTLPIHHCLDTLDSLTSTRPDLTDQPLAQAEATLFTDGSSYIRDGKRYAGAAVVTLDSVIWAEPLPIGTSAQKAELIALTKALEWSKDKSVNIYTDSRYAFATLHVHGMIYRERGLLTAGGKAIKNAPEILALLTAVWLPKRVAVMHCKGHQKDDAPTSTGNRRADEVAREVAIRPLSTQATISAGKRTADGSEFEKRTADGSEFESPKKKAKVE

SEQ ID NO: 6614 - protein, 2097 aa, synthetic construct
MPAAKRVKLDGGDKKYSIGLDIGTNSVGWAVITDEYKVPSKKFKVLGNTDRHSIKKNLIGALLFDSGETAEATRLKRTARRRYTRRKNRICYLQEIFSNEMAKVDDSFFHRLEESFLVEEDKKHERHPIFGNIVDEVAYHEKYPTIYHLRKKLVDSTDKADLRLIYLALAHMIKFRGHFLIEGDLNPDNSDVDKLFIQLVQTYNQLFEENPINASGVDAKAILSARLSKSRRLENLIAQLPGEKKNGLFGNLIALSLGLTPNFKSNFDLAEDAKLQLSKDTYDDDLDNLLAQIGDQYADLFLAAKNLSDAILLSDILRVNTEITKAPLSASMIKRYDEHHQDLTLLKALVRQQLPEKYKEIFFDQSKNGYAGYIDGGASQEEFYKFIKPILEKMDGTEELLVKLNREDLLRKQRTFDNGSIPHQIHLGELHAILRRQEDFYPFLKDNREKIEKILTFRIPYYVGPLARGNSRFAWMTRKSEETITPWNFEEVVDKGASAQSFIERMTNFDKNLPNEKVLPKHSLLYEYFTVYNELTKVKYVTEGMRKPAFLSGEQKKAIVDLLFKTNRKVTVKQLKEDYFKKIECFDSVEISGVEDRFNASLGTYHDLLKIIKDKDFLDNEENEDILEDIVLTLTLFEDREMIEERLKTYAHLFDDKVMKQLKRRRYTGWGRLSRKLINGIRDKQSGKTILDFLKSDGFANRNFMQLIHDDSLTFKEDIQKAQVSGQGDSLHEHIANLAGSPAIKKGILQTVKVVDELVKVMGRHKPENIVIEMARENQTTQKGQKNSRERMKRIEEGIKELGSQILKEHPVENTQLQNEKLYLYYLQNGRDMYVDQELDINRLSDYDVDHIVPQSFLKDDSIDNKVLTRSDKARGKSDNVPSEEVVKKMKNYWRQLLNAKLITQRKFDNLTKAERGGLSELDKAGFIKRQLVETRQITKHVAQILDSRMNTKYDENDKLIREVKVITLKSKLVSDFRKDFQFYKVREINNYHHAHDAYLNAVVGTALIKKYPKLESEFVYGDYKVYDVRKMIAKSEQEIGKATAKYFFYSNIMNFFKTEITLANGEIRKRPLIETNGETGEIVWDKGRDFATVRKVLSMPQVNIVKKTEVQTGGFSKESILPKRNSDKLIARKKDWDPKKYGGFDSPTVAYSVLVVAKVEKGKSKKLKSVKELLGITIMERSSFEKNPIDFLEAKGYKEVKKDLIIKLPKYSLFELENGRKRMLASAGELQKGNELALPSKYVNFLYLASHYEKLKGSPEDNEQKQLFVEQHKHYLDEIIEQISEFSKRVILADANLDKVLSAYNKHRDKPIREQAENIIHLFTLTNLGAPAAFKYFDTTIDRKRYTSTKEVLDATLIHQSITGLYETRIDLSQLGGDGGGSSGGSGGTVSLQDEHRLFDIPVTTSLPDVWLQDFPQAWAETGGLGRAKCQAPIIIDLKPTAVPVSIKQYPMSLEAHMGIRQHIIKFLELGVLRPCRSPWNTPLLPVKKPGTQDYRPVQDLREINKRTVDIHPTVPNPYNLLSTLKPDYSWYTVLDLKDAFFCLPLAPQSQELFAFEWKDPERGISGQLTWTRLPQGFKNSPTLFNEALHRDLTDFRTQHPEVTLLQYVDDLLLAAPTKKACTQGTRHLLQELGEKGYRASAKKAQICQTKVTYLGYILSEGKRWLTPGRIETVARIPPPRNPREVREFLGTAGFCRLWIPGFAELAAPLYALTKPSTPFTWQTEHQLAFEALKKALLSAPALGLPDTSKPFTLFLDERQGIAKGVLTQKLGPWKRPVAYLSKKLDPVAAGWPPCLRIMAATAMLVKDSAKLTLGQPLTVITPHTLEAIVRQPPDRWITNARLTHYQALLLDTDRVQFGPPVTLNPATLLPVPENQPSPHDCRQVLAETHGTREDLKDQELPDADHTWYTDGSSYLDSGTRRAGAAVVDGHNTIWAQSLPPGTSAQKAELIALTKALELSKGKKANIYTDSRYAFATAHTHGSIYERRGWLTSEGKEIKNKAEIIALLKALFLPQEVAIIHCPGHQKGQDPVAVGNRQADRVARQAAMAEVLTLATEPDNTSHITAGKRTADGSEFEKRTADGSEFESPKKKAKVE

SEQ ID NO: 6615 - protein, 2090 aa, synthetic construct
MPAAKRVKLDGGDKKYSIGLDIGTNSVGWAVITDEYKVPSKKFKVLGNTDRHSIKKNLIGALLFDSGETAEATRLKRTARRRYTRRKNRICYLQEIFSNEMAKVDDSFFHRLEESFLVEEDKKHERHPIFGNIVDEVAYHEKYPTIYHLRKKLVDSTDKADLRLIYLALAHMIKFRGHFLIEGDLNPDNSDVDKLFIQLVQTYNQLFEENPINASGVDAKAILSARLSKSRRLENLIAQLPGEKKNGLFGNLIALSLGLTPNFKSNFDLAEDAKLQLSKDTYDDDLDNLLAQIGDQYADLFLAAKNLSDAILLSDILRVNTEITKAPLSASMIKRYDEHHQDLTLLKALVRQQLPEKYKEIFFDQSKNGYAGYIDGGASQEEFYKFIKPILEKMDGTEELLVKLNREDLLRKQRTFDNGSIPHQIHLGELHAILRRQEDFYPFLKDNREKIEKILTFRIPYYVGPLARGNSRFAWMTRKSEETITPWNFEEVVDKGASAQSFIERMTNFDKNLPNEKVLPKHSLLYEYFTVYNELTKVKYVTEGMRKPAFLSGEQKKAIVDLLFKTNRKVTVKQLKEDYFKKIECFDSVEISGVEDRFNASLGTYHDLLKIIKDKDFLDNEENEDILEDIVLTLTLFEDREMIEERLKTYAHLFDDKVMKQLKRRRYTGWGRLSRKLINGIRDKQSGKTILDFLKSDGFANRNFMQLIHDDSLTFKEDIQKAQVSGQGDSLHEHIANLAGSPAIKKGILQTVKVVDELVKVMGRHKPENIVIEMARENQTTQKGQKNSRERMKRIEEGIKELGSQILKEHPVENTQLQNEKLYLYYLQNGRDMYVDQELDINRLSDYDVDHIVPQSFLKDDSIDNKVLTRSDKARGKSDNVPSEEVVKKMKNYWRQLLNAKLITQRKFDNLTKAERGGLSELDKAGFIKRQLVETRQITKHVAQILDSRMNTKYDENDKLIREVKVITLKSKLVSDFRKDFQFYKVREINNYHHAHDAYLNAVVGTALIKKYPKLESEFVYGDYKVYDVRKMIAKSEQEIGKATAKYFFYSNIMNFFKTEITLANGEIRKRPLIETNGETGEIVWDKGRDFATVRKVLSMPQVNIVKKTEVQTGGFSKESILPKRNSDKLIARKKDWDPKKYGGFDSPTVAYSVLVVAKVEKGKSKKLKSVKELLGITIMERSSFEKNPIDFLEAKGYKEVKKDLIIKLPKYSLFELENGRKRMLASAGELQKGNELALPSKYVNFLYLASHYEKLKGSPEDNEQKQLFVEQHKHYLDEIIEQISEFSKRVILADANLDKVLSAYNKHRDKPIREQAENIIHLFTLTNLGAPAAFKYFDTTIDRKRYTSTKEVLDATLIHQSITGLYETRIDLSQLGGDGGGSSGGSGGTLQLEEEYRLFEPESTQKQEMDIWLKNFPQAWAETGGMGTAHCQAPVLIQLKATATPISIRQYPMPHEAYQGIKPHIRRMLDQGILKPCQSPWNTPLLPVKKPGTEDYRPVQDLREVNKRVEDIHPTVPNPYNLLSTLPPSHPWYTVLDLKDAFFCLRLHSESQLLFAFEWRDPEIGLSGQLTWTRLPQGFKNSPTLFNEALHSDLADFRVRYPALVLLQYVDDLLLAAATRTECLEGTKALLETLGNKGYRASAKKAQICLQEVTYLGYSLKDGQRWLTKARKEAILSIPVPKNSRQVREFLGKAGYCRLFIPGFAELAAPLYPLTRPGTLFQWGTEQQLAFEDIKKALLSSPALGLPDITKPFELFIDENSGFAKGVLVQKLGPWKRPVAYLSKKLDTVASGWPPCLRMVAAIAILVKDAGKLTLGQPLTILTSHPVEALVRQPPNKWLSNARMTHYQAMLLDAERVHFGPTVSLNPATLLPLPSGGNHHDCLQILAETHGTRPDLTDQPLPDADLTWYTDGSSFIRNGEREAGAAVTTESEVIWAAPLPPGTSAQRAELIALTQALKMAEGKKLTVYTDSRYAFATTHVHGEIYRRRGWLTSEGKEIKNKNEILALLEALFLPKRLSIIHCPGHQKGDSPQAKGNRLADDTAKKAATETHSSLTVLPAGKRTADGSEFEKRTADGSEFESPKKKAKVE

SEQ ID NO: 6616 - protein, 2213 aa, synthetic construct
MPAAKRVKLDGGDKKYSIGLDIGTNSVGWAVITDEYKVPSKKFKVLGNTDRHSIKKNLIGALLFDSGETAEATRLKRTARRRYTRRKNRICYLQEIFSNEMAKVDDSFFHRLEESFLVEEDKKHERHPIFGNIVDEVAYHEKYPTIYHLRKKLVDSTDKADLRLIYLALAHMIKFRGHFLIEGDLNPDNSDVDKLFIQLVQTYNQLFEENPINASGVDAKAILSARLSKSRRLENLIAQLPGEKKNGLFGNLIALSLGLTPNFKSNFDLAEDAKLQLSKDTYDDDLDNLLAQIGDQYADLFLAAKNLSDAILLSDILRVNTEITKAPLSASMIKRYDEHHQDLTLLKALVRQQLPEKYKEIFFDQSKNGYAGYIDGGASQEEFYKFIKPILEKMDGTEELLVKLNREDLLRKQRTFDNGSIPHQIHLGELHAILRRQEDFYPFLKDNREKIEKILTFRIPYYVGPLARGNSRFAWMTRKSEETITPWNFEEVVDKGASAQSFIERMTNFDKNLPNEKVLPKHSLLYEYFTVYNELTKVKYVTEGMRKPAFLSGEQKKAIVDLLFKTNRKVTVKQLKEDYFKKIECFDSVEISGVEDRFNASLGTYHDLLKIIKDKDFLDNEENEDILEDIVLTLTLFEDREMIEERLKTYAHLFDDKVMKQLKRRRYTGWGRLSRKLINGIRDKQSGKTILDFLKSDGFANRNFMQLIHDDSLTFKEDIQKAQVSGQGDSLHEHIANLAGSPAIKKGILQTVKVVDELVKVMGRHKPENIVIEMARENQTTQKGQKNSRERMKRIEEGIKELGSQILKEHPVENTQLQNEKLYLYYLQNGRDMYVDQELDINRLSDYDVDHIVPQSFLKDDSIDNKVLTRSDKARGKSDNVPSEEVVKKMKNYWRQLLNAKLITQRKFDNLTKAERGGLSELDKAGFIKRQLVETRQITKHVAQILDSRMNTKYDENDKLIREVKVITLKSKLVSDFRKDFQFYKVREINNYHHAHDAYLNAVVGTALIKKYPKLESEFVYGDYKVYDVRKMIAKSEQEIGKATAKYFFYSNIMNFFKTEITLANGEIRKRPLIETNGETGEIVWDKGRDFATVRKVLSMPQVNIVKKTEVQTGGFSKESILPKRNSDKLIARKKDWDPKKYGGFDSPTVAYSVLVVAKVEKGKSKKLKSVKELLGITIMERSSFEKNPIDFLEAKGYKEVKKDLIIKLPKYSLFELENGRKRMLASAGELQKGNELALPSKYVNFLYLASHYEKLKGSPEDNEQKQLFVEQHKHYLDEIIEQISEFSKRVILADANLDKVLSAYNKHRDKPIREQAENIIHLFTLTNLGAPAAFKYFDTTIDRKRYTSTKEVLDATLIHQSITGLYETRIDLSQLGGDGGGSSGGSGGTLGDQGSRGSDPLPEPRVTLTVEGIPTEFLVNTGAEHSVLTKPMGKMGSKRTVVAGATGSKVYPWTTKRLLKIGQKQVTHSFLVIPECPAPLLGRDLLTKLKAQIQFSTEGPQVTWEDRPAMCLVLNLEEEYRLHEKPVPPSIDPSWLQLFPMVWAEKAGMGLANQVPPVVVELKSDASPVAVRQYPMSKEAREGIRPHIQRFLDLGILVPCQSPWNTPLLPVKKPGTNDYRPVQDLREVNKRVQDIHPTVPNPYNLLSSLPPSHTWYSVLDLKDAFFCLKLHPNSQPLFAFEWRDPEKGNTGQLTWTRLPQGFKNSPTLFNEALHRDLASFRALNPQVVMLQYVDDLLVAAPTYRDCKEGTRRLLQELSKLGYRVSAKKAQLCREEVTYLGYLLKGGKRWLTPARKATVMKIPTPTTPRQVREFLGKAGFCRLFIPGFASLAAPLYPLTRPKVPFTWTEAHQEAFGRIKEALLSAPALALPDLTKPFALYVDEKEGVARGVLTQTLGPWRRPVAYLSKKLDPVASGWPTCLKAIAAVALLLKDADKLTLGQNVLVIAPHNLESIVRQPPDRWMTNARMTHYQSLLLNERVSFAPPAILNPATLLPVESDDTPIHICSEILAEETGTRPDLRDQPLPGVPAWYTDGSSFIMDGRRQAGAAIVDNKRTVWASNLPEGTSAQKAELIALTQALRLAEGKSINIYTDSRYAFATAHVHGAIYKQRGWLTSAGKDIKNKEEILALLEAIHLPKRVAIIHCPGHQRGTDPVATGNRKADEAAKQAAQSTRILTETTKNAGKRTADGSEFEKRTADGSEFESPKKKAKVE

SEQ ID NO: 6617 - protein, 2091 aa, synthetic construct
MPAAKRVKLDGGDKKYSIGLDIGTNSVGWAVITDEYKVPSKKFKVLGNTDRHSIKKNLIGALLFDSGETAEATRLKRTARRRYTRRKNRICYLQEIFSNEMAKVDDSFFHRLEESFLVEEDKKHERHPIFGNIVDEVAYHEKYPTIYHLRKKLVDSTDKADLRLIYLALAHMIKFRGHFLIEGDLNPDNSDVDKLFIQLVQTYNQLFEENPINASGVDAKAILSARLSKSRRLENLIAQLPGEKKNGLFGNLIALSLGLTPNFKSNFDLAEDAKLQLSKDTYDDDLDNLLAQIGDQYADLFLAAKNLSDAILLSDILRVNTEITKAPLSASMIKRYDEHHQDLTLLKALVRQQLPEKYKEIFFDQSKNGYAGYIDGGASQEEFYKFIKPILEKMDGTEELLVKLNREDLLRKQRTFDNGSIPHQIHLGELHAILRRQEDFYPFLKDNREKIEKILTFRIPYYVGPLARGNSRFAWMTRKSEETITPWNFEEVVDKGASAQSFIERMTNFDKNLPNEKVLPKHSLLYEYFTVYNELTKVKYVTEGMRKPAFLSGEQKKAIVDLLFKTNRKVTVKQLKEDYFKKIECFDSVEISGVEDRFNASLGTYHDLLKIIKDKDFLDNEENEDILEDIVLTLTLFEDREMIEERLKTYAHLFDDKVMKQLKRRRYTGWGRLSRKLINGIRDKQSGKTILDFLKSDGFANRNFMQLIHDDSLTFKEDIQKAQVSGQGDSLHEHIANLAGSPAIKKGILQTVKVVDELVKVMGRHKPENIVIEMARENQTTQKGQKNSRERMKRIEEGIKELGSQILKEHPVENTQLQNEKLYLYYLQNGRDMYVDQELDINRLSDYDVDHIVPQSFLKDDSIDNKVLTRSDKARGKSDNVPSEEVVKKMKNYWRQLLNAKLITQRKFDNLTKAERGGLSELDKAGFIKRQLVETRQITKHVAQILDSRMNTKYDENDKLIREVKVITLKSKLVSDFRKDFQFYKVREINNYHHAHDAYLNAVVGTALIKKYPKLESEFVYGDYKVYDVRKMIAKSEQEIGKATAKYFFYSNIMNFFKTEITLANGEIRKRPLIETNGETGEIVWDKGRDFATVRKVLSMPQVNIVKKTEVQTGGFSKESILPKRNSDKLIARKKDWDPKKYGGFDSPTVAYSVLVVAKVEKGKSKKLKSVKELLGITIMERSSFEKNPIDFLEAKGYKEVKKDLIIKLPKYSLFELENGRKRMLASAGELQKGNELALPSKYVNFLYLASHYEKLKGSPEDNEQKQLFVEQHKHYLDEIIEQISEFSKRVILADANLDKVLSAYNKHRDKPIREQAENIIHLFTLTNLGAPAAFKYFDTTIDRKRYTSTKEVLDATLIHQSITGLYETRIDLSQLGGDGGGSSGGSGGTLGIEDEYRLHETSTEPDVSLGSTWLSDFPQAWAETGGMGLAVRQAPLIIPLKATSTPVSIQQYPMSHEARLGIKPHIQRLLDQGILVPCQSPWNTPLLPVKKPGTNDYRPVQDLREVNKRVEDIHPTVPNPYNLLSGLPPSHQWYTVLDLKDAFFCLRLHPTSQPLFAFEWRDPGMGISGQLTWTRLPQGFKNSPTLFNEALHRDLADFRIQHPDLILLQYVDDILLAATSELDCQQGTRALLQTLGDLGYRASAKKAQICQKQVKYLGYLLREGQRWLTEARKETVMGQPVPKTPRQLREFLGTAGFCRLWIPGFAEMAAPLYPLTKPGTLFSWGPDQQKAYQEIKQALLTAPALGLPDLTKPFELFVDEKQGYAKGVLTQKLGPWRRPVAYLSKKLDPVAAGWPPCLRMVAAIAVLTKDAGKLTMGQPLVILAPHAVEALVKQPPDRWLSNARMTHYQAMLLDTDRVQFGPVVALNPATLLPLPEEGAPHDCLEILAETHGTRPDLTDQPIPDADHTWYTDGSSFLQEGQRKAGAAVTTETEVIWAGALPAGTSAQRAELIALTQALKMAEGKRLNVYTDSRYAFATAHIHGEIYRRRGWLTSEGREIKNKSEILALLKALFLPKRLSIIHCLGHQKGDSAEARGNRLADQAAREAAIKTPPDTSTLLAGKRTADGSEFEKRTADGSEFESPKKKAKVE

SEQ ID NO: 6618 - protein, 2091 aa, synthetic construct
MPAAKRVKLDGGDKKYSIGLDIGTNSVGWAVITDEYKVPSKKFKVLGNTDRHSIKKNLIGALLFDSGETAEATRLKRTARRRYTRRKNRICYLQEIFSNEMAKVDDSFFHRLEESFLVEEDKKHERHPIFGNIVDEVAYHEKYPTIYHLRKKLVDSTDKADLRLIYLALAHMIKFRGHFLIEGDLNPDNSDVDKLFIQLVQTYNQLFEENPINASGVDAKAILSARLSKSRRLENLIAQLPGEKKNGLFGNLIALSLGLTPNFKSNFDLAEDAKLQLSKDTYDDDLDNLLAQIGDQYADLFLAAKNLSDAILLSDILRVNTEITKAPLSASMIKRYDEHHQDLTLLKALVRQQLPEKYKEIFFDQSKNGYAGYIDGGASQEEFYKFIKPILEKMDGTEELLVKLNREDLLRKQRTFDNGSIPHQIHLGELHAILRRQEDFYPFLKDNREKIEKILTFRIPYYVGPLARGNSRFAWMTRKSEETITPWNFEEVVDKGASAQSFIERMTNFDKNLPNEKVLPKHSLLYEYFTVYNELTKVKYVTEGMRKPAFLSGEQKKAIVDLLFKTNRKVTVKQLKEDYFKKIECFDSVEISGVEDRFNASLGTYHDLLKIIKDKDFLDNEENEDILEDIVLTLTLFEDREMIEERLKTYAHLFDDKVMKQLKRRRYTGWGRLSRKLINGIRDKQSGKTILDFLKSDGFANRNFMQLIHDDSLTFKEDIQKAQVSGQGDSLHEHIANLAGSPAIKKGILQTVKVVDELVKVMGRHKPENIVIEMARENQTTQKGQKNSRERMKRIEEGIKELGSQILKEHPVENTQLQNEKLYLYYLQNGRDMYVDQELDINRLSDYDVDHIVPQSFLKDDSIDNKVLTRSDKARGKSDNVPSEEVVKKMKNYWRQLLNAKLITQRKFDNLTKAERGGLSELDKAGFIKRQLVETRQITKHVAQILDSRMNTKYDENDKLIREVKVITLKSKLVSDFRKDFQFYKVREINNYHHAHDAYLNAVVGTALIKKYPKLESEFVYGDYKVYDVRKMIAKSEQEIGKATAKYFFYSNIMNFFKTEITLANGEIRKRPLIETNGETGEIVWDKGRDFATVRKVLSMPQVNIVKKTEVQTGGFSKESILPKRNSDKLIARKKDWDPKKYGGFDSPTVAYSVLVVAKVEKGKSKKLKSVKELLGITIMERSSFEKNPIDFLEAKGYKEVKKDLIIKLPKYSLFELENGRKRMLASAGELQKGNELALPSKYVNFLYLASHYEKLKGSPEDNEQKQLFVEQHKHYLDEIIEQISEFSKRVILADANLDKVLSAYNKHRDKPIREQAENIIHLFTLTNLGAPAAFKYFDTTIDRKRYTSTKEVLDATLIHQSITGLYETRIDLSQLGGDGGGSSGGSGGTLNIEDEYRLHETSKEPDVSLGSTWLSDFPQAWAETGGMGLAVRQAPLIIPLKATSTPVSIKQYPMSQEARLGIKPHIQRLLDQGILVPCQSPWNTPLLPVKKPGTNDYRPVQDLREVNKRVEDIHPTVPNPYNLLSGLPPSHQWYTVLDLKDAFFCLRLHPTSQPLFAFEWRDPEMGISGQLTWTRLPQGFKNSPTLFNEALHRDLAGFRIQHPDLILLQYVDDLLLAATSELDCQQGTRALLQTLGDLGYRASAKKAQICQKQVKYLGYLLKEGQRWLTEARKETVMGQPIPKTPRQLREFLGTAGFCRLWIPGFAEMAAPLYPLTKPGTLFNWGPDQQKAFQEIKQALLTAPALGLPDLTKPFELFVDEKQGYAKGVLTQKLGPWRRPVAYLSKKLDPVAAGWPPCLRMVAAIAVLTKDAGKLTMGQPLVILAPHAVEALVKQPPDRWLSNARMTHYQALLLDTDRVQFGPVVALNPATLLPLPEEGLQHDCLDILAEAHGTRSDLMDQPLPDADHTWYTDGSSFLQEGQRKAGAAVTTETEVIWARALPAGTSAQRAELIALTQALKMAEGKKLNVYTDSRYAFATAHIHGEIYRRRGWLTSEGKEIKNKDEILALLKALFLPKRLSIIHCPGHQKGNSAEARGNRMADQAAREVATRETPETSTLLAGKRTADGSEFEKRTADGSEFESPKKKAKVE

SEQ ID NO: 6619 - protein, 2089 aa, synthetic construct
MPAAKRVKLDGGDKKYSIGLDIGTNSVGWAVITDEYKVPSKKFKVLGNTDRHSIKKNLIGALLFDSGETAEATRLKRTARRRYTRRKNRICYLQEIFSNEMAKVDDSFFHRLEESFLVEEDKKHERHPIFGNIVDEVAYHEKYPTIYHLRKKLVDSTDKADLRLIYLALAHMIKFRGHFLIEGDLNPDNSDVDKLFIQLVQTYNQLFEENPINASGVDAKAILSARLSKSRRLENLIAQLPGEKKNGLFGNLIALSLGLTPNFKSNFDLAEDAKLQLSKDTYDDDLDNLLAQIGDQYADLFLAAKNLSDAILLSDILRVNTEITKAPLSASMIKRYDEHHQDLTLLKALVRQQLPEKYKEIFFDQSKNGYAGYIDGGASQEEFYKFIKPILEKMDGTEELLVKLNREDLLRKQRTFDNGSIPHQIHLGELHAILRRQEDFYPFLKDNREKIEKILTFRIPYYVGPLARGNSRFAWMTRKSEETITPWNFEEVVDKGASAQSFIERMTNFDKNLPNEKVLPKHSLLYEYFTVYNELTKVKYVTEGMRKPAFLSGEQKKAIVDLLFKTNRKVTVKQLKEDYFKKIECFDSVEISGVEDRFNASLGTYHDLLKIIKDKDFLDNEENEDILEDIVLTLTLFEDREMIEERLKTYAHLFDDKVMKQLKRRRYTGWGRLSRKLINGIRDKQSGKTILDFLKSDGFANRNFMQLIHDDSLTFKEDIQKAQVSGQGDSLHEHIANLAGSPAIKKGILQTVKVVDELVKVMGRHKPENIVIEMARENQTTQKGQKNSRERMKRIEEGIKELGSQILKEHPVENTQLQNEKLYLYYLQNGRDMYVDQELDINRLSDYDVDHIVPQSFLKDDSIDNKVLTRSDKARGKSDNVPSEEVVKKMKNYWRQLLNAKLITQRKFDNLTKAERGGLSELDKAGFIKRQLVETRQITKHVAQILDSRMNTKYDENDKLIREVKVITLKSKLVSDFRKDFQFYKVREINNYHHAHDAYLNAVVGTALIKKYPKLESEFVYGDYKVYDVRKMIAKSEQEIGKATAKYFFYSNIMNFFKTEITLANGEIRKRPLIETNGETGEIVWDKGRDFATVRKVLSMPQVNIVKKTEVQTGGFSKESILPKRNSDKLIARKKDWDPKKYGGFDSPTVAYSVLVVAKVEKGKSKKLKSVKELLGITIMERSSFEKNPIDFLEAKGYKEVKKDLIIKLPKYSLFELENGRKRMLASAGELQKGNELALPSKYVNFLYLASHYEKLKGSPEDNEQKQLFVEQHKHYLDEIIEQISEFSKRVILADANLDKVLSAYNKHRDKPIREQAENIIHLFTLTNLGAPAAFKYFDTTIDRKRYTSTKEVLDATLIHQSITGLYETRIDLSQLGGDGGGSSGGSGGVLNLEEEYRLHEKPVPSSIDPSWLQLFPTVWAERAGMGLANQVPPVVVELRSGASPVAVRQYPMSKEAREGIRPHIQRFLDLGVLVPCQSPWNTPLLPVKKPGTNDYRPVQDLREINKRVQDIHPTVPNPYNLLSSLPPSHTWYSVLDLKDAFFCLKLHPNSQPLFAFEWRDPEKGNTGQLTWTRLPQGFKNSPTLFNEALHRDLAPFRALNPQVVLLQYVDDLLVAAPTYRDCKEGTQKLLQELSKLGYRVSAKKAQLCQKEVTYLGYLLKEGKRWLTPARKATVMKIPPPTTPRQVREFLGTAGFCRLWIPGFASLAAPLYPLTKPSIPFIWTEEHQKAFDRIKEALLSAPALALPDLTKPFTLYVDERAGVARGVLTQTLGPWRRPVAYLSKKLDPVASGWPTCLKAVAAVALLLKDADKLTLGQNVTVIASHSLESIVRQPPDRWMTNARMTHYQSLLLNERVSFAPPAVLNPATLLPVESEATPVHRCSEILAEETGTRRDLKDQPLPGVPAWYTDGSSFIAEGKRRAGAAIVDGKRTVWASSLPEGTSAQKAELVALTQALRLAEGKDINIYTDSRYAFATAHIHGAIYKQRGWLTSAGKDIKNKEEILALLEAIHLPKRVAIIHCPGHQKGNDPVATGNRRADEAAKQAALSTRVLAETTKPAGKRTADGSEFEKRTADGSEFESPKKKAKVE

SEQ ID NO: 6620 - protein, 2091 aa, synthetic construct
MPAAKRVKLDGGDKKYSIGLDIGTNSVGWAVITDEYKVPSKKFKVLGNTDRHSIKKNLIGALLFDSGETAEATRLKRTARRRYTRRKNRICYLQEIFSNEMAKVDDSFFHRLEESFLVEEDKKHERHPIFGNIVDEVAYHEKYPTIYHLRKKLVDSTDKADLRLIYLALAHMIKFRGHFLIEGDLNPDNSDVDKLFIQLVQTYNQLFEENPINASGVDAKAILSARLSKSRRLENLIAQLPGEKKNGLFGNLIALSLGLTPNFKSNFDLAEDAKLQLSKDTYDDDLDNLLAQIGDQYADLFLAAKNLSDAILLSDILRVNTEITKAPLSASMIKRYDEHHQDLTLLKALVRQQLPEKYKEIFFDQSKNGYAGYIDGGASQEEFYKFIKPILEKMDGTEELLVKLNREDLLRKQRTFDNGSIPHQIHLGELHAILRRQEDFYPFLKDNREKIEKILTFRIPYYVGPLARGNSRFAWMTRKSEETITPWNFEEVVDKGASAQSFIERMTNFDKNLPNEKVLPKHSLLYEYFTVYNELTKVKYVTEGMRKPAFLSGEQKKAIVDLLFKTNRKVTVKQLKEDYFKKIECFDSVEISGVEDRFNASLGTYHDLLKIIKDKDFLDNEENEDILEDIVLTLTLFEDREMIEERLKTYAHLFDDKVMKQLKRRRYTGWGRLSRKLINGIRDKQSGKTILDFLKSDGFANRNFMQLIHDDSLTFKEDIQKAQVSGQGDSLHEHIANLAGSPAIKKGILQTVKVVDELVKVMGRHKPENIVIEMARENQTTQKGQKNSRERMKRIEEGIKELGSQILKEHPVENTQLQNEKLYLYYLQNGRDMYVDQELDINRLSDYDVDHIVPQSFLKDDSIDNKVLTRSDKARGKSDNVPSEEVVKKMKNYWRQLLNAKLITQRKFDNLTKAERGGLSELDKAGFIKRQLVETRQITKHVAQILDSRMNTKYDENDKLIREVKVITLKSKLVSDFRKDFQFYKVREINNYHHAHDAYLNAVVGTALIKKYPKLESEFVYGDYKVYDVRKMIAKSEQEIGKATAKYFFYSNIMNFFKTEITLANGEIRKRPLIETNGETGEIVWDKGRDFATVRKVLSMPQVNIVKKTEVQTGGFSKESILPKRNSDKLIARKKDWDPKKYGGFDSPTVAYSVLVVAKVEKGKSKKLKSVKELLGITIMERSSFEKNPIDFLEAKGYKEVKKDLIIKLPKYSLFELENGRKRMLASAGELQKGNELALPSKYVNFLYLASHYEKLKGSPEDNEQKQLFVEQHKHYLDEIIEQISEFSKRVILADANLDKVLSAYNKHRDKPIREQAENIIHLFTLTNLGAPAAFKYFDTTIDRKRYTSTKEVLDATLIHQSITGLYETRIDLSQLGGDGGGSSGGSGGTLNIEDEYRLHETSKEPDVPLGSTWLSDFPQAWAETGGMGLAVRQAPLIIPLKATSTPVSIKQYPMSQEARLGIKPHIQRLLDQGILVPCQSPWNTPLLPVKKPGTNDYRPVQDLREVNKRVEDIHPTVPNPYNLLSGLPPSHQWYTVLDLKDAFFCLRLHPTSQPLFAFEWRDPEMGISGQLTWTRLPQGFKNSPTLFNEALHRDLADFRIQHPDLILLQYVDDLLLAATSEQDCQRGTRALLQTLGNLGYRASAKKAQICQKQVKYLGYLLKEGQRWLTEARKETVMGQPTPKTPRQLREFLGTAGFCRLWIPGFAEMAAPLYPLTKPGTLFNWGPDQQKAYQEIKQALLTAPALGLPDLTKPFELFVDEKQGYAKGVLTQKLGPWRRPVAYLSKKLDPVAAGWPPCLRMVAAIAVLTKDAGKLTMGQPLVILAPHAVEALVKQPPDRWLSNARMTHYQAMLLDTDRVQFGPVVALNPATLLPLPEKEAPHDCLEILAETHGTRPDLTDQPIPDADYTWYTDGSSFLQEGQRRAGAAVTTETEVIWARALPAGTSAQRAELIALTQALKMAEGKKLNVYTDSRYAFATAHVHGEIYRRRGWLTSEGREIKNKNEILALLKALFLPKRLSIIHCPGHQKGNSAEARGNRMADQAAREAAMKAVLETSTLLAGKRTADGSEFEKRTADGSEFESPKKKAKVE

SEQ ID NO: 6621 - protein, 2095 aa, synthetic construct
MPAAKRVKLDGGDKKYSIGLDIGTNSVGWAVITDEYKVPSKKFKVLGNTDRHSIKKNLIGALLFDSGETAEATRLKRTARRRYTRRKNRICYLQEIFSNEMAKVDDSFFHRLEESFLVEEDKKHERHPIFGNIVDEVAYHEKYPTIYHLRKKLVDSTDKADLRLIYLALAHMIKFRGHFLIEGDLNPDNSDVDKLFIQLVQTYNQLFEENPINASGVDAKAILSARLSKSRRLENLIAQLPGEKKNGLFGNLIALSLGLTPNFKSNFDLAEDAKLQLSKDTYDDDLDNLLAQIGDQYADLFLAAKNLSDAILLSDILRVNTEITKAPLSASMIKRYDEHHQDLTLLKALVRQQLPEKYKEIFFDQSKNGYAGYIDGGASQEEFYKFIKPILEKMDGTEELLVKLNREDLLRKQRTFDNGSIPHQIHLGELHAILRRQEDFYPFLKDNREKIEKILTFRIPYYVGPLARGNSRFAWMTRKSEETITPWNFEEVVDKGASAQSFIERMTNFDKNLPNEKVLPKHSLLYEYFTVYNELTKVKYVTEGMRKPAFLSGEQKKAIVDLLFKTNRKVTVKQLKEDYFKKIECFDSVEISGVEDRFNASLGTYHDLLKIIKDKDFLDNEENEDILEDIVLTLTLFEDREMIEERLKTYAHLFDDKVMKQLKRRRYTGWGRLSRKLINGIRDKQSGKTILDFLKSDGFANRNFMQLIHDDSLTFKEDIQKAQVSGQGDSLHEHIANLAGSPAIKKGILQTVKVVDELVKVMGRHKPENIVIEMARENQTTQKGQKNSRERMKRIEEGIKELGSQILKEHPVENTQLQNEKLYLYYLQNGRDMYVDQELDINRLSDYDVDHIVPQSFLKDDSIDNKVLTRSDKARGKSDNVPSEEVVKKMKNYWRQLLNAKLITQRKFDNLTKAERGGLSELDKAGFIKRQLVETRQITKHVAQILDSRMNTKYDENDKLIREVKVITLKSKLVSDFRKDFQFYKVREINNYHHAHDAYLNAVVGTALIKKYPKLESEFVYGDYKVYDVRKMIAKSEQEIGKATAKYFFYSNIMNFFKTEITLANGEIRKRPLIETNGETGEIVWDKGRDFATVRKVLSMPQVNIVKKTEVQTGGFSKESILPKRNSDKLIARKKDWDPKKYGGFDSPTVAYSVLVVAKVEKGKSKKLKSVKELLGITIMERSSFEKNPIDFLEAKGYKEVKKDLIIKLPKYSLFELENGRKRMLASAGELQKGNELALPSKYVNFLYLASHYEKLKGSPEDNEQKQLFVEQHKHYLDEIIEQISEFSKRVILADANLDKVLSAYNKHRDKPIREQAENIIHLFTLTNLGAPAAFKYFDTTIDRKRYTSTKEVLDATLIHQSITGLYETRIDLSQLGGDGGGGSEAAAKGGTAPLEEEYRLFLEAPIQNVTLLEQWKREIPKVWAEINPPGLASTQAPIHVQLLSTALPVRVRQYPITLEAKRSLRETIRKFRAAGILRPVHSPWNTPLLPVRKSGTSEYRMVQDLREVNKRVETIHPTVPNPYTLLSLLPPDRIWYSVLDLKDAFFCIPLAPESQLIFAFEWADAEEGESGQLTWTRLPQGFKNSPTLFNEALNRDLQGFRLDHPSVSLLQYVDDLLIAADTQAACLSATRDLLMTLAELGYRVSGKKAQLCQEEVTYLGFKIHKGSRSLSNSRTQAILQIPVPKTKRQVREFLGTIGYCRLWIPGFAELAQPLYAATRPGNDPLVWGEKEEEAFQSLKLALTQPPALALPSLDKPFQLFVEETSGAAKGVLTQALGPWKRPVAYLSKRLDPVAAGWPRCLRAIAAAALLTREASKLTFGQDIEITSSHNLESLLRSPPDKWLTNARITQYQVLLLDPPRVRFKQTAALNPATLLPETDDTLPIHHCLDTLDSLTSTRPDLTDQPLAQAEATLFTDGSSYIRDGKRYAGAAVVTLDSVIWAEPLPIGTSAQKAELIALTKALEWSKDKSVNIYTDSRYAFATLHVHGMIYRERGWLTAGGKAIKNAPEILALLTAVWLPKRVAVMHCKGHQKDDAPTSTGNRRADEVAREVAIRPLSTQATISAGKRTADGSEFEKRTADGSEFESPKKKAKVE

SEQ ID NO: 6622 - protein, 2095 aa, synthetic construct
MPAAKRVKLDGGDKKYSIGLDIGTNSVGWAVITDEYKVPSKKFKVLGNTDRHSIKKNLIGALLFDSGETAEATRLKRTARRRYTRRKNRICYLQEIFSNEMAKVDDSFFHRLEESFLVEEDKKHERHPIFGNIVDEVAYHEKYPTIYHLRKKLVDSTDKADLRLIYLALAHMIKFRGHFLIEGDLNPDNSDVDKLFIQLVQTYNQLFEENPINASGVDAKAILSARLSKSRRLENLIAQLPGEKKNGLFGNLIALSLGLTPNFKSNFDLAEDAKLQLSKDTYDDDLDNLLAQIGDQYADLFLAAKNLSDAILLSDILRVNTEITKAPLSASMIKRYDEHHQDLTLLKALVRQQLPEKYKEIFFDQSKNGYAGYIDGGASQEEFYKFIKPILEKMDGTEELLVKLNREDLLRKQRTFDNGSIPHQIHLGELHAILRRQEDFYPFLKDNREKIEKILTFRIPYYVGPLARGNSRFAWMTRKSEETITPWNFEEVVDKGASAQSFIERMTNFDKNLPNEKVLPKHSLLYEYFTVYNELTKVKYVTEGMRKPAFLSGEQKKAIVDLLFKTNRKVTVKQLKEDYFKKIECFDSVEISGVEDRFNASLGTYHDLLKIIKDKDFLDNEENEDILEDIVLTLTLFEDREMIEERLKTYAHLFDDKVMKQLKRRRYTGWGRLSRKLINGIRDKQSGKTILDFLKSDGFANRNFMQLIHDDSLTFKEDIQKAQVSGQGDSLHEHIANLAGSPAIKKGILQTVKVVDELVKVMGRHKPENIVIEMARENQTTQKGQKNSRERMKRIEEGIKELGSQILKEHPVENTQLQNEKLYLYYLQNGRDMYVDQELDINRLSDYDVDHIVPQSFLKDDSIDNKVLTRSDKARGKSDNVPSEEVVKKMKNYWRQLLNAKLITQRKFDNLTKAERGGLSELDKAGFIKRQLVETRQITKHVAQILDSRMNTKYDENDKLIREVKVITLKSKLVSDFRKDFQFYKVREINNYHHAHDAYLNAVVGTALIKKYPKLESEFVYGDYKVYDVRKMIAKSEQEIGKATAKYFFYSNIMNFFKTEITLANGEIRKRPLIETNGETGEIVWDKGRDFATVRKVLSMPQVNIVKKTEVQTGGFSKESILPKRNSDKLIARKKDWDPKKYGGFDSPTVAYSVLVVAKVEKGKSKKLKSVKELLGITIMERSSFEKNPIDFLEAKGYKEVKKDLIIKLPKYSLFELENGRKRMLASAGELQKGNELALPSKYVNFLYLASHYEKLKGSPEDNEQKQLFVEQHKHYLDEIIEQISEFSKRVILADANLDKVLSAYNKHRDKPIREQAENIIHLFTLTNLGAPAAFKYFDTTIDRKRYTSTKEVLDATLIHQSITGLYETRIDLSQLGGDGGGGSEAAAKGGTAPLEEEYRLFLEAPIQNVTLLEQWKREIPKVWAEINPPGLASTQAPIHVQLLSTALPVRVRQYPITLEAKRSLRETIRKFRAAGILRPVHSPWNTPLLPVRKSGTSEYRMVQDLREVNKRVETIHPTVPNPYTLLSLLPPDRIWYSVLDLKDAFFCIPLAPESQLIFAFEWADAEEGESGQLTWTRLPQGFKNSPTLFNEALNRDLQGFRLDHPSVSLLQYVDDLLIAADTQAACLSATRDLLMTLAELGYRVSGKKAQLCQEEVTYLGFKIHKGSRSLSNSRTQAILQIPVPKTKRQVREFLGKIGYCRLFIPGFAELAQPLYAATRPGNDPLVWGEKEEEAFQSLKLALTQPPALALPSLDKPFQLFVEETSGAAKGVLTQALGPWKRPVAYLSKRLDPVAAGWPRCLRAIAAAALLTREASKLTFGQDIEITSSHNLESLLRSPPDKWLTNARITQYQVLLLDPPRVRFKQTAALNPATLLPETDDTLPIHHCLDTLDSLTSTRPDLTDQPLAQAEATLFTDGSSYIRDGKRYAGAAVVTLDSVIWAEPLPIGTSAQKAELIALTKALEWSKDKSVNIYTDSRYAFATLHVHGMIYRERGWLTAGGKAIKNAPEILALLTAVWLPKRVAVMHCKGHQKDDAPTSTGNRRADEVAREVAIRPLSTQATISAGKRTADGSEFEKRTADGSEFESPKKKAKVE

SEQ ID NO: 6623 - protein, 2092 aa, synthetic construct
MPAAKRVKLDGGDKKYSIGLDIGTNSVGWAVITDEYKVPSKKFKVLGNTDRHSIKKNLIGALLFDSGETAEATRLKRTARRRYTRRKNRICYLQEIFSNEMAKVDDSFFHRLEESFLVEEDKKHERHPIFGNIVDEVAYHEKYPTIYHLRKKLVDSTDKADLRLIYLALAHMIKFRGHFLIEGDLNPDNSDVDKLFIQLVQTYNQLFEENPINASGVDAKAILSARLSKSRRLENLIAQLPGEKKNGLFGNLIALSLGLTPNFKSNFDLAEDAKLQLSKDTYDDDLDNLLAQIGDQYADLFLAAKNLSDAILLSDILRVNTEITKAPLSASMIKRYDEHHQDLTLLKALVRQQLPEKYKEIFFDQSKNGYAGYIDGGASQEEFYKFIKPILEKMDGTEELLVKLNREDLLRKQRTFDNGSIPHQIHLGELHAILRRQEDFYPFLKDNREKIEKILTFRIPYYVGPLARGNSRFAWMTRKSEETITPWNFEEVVDKGASAQSFIERMTNFDKNLPNEKVLPKHSLLYEYFTVYNELTKVKYVTEGMRKPAFLSGEQKKAIVDLLFKTNRKVTVKQLKEDYFKKIECFDSVEISGVEDRFNASLGTYHDLLKIIKDKDFLDNEENEDILEDIVLTLTLFEDREMIEERLKTYAHLFDDKVMKQLKRRRYTGWGRLSRKLINGIRDKQSGKTILDFLKSDGFANRNFMQLIHDDSLTFKEDIQKAQVSGQGDSLHEHIANLAGSPAIKKGILQTVKVVDELVKVMGRHKPENIVIEMARENQTTQKGQKNSRERMKRIEEGIKELGSQILKEHPVENTQLQNEKLYLYYLQNGRDMYVDQELDINRLSDYDVDHIVPQSFLKDDSIDNKVLTRSDKARGKSDNVPSEEVVKKMKNYWRQLLNAKLITQRKFDNLTKAERGGLSELDKAGFIKRQLVETRQITKHVAQILDSRMNTKYDENDKLIREVKVITLKSKLVSDFRKDFQFYKVREINNYHHAHDAYLNAVVGTALIKKYPKLESEFVYGDYKVYDVRKMIAKSEQEIGKATAKYFFYSNIMNFFKTEITLANGEIRKRPLIETNGETGEIVWDKGRDFATVRKVLSMPQVNIVKKTEVQTGGFSKESILPKRNSDKLIARKKDWDPKKYGGFDSPTVAYSVLVVAKVEKGKSKKLKSVKELLGITIMERSSFEKNPIDFLEAKGYKEVKKDLIIKLPKYSLFELENGRKRMLASAGELQKGNELALPSKYVNFLYLASHYEKLKGSPEDNEQKQLFVEQHKHYLDEIIEQISEFSKRVILADANLDKVLSAYNKHRDKPIREQAENIIHLFTLTNLGAPAAFKYFDTTIDRKRYTSTKEVLDATLIHQSITGLYETRIDLSQLGGDGGGGSEAAAKGGTLQLEEEYRLFEPESTQKQEMDIWLKNFPQAWAETGGMGTAHCQAPVLIQLKATATPISIRQYPMPHEAYQGIKPHIRRMLDQGILKPCQSPWNTPLLPVKKPGTEDYRPVQDLREVNKRVEDIHPTVPNPYNLLSTLPPSHPWYTVLDLKDAFFCLRLHSESQLLFAFEWRDPEIGLSGQLTWTRLPQGFKNSPTLFNEALHSDLADFRVRYPALVLLQYVDDLLLAAATRTECLEGTKALLETLGNKGYRASAKKAQICLQEVTYLGYSLKDGQRWLTKARKEAILSIPVPKNSRQVREFLGTAGYCRLWIPGFAELAAPLYPLTRPGTLFQWGTEQQLAFEDIKKALLSSPALGLPDITKPFELFIDENSGFAKGVLVQKLGPWKRPVAYLSKKLDTVASGWPPCLRMVAAIAILVKDAGKLTLGQPLTILTSHPVEALVRQPPNKWLSNARMTHYQAMLLDAERVHFGPTVSLNPATLLPLPSGGNHHDCLQILAETHGTRPDLTDQPLPDADLTWYTDGSSFIRNGEREAGAAVTTESEVIWAAPLPPGTSAQRAELIALTQALKMAEGKKLTVYTDSRYAFATTHVHGEIYRRRGWLTSEGKEIKNKNEILALLEALFLPKRLSIIHCPGHQKGDSPQAKGNRLADDTAKKAATETHSSLTVLPAGKRTADGSEFEKRTADGSEFESPKKKAKVE

SEQ ID NO: 6624 - protein, 2124 aa, synthetic construct
MPAAKRVKLDGGDKKYSIGLDIGTNSVGWAVITDEYKVPSKKFKVLGNTDRHSIKKNLIGALLFDSGETAEATRLKRTARRRYTRRKNRICYLQEIFSNEMAKVDDSFFHRLEESFLVEEDKKHERHPIFGNIVDEVAYHEKYPTIYHLRKKLVDSTDKADLRLIYLALAHMIKFRGHFLIEGDLNPDNSDVDKLFIQLVQTYNQLFEENPINASGVDAKAILSARLSKSRRLENLIAQLPGEKKNGLFGNLIALSLGLTPNFKSNFDLAEDAKLQLSKDTYDDDLDNLLAQIGDQYADLFLAAKNLSDAILLSDILRVNTEITKAPLSASMIKRYDEHHQDLTLLKALVRQQLPEKYKEIFFDQSKNGYAGYIDGGASQEEFYKFIKPILEKMDGTEELLVKLNREDLLRKQRTFDNGSIPHQIHLGELHAILRRQEDFYPFLKDNREKIEKILTFRIPYYVGPLARGNSRFAWMTRKSEETITPWNFEEVVDKGASAQSFIERMTNFDKNLPNEKVLPKHSLLYEYFTVYNELTKVKYVTEGMRKPAFLSGEQKKAIVDLLFKTNRKVTVKQLKEDYFKKIECFDSVEISGVEDRFNASLGTYHDLLKIIKDKDFLDNEENEDILEDIVLTLTLFEDREMIEERLKTYAHLFDDKVMKQLKRRRYTGWGRLSRKLINGIRDKQSGKTILDFLKSDGFANRNFMQLIHDDSLTFKEDIQKAQVSGQGDSLHEHIANLAGSPAIKKGILQTVKVVDELVKVMGRHKPENIVIEMARENQTTQKGQKNSRERMKRIEEGIKELGSQILKEHPVENTQLQNEKLYLYYLQNGRDMYVDQELDINRLSDYDVDHIVPQSFLKDDSIDNKVLTRSDKARGKSDNVPSEEVVKKMKNYWRQLLNAKLITQRKFDNLTKAERGGLSELDKAGFIKRQLVETRQITKHVAQILDSRMNTKYDENDKLIREVKVITLKSKLVSDFRKDFQFYKVREINNYHHAHDAYLNAVVGTALIKKYPKLESEFVYGDYKVYDVRKMIAKSEQEIGKATAKYFFYSNIMNFFKTEITLANGEIRKRPLIETNGETGEIVWDKGRDFATVRKVLSMPQVNIVKKTEVQTGGFSKESILPKRNSDKLIARKKDWDPKKYGGFDSPTVAYSVLVVAKVEKGKSKKLKSVKELLGITIMERSSFEKNPIDFLEAKGYKEVKKDLIIKLPKYSLFELENGRKRMLASAGELQKGNELALPSKYVNFLYLASHYEKLKGSPEDNEQKQLFVEQHKHYLDEIIEQISEFSKRVILADANLDKVLSAYNKHRDKPIREQAENIIHLFTLTNLGAPAAFKYFDTTIDRKRYTSTKEVLDATLIHQSITGLYETRIDLSQLGGDGGGGSEAAAKGGLLGRDLLTKLKAQIQFSTEGPQVTWEDRPAMCLVLNLEEEYRLHEKPVPPSIDPSWLQLFPMVWAEKAGMGLANQVPPVVVELKSDASPVAVRQYPMSKEAREGIRPHIQRFLDLGILVPCQSPWNTPLLPVKKPGTNDYRPVQDLREVNKRVQDIHPTVPNPYNLLSSLPPSHTWYSVLDLKDAFFCLKLHPNSQPLFAFEWRDPEKGNTGQLTWTRLPQGFKNSPTLFNEALHRDLASFRALNPQVVMLQYVDDLLVAAPTYRDCKEGTRRLLQELSKLGYRVSAKKAQLCREEVTYLGYLLKGGKRWLTPARKATVMKIPTPTTPRQVREFLGTAGFCRLWIPGFASLAAPLYPLTRPKVPFTWTEAHQEAFGRIKEALLSAPALALPDLTKPFALYVDEKEGVARGVLTQTLGPWRRPVAYLSKKLDPVASGWPTCLKAIAAVALLLKDADKLTLGQNVLVIAPHNLESIVRQPPDRWMTNARMTHYQSLLLNERVSFAPPAILNPATLLPVESDDTPIHICSEILAEETGTRPDLRDQPLPGVPAWYTDGSSFIMDGRRQAGAAIVDNKRTVWASNLPEGTSAQKAELIALTQALRLAEGKSINIYTDSRYAFATAHVHGAIYKQRGWLTSAGKDIKNKEEILALLEAIHLPKRVAIIHCPGHQRGTDPVATGNRKADEAAKQAAQSTRILTETTKNAGKRTADGSEFEKRTADGSEFESPKKKAKVE

SEQ ID NO: 6625 - protein, 2215 aa, synthetic construct
MPAAKRVKLDGGDKKYSIGLDIGTNSVGWAVITDEYKVPSKKFKVLGNTDRHSIKKNLIGALLFDSGETAEATRLKRTARRRYTRRKNRICYLQEIFSNEMAKVDDSFFHRLEESFLVEEDKKHERHPIFGNIVDEVAYHEKYPTIYHLRKKLVDSTDKADLRLIYLALAHMIKFRGHFLIEGDLNPDNSDVDKLFIQLVQTYNQLFEENPINASGVDAKAILSARLSKSRRLENLIAQLPGEKKNGLFGNLIALSLGLTPNFKSNFDLAEDAKLQLSKDTYDDDLDNLLAQIGDQYADLFLAAKNLSDAILLSDILRVNTEITKAPLSASMIKRYDEHHQDLTLLKALVRQQLPEKYKEIFFDQSKNGYAGYIDGGASQEEFYKFIKPILEKMDGTEELLVKLNREDLLRKQRTFDNGSIPHQIHLGELHAILRRQEDFYPFLKDNREKIEKILTFRIPYYVGPLARGNSRFAWMTRKSEETITPWNFEEVVDKGASAQSFIERMTNFDKNLPNEKVLPKHSLLYEYFTVYNELTKVKYVTEGMRKPAFLSGEQKKAIVDLLFKTNRKVTVKQLKEDYFKKIECFDSVEISGVEDRFNASLGTYHDLLKIIKDKDFLDNEENEDILEDIVLTLTLFEDREMIEERLKTYAHLFDDKVMKQLKRRRYTGWGRLSRKLINGIRDKQSGKTILDFLKSDGFANRNFMQLIHDDSLTFKEDIQKAQVSGQGDSLHEHIANLAGSPAIKKGILQTVKVVDELVKVMGRHKPENIVIEMARENQTTQKGQKNSRERMKRIEEGIKELGSQILKEHPVENTQLQNEKLYLYYLQNGRDMYVDQELDINRLSDYDVDHIVPQSFLKDDSIDNKVLTRSDKARGKSDNVPSEEVVKKMKNYWRQLLNAKLITQRKFDNLTKAERGGLSELDKAGFIKRQLVETRQITKHVAQILDSRMNTKYDENDKLIREVKVITLKSKLVSDFRKDFQFYKVREINNYHHAHDAYLNAVVGTALIKKYPKLESEFVYGDYKVYDVRKMIAKSEQEIGKATAKYFFYSNIMNFFKTEITLANGEIRKRPLIETNGETGEIVWDKGRDFATVRKVLSMPQVNIVKKTEVQTGGFSKESILPKRNSDKLIARKKDWDPKKYGGFDSPTVAYSVLVVAKVEKGKSKKLKSVKELLGITIMERSSFEKNPIDFLEAKGYKEVKKDLIIKLPKYSLFELENGRKRMLASAGELQKGNELALPSKYVNFLYLASHYEKLKGSPEDNEQKQLFVEQHKHYLDEIIEQISEFSKRVILADANLDKVLSAYNKHRDKPIREQAENIIHLFTLTNLGAPAAFKYFDTTIDRKRYTSTKEVLDATLIHQSITGLYETRIDLSQLGGDGGGGSEAAAKGGTLGDQGSRGSDPLPEPRVTLTVEGIPTEFLVNTGAEHSVLTKPMGKMGSKRTVVAGATGSKVYPWTTKRLLKIGQKQVTHSFLVIPECPAPLLGRDLLTKLKAQIQFSTEGPQVTWEDRPAMCLVLNLEEEYRLHEKPVPPSIDPSWLQLFPMVWAEKAGMGLANQVPPVVVELKSDASPVAVRQYPMSKEAREGIRPHIQRFLDLGILVPCQSPWNTPLLPVKKPGTNDYRPVQDLREVNKRVQDIHPTVPNPYNLLSSLPPSHTWYSVLDLKDAFFCLKLHPNSQPLFAFEWRDPEKGNTGQLTWTRLPQGFKNSPTLFNEALHRDLASFRALNPQVVMLQYVDDLLVAAPTYRDCKEGTRRLLQELSKLGYRVSAKKAQLCREEVTYLGYLLKGGKRWLTPARKATVMKIPTPTTPRQVREFLGTAGFCRLWIPGFASLAAPLYPLTRPKVPFTWTEAHQEAFGRIKEALLSAPALALPDLTKPFALYVDEKEGVARGVLTQTLGPWRRPVAYLSKKLDPVASGWPTCLKAIAAVALLLKDADKLTLGQNVLVIAPHNLESIVRQPPDRWMTNARMTHYQSLLLNERVSFAPPAILNPATLLPVESDDTPIHICSEILAEETGTRPDLRDQPLPGVPAWYTDGSSFIMDGRRQAGAAIVDNKRTVWASNLPEGTSAQKAELIALTQALRLAEGKSINIYTDSRYAFATAHVHGAIYKQRGWLTSAGKDIKNKEEILALLEAIHLPKRVAIIHCPGHQRGTDPVATGNRKADEAAKQAAQSTRILTETTKNAGKRTADGSEFEKRTADGSEFESPKKKAKVE

SEQ ID NO: 6626 - protein, 2093 aa, synthetic construct
MPAAKRVKLDGGDKKYSIGLDIGTNSVGWAVITDEYKVPSKKFKVLGNTDRHSIKKNLIGALLFDSGETAEATRLKRTARRRYTRRKNRICYLQEIFSNEMAKVDDSFFHRLEESFLVEEDKKHERHPIFGNIVDEVAYHEKYPTIYHLRKKLVDSTDKADLRLIYLALAHMIKFRGHFLIEGDLNPDNSDVDKLFIQLVQTYNQLFEENPINASGVDAKAILSARLSKSRRLENLIAQLPGEKKNGLFGNLIALSLGLTPNFKSNFDLAEDAKLQLSKDTYDDDLDNLLAQIGDQYADLFLAAKNLSDAILLSDILRVNTEITKAPLSASMIKRYDEHHQDLTLLKALVRQQLPEKYKEIFFDQSKNGYAGYIDGGASQEEFYKFIKPILEKMDGTEELLVKLNREDLLRKQRTFDNGSIPHQIHLGELHAILRRQEDFYPFLKDNREKIEKILTFRIPYYVGPLARGNSRFAWMTRKSEETITPWNFEEVVDKGASAQSFIERMTNFDKNLPNEKVLPKHSLLYEYFTVYNELTKVKYVTEGMRKPAFLSGEQKKAIVDLLFKTNRKVTVKQLKEDYFKKIECFDSVEISGVEDRFNASLGTYHDLLKIIKDKDFLDNEENEDILEDIVLTLTLFEDREMIEERLKTYAHLFDDKVMKQLKRRRYTGWGRLSRKLINGIRDKQSGKTILDFLKSDGFANRNFMQLIHDDSLTFKEDIQKAQVSGQGDSLHEHIANLAGSPAIKKGILQTVKVVDELVKVMGRHKPENIVIEMARENQTTQKGQKNSRERMKRIEEGIKELGSQILKEHPVENTQLQNEKLYLYYLQNGRDMYVDQELDINRLSDYDVDHIVPQSFLKDDSIDNKVLTRSDKARGKSDNVPSEEVVKKMKNYWRQLLNAKLITQRKFDNLTKAERGGLSELDKAGFIKRQLVETRQITKHVAQILDSRMNTKYDENDKLIREVKVITLKSKLVSDFRKDFQFYKVREINNYHHAHDAYLNAVVGTALIKKYPKLESEFVYGDYKVYDVRKMIAKSEQEIGKATAKYFFYSNIMNFFKTEITLANGEIRKRPLIETNGETGEIVWDKGRDFATVRKVLSMPQVNIVKKTEVQTGGFSKESILPKRNSDKLIARKKDWDPKKYGGFDSPTVAYSVLVVAKVEKGKSKKLKSVKELLGITIMERSSFEKNPIDFLEAKGYKEVKKDLIIKLPKYSLFELENGRKRMLASAGELQKGNELALPSKYVNFLYLASHYEKLKGSPEDNEQKQLFVEQHKHYLDEIIEQISEFSKRVILADANLDKVLSAYNKHRDKPIREQAENIIHLFTLTNLGAPAAFKYFDTTIDRKRYTSTKEVLDATLIHQSITGLYETRIDLSQLGGDGGGGSEAAAKGGTLNIEDEYRLHETSKEPDVSLGSTWLSDFPQAWAETGGMGLAVRQAPLIIPLKATSTPVSIKQYPMSQEARLGIKPHIQRLLDQGILVPCQSPWNTPLLPVKKPGTNDYRPVQDLREVNKRVEDIHPTVPNPYNLLSGLPPSHQWYTVLDLKDAFFCLRLHPTSQPLFAFEWRDPEMGISGQLTWTRLPQGFKNSPTLFNEALHRDLAGFRIQHPDLILLQYVDDLLLAATSELDCQQGTRALLQTLGDLGYRASAKKAQICQKQVKYLGYLLKEGQRWLTEARKETVMGQPIPKTPRQLREFLGTAGFCRLWIPGFAEMAAPLYPLTKPGTLFNWGPDQQKAFQEIKQALLTAPALGLPDLTKPFELFVDEKQGYAKGVLTQKLGPWRRPVAYLSKKLDPVAAGWPPCLRMVAAIAVLTKDAGKLTMGQPLVILAPHAVEALVKQPPDRWLSNARMTHYQALLLDTDRVQFGPVVALNPATLLPLPEEGLQHDCLDILAEAHGTRSDLMDQPLPDADHTWYTDGSSFLQEGQRKAGAAVTTETEVIWARALPAGTSAQRAELIALTQALKMAEGKKLNVYTDSRYAFATAHIHGEIYRRRGWLTSEGKEIKNKDEILALLKALFLPKRLSIIHCPGHQKGNSAEARGNRMADQAAREVATRETPETSTLLAGKRTADGSEFEKRTADGSEFESPKKKAKVE

SEQ ID NO: 6627 - protein, 2093 aa, synthetic construct
MPAAKRVKLDGGDKKYSIGLDIGTNSVGWAVITDEYKVPSKKFKVLGNTDRHSIKKNLIGALLFDSGETAEATRLKRTARRRYTRRKNRICYLQEIFSNEMAKVDDSFFHRLEESFLVEEDKKHERHPIFGNIVDEVAYHEKYPTIYHLRKKLVDSTDKADLRLIYLALAHMIKFRGHFLIEGDLNPDNSDVDKLFIQLVQTYNQLFEENPINASGVDAKAILSARLSKSRRLENLIAQLPGEKKNGLFGNLIALSLGLTPNFKSNFDLAEDAKLQLSKDTYDDDLDNLLAQIGDQYADLFLAAKNLSDAILLSDILRVNTEITKAPLSASMIKRYDEHHQDLTLLKALVRQQLPEKYKEIFFDQSKNGYAGYIDGGASQEEFYKFIKPILEKMDGTEELLVKLNREDLLRKQRTFDNGSIPHQIHLGELHAILRRQEDFYPFLKDNREKIEKILTFRIPYYVGPLARGNSRFAWMTRKSEETITPWNFEEVVDKGASAQSFIERMTNFDKNLPNEKVLPKHSLLYEYFTVYNELTKVKYVTEGMRKPAFLSGEQKKAIVDLLFKTNRKVTVKQLKEDYFKKIECFDSVEISGVEDRFNASLGTYHDLLKIIKDKDFLDNEENEDILEDIVLTLTLFEDREMIEERLKTYAHLFDDKVMKQLKRRRYTGWGRLSRKLINGIRDKQSGKTILDFLKSDGFANRNFMQLIHDDSLTFKEDIQKAQVSGQGDSLHEHIANLAGSPAIKKGILQTVKVVDELVKVMGRHKPENIVIEMARENQTTQKGQKNSRERMKRIEEGIKELGSQILKEHPVENTQLQNEKLYLYYLQNGRDMYVDQELDINRLSDYDVDHIVPQSFLKDDSIDNKVLTRSDKARGKSDNVPSEEVVKKMKNYWRQLLNAKLITQRKFDNLTKAERGGLSELDKAGFIKRQLVETRQITKHVAQILDSRMNTKYDENDKLIREVKVITLKSKLVSDFRKDFQFYKVREINNYHHAHDAYLNAVVGTALIKKYPKLESEFVYGDYKVYDVRKMIAKSEQEIGKATAKYFFYSNIMNFFKTEITLANGEIRKRPLIETNGETGEIVWDKGRDFATVRKVLSMPQVNIVKKTEVQTGGFSKESILPKRNSDKLIARKKDWDPKKYGGFDSPTVAYSVLVVAKVEKGKSKKLKSVKELLGITIMERSSFEKNPIDFLEAKGYKEVKKDLIIKLPKYSLFELENGRKRMLASAGELQKGNELALPSKYVNFLYLASHYEKLKGSPEDNEQKQLFVEQHKHYLDEIIEQISEFSKRVILADANLDKVLSAYNKHRDKPIREQAENIIHLFTLTNLGAPAAFKYFDTTIDRKRYTSTKEVLDATLIHQSITGLYETRIDLSQLGGDGGGGSEAAAKGGTLNIEDEYRLHETSKGPDVPLGSTWLSDFPQAWAETGGMGLAVRQAPLIIPLKATSTPVSIKQYPMSQEARLGIKPHIQRLLDQGILVPCQSPWNTPLLPVKKPGTNDYRPVQDLREVNKRVEDIHPTVPNPYNLLSGLPPSHQWYTVLDLKDAFFCLRLHPTSQSLFAFEWRDPEMGISGQLTWTRLPQGFKNSPTLFNEALHRDLADFRIQHPDLILLQYVDDLLLAATSELDCQQGTRALLQTLGDLGYRASAKKAQICQKQVKYLGYLLKEGQRWLTEARKETVMGQPTPKTPRQLREFLGTAGFCRLWIPGFAEMAAPLYPLTKPGTLFEWGPDQQKAYQEIKQALLTAPALGLPDLTKPFELFVDEKQGYAKGVLTQKLGPWRRPVAYLSKKLDPVAAGWPPCLRMVAAIAVLTKDAGKLTMGQPLVILAPHAVEALVKQPPDRWLSNARMTHYQALLLDTDRVQFGPIVALNPATLLPLPEEGLQHDCLDILAEAHGTRPDLTDQPLPDADHTWYTDGSSFLQEGQRKAGAAVTTETEVVWAKALPAGTSAQRAELIALTQALKMAEGKKLNVYTDSRYAFATAHIHGEIYRRRGWLTSEGKEIKNKDEILALLKALFLPKRLSIIHCPGHQKGNRAEARGNRMADQAAREVATRETPETSTLLAGKRTADGSEFEKRTADGSEFESPKKKAKVE

SEQ ID NO: 6628 - protein, 2084 aa, synthetic construct
MPAAKRVKLDGGDKKYSIGLDIGTNSVGWAVITDEYKVPSKKFKVLGNTDRHSIKKNLIGALLFDSGETAEATRLKRTARRRYTRRKNRICYLQEIFSNEMAKVDDSFFHRLEESFLVEEDKKHERHPIFGNIVDEVAYHEKYPTIYHLRKKLVDSTDKADLRLIYLALAHMIKFRGHFLIEGDLNPDNSDVDKLFIQLVQTYNQLFEENPINASGVDAKAILSARLSKSRRLENLIAQLPGEKKNGLFGNLIALSLGLTPNFKSNFDLAEDAKLQLSKDTYDDDLDNLLAQIGDQYADLFLAAKNLSDAILLSDILRVNTEITKAPLSASMIKRYDEHHQDLTLLKALVRQQLPEKYKEIFFDQSKNGYAGYIDGGASQEEFYKFIKPILEKMDGTEELLVKLNREDLLRKQRTFDNGSIPHQIHLGELHAILRRQEDFYPFLKDNREKIEKILTFRIPYYVGPLARGNSRFAWMTRKSEETITPWNFEEVVDKGASAQSFIERMTNFDKNLPNEKVLPKHSLLYEYFTVYNELTKVKYVTEGMRKPAFLSGEQKKAIVDLLFKTNRKVTVKQLKEDYFKKIECFDSVEISGVEDRFNASLGTYHDLLKIIKDKDFLDNEENEDILEDIVLTLTLFEDREMIEERLKTYAHLFDDKVMKQLKRRRYTGWGRLSRKLINGIRDKQSGKTILDFLKSDGFANRNFMQLIHDDSLTFKEDIQKAQVSGQGDSLHEHIANLAGSPAIKKGILQTVKVVDELVKVMGRHKPENIVIEMARENQTTQKGQKNSRERMKRIEEGIKELGSQILKEHPVENTQLQNEKLYLYYLQNGRDMYVDQELDINRLSDYDVDHIVPQSFLKDDSIDNKVLTRSDKARGKSDNVPSEEVVKKMKNYWRQLLNAKLITQRKFDNLTKAERGGLSELDKAGFIKRQLVETRQITKHVAQILDSRMNTKYDENDKLIREVKVITLKSKLVSDFRKDFQFYKVREINNYHHAHDAYLNAVVGTALIKKYPKLESEFVYGDYKVYDVRKMIAKSEQEIGKATAKYFFYSNIMNFFKTEITLANGEIRKRPLIETNGETGEIVWDKGRDFATVRKVLSMPQVNIVKKTEVQTGGFSKESILPKRNSDKLIARKKDWDPKKYGGFDSPTVAYSVLVVAKVEKGKSKKLKSVKELLGITIMERSSFEKNPIDFLEAKGYKEVKKDLIIKLPKYSLFELENGRKRMLASAGELQKGNELALPSKYVNFLYLASHYEKLKGSPEDNEQKQLFVEQHKHYLDEIIEQISEFSKRVILADANLDKVLSAYNKHRDKPIREQAENIIHLFTLTNLGAPAAFKYFDTTIDRKRYTSTKEVLDATLIHQSITGLYETRIDLSQLGGDGGGGSEAAAKGGIPWLMKKPLQLTTLVPLQEYEERLLKQTMLTGSYKEKLQSLFLKYDALWQHWENQVGHRRIKPHHIATGTVNPRPQKQYPINPKAKASIQTVINDLLKQGVLIQQNSIMNTPVYPVPKPDGKWRMVLDYREVNKTIPLIAAQNQHSAGILSSIFRGKYKTTLDLSNGFWAHSITPESYWLTAFTWLGQQYCWTRLPQGFLNSPALFNADVVDLLKEVPNVQVYVDDIYISHDDPREHLEQLEKVFSLLLNAGYVVSLKKSEIAQHEVEFLGFNITKEGRGLTETFKQKLLNITPPRDLKQLQSILGLLNFARNFIPNFSELVKPLYNIIATAPGKYITWTTDNSQQLQNIISMLNSAENLEERNPEVRLIMKVNTSPSAGYIRFYNEFAKRPIMYLNYVYTKAEVKFTNTEKLLTTIHKGLIKALDLGMGQEILVYSPIVSMTKIQKTPLPERKALPIRWITWMSYLEDPRIQFHYDKTLPELQQVPTVTDDIIAKIKHPSEFSMVFYTDGSAIKHPNVNKSHNAGMGIAQVQFKPEFTVINTWSIPLGDHTAQLAEVAAVEFACKKALKIDGPVLIVTDSFYVAESVNKELPYWQSNGFFNNKKKPLKHVSKWKSIADCIQLKPDIIIIHEKGHQPTASTFHTEGNNLADKLATQGSYVVNAGKRTADGSEFEKRTADGSEFESPKKKAKVE

SEQ ID NO: 6629 - protein, 2091 aa, synthetic construct
MPAAKRVKLDGGDKKYSIGLDIGTNSVGWAVITDEYKVPSKKFKVLGNTDRHSIKKNLIGALLFDSGETAEATRLKRTARRRYTRRKNRICYLQEIFSNEMAKVDDSFFHRLEESFLVEEDKKHERHPIFGNIVDEVAYHEKYPTIYHLRKKLVDSTDKADLRLIYLALAHMIKFRGHFLIEGDLNPDNSDVDKLFIQLVQTYNQLFEENPINASGVDAKAILSARLSKSRRLENLIAQLPGEKKNGLFGNLIALSLGLTPNFKSNFDLAEDAKLQLSKDTYDDDLDNLLAQIGDQYADLFLAAKNLSDAILLSDILRVNTEITKAPLSASMIKRYDEHHQDLTLLKALVRQQLPEKYKEIFFDQSKNGYAGYIDGGASQEEFYKFIKPILEKMDGTEELLVKLNREDLLRKQRTFDNGSIPHQIHLGELHAILRRQEDFYPFLKDNREKIEKILTFRIPYYVGPLARGNSRFAWMTRKSEETITPWNFEEVVDKGASAQSFIERMTNFDKNLPNEKVLPKHSLLYEYFTVYNELTKVKYVTEGMRKPAFLSGEQKKAIVDLLFKTNRKVTVKQLKEDYFKKIECFDSVEISGVEDRFNASLGTYHDLLKIIKDKDFLDNEENEDILEDIVLTLTLFEDREMIEERLKTYAHLFDDKVMKQLKRRRYTGWGRLSRKLINGIRDKQSGKTILDFLKSDGFANRNFMQLIHDDSLTFKEDIQKAQVSGQGDSLHEHIANLAGSPAIKKGILQTVKVVDELVKVMGRHKPENIVIEMARENQTTQKGQKNSRERMKRIEEGIKELGSQILKEHPVENTQLQNEKLYLYYLQNGRDMYVDQELDINRLSDYDVDHIVPQSFLKDDSIDNKVLTRSDKARGKSDNVPSEEVVKKMKNYWRQLLNAKLITQRKFDNLTKAERGGLSELDKAGFIKRQLVETRQITKHVAQILDSRMNTKYDENDKLIREVKVITLKSKLVSDFRKDFQFYKVREINNYHHAHDAYLNAVVGTALIKKYPKLESEFVYGDYKVYDVRKMIAKSEQEIGKATAKYFFYSNIMNFFKTEITLANGEIRKRPLIETNGETGEIVWDKGRDFATVRKVLSMPQVNIVKKTEVQTGGFSKESILPKRNSDKLIARKKDWDPKKYGGFDSPTVAYSVLVVAKVEKGKSKKLKSVKELLGITIMERSSFEKNPIDFLEAKGYKEVKKDLIIKLPKYSLFELENGRKRMLASAGELQKGNELALPSKYVNFLYLASHYEKLKGSPEDNEQKQLFVEQHKHYLDEIIEQISEFSKRVILADANLDKVLSAYNKHRDKPIREQAENIIHLFTLTNLGAPAAFKYFDTTIDRKRYTSTKEVLDATLIHQSITGLYETRIDLSQLGGDGGGGSEAAAKGGVLNLEEEYRLHEKPVPSSIDPSWLQLFPTVWAERAGMGLANQVPPVVVELRSGASPVAVRQYPMSKEAREGIRPHIQRFLDLGVLVPCQSPWNTPLLPVKKPGTNDYRPVQDLREINKRVQDIHPTVPNPYNLLSSLPPSHTWYSVLDLKDAFFCLKLHPNSQPLFAFEWRDPEKGNTGQLTWTRLPQGFKNSPTLFNEALHRDLAPFRALNPQVVLLQYVDDLLVAAPTYRDCKEGTQKLLQELSKLGYRVSAKKAQLCQKEVTYLGYLLKEGKRWLTPARKATVMKIPPPTTPRQVREFLGKAGFCRLFIPGFASLAAPLYPLTKPSIPFIWTEEHQKAFDRIKEALLSAPALALPDLTKPFTLYVDERAGVARGVLTQTLGPWRRPVAYLSKKLDPVASGWPTCLKAVAAVALLLKDADKLTLGQNVTVIASHSLESIVRQPPDRWMTNARMTHYQSLLLNERVSFAPPAVLNPATLLPVESEATPVHRCSEILAEETGTRRDLKDQPLPGVPAWYTDGSSFIAEGKRRAGAAIVDGKRTVWASSLPEGTSAQKAELVALTQALRLAEGKDINIYTDSRYAFATAHIHGAIYKQRGWLTSAGKDIKNKEEILALLEAIHLPKRVAIIHCPGHQKGNDPVATGNRRADEAAKQAALSTRVLAETTKPAGKRTADGSEFEKRTADGSEFESPKKKAKVE

SEQ ID NO: 6630 - protein, 2092 aa, synthetic construct
MPAAKRVKLDGGDKKYSIGLDIGTNSVGWAVITDEYKVPSKKFKVLGNTDRHSIKKNLIGALLFDSGETAEATRLKRTARRRYTRRKNRICYLQEIFSNEMAKVDDSFFHRLEESFLVEEDKKHERHPIFGNIVDEVAYHEKYPTIYHLRKKLVDSTDKADLRLIYLALAHMIKFRGHFLIEGDLNPDNSDVDKLFIQLVQTYNQLFEENPINASGVDAKAILSARLSKSRRLENLIAQLPGEKKNGLFGNLIALSLGLTPNFKSNFDLAEDAKLQLSKDTYDDDLDNLLAQIGDQYADLFLAAKNLSDAILLSDILRVNTEITKAPLSASMIKRYDEHHQDLTLLKALVRQQLPEKYKEIFFDQSKNGYAGYIDGGASQEEFYKFIKPILEKMDGTEELLVKLNREDLLRKQRTFDNGSIPHQIHLGELHAILRRQEDFYPFLKDNREKIEKILTFRIPYYVGPLARGNSRFAWMTRKSEETITPWNFEEVVDKGASAQSFIERMTNFDKNLPNEKVLPKHSLLYEYFTVYNELTKVKYVTEGMRKPAFLSGEQKKAIVDLLFKTNRKVTVKQLKEDYFKKIECFDSVEISGVEDRFNASLGTYHDLLKIIKDKDFLDNEENEDILEDIVLTLTLFEDREMIEERLKTYAHLFDDKVMKQLKRRRYTGWGRLSRKLINGIRDKQSGKTILDFLKSDGFANRNFMQLIHDDSLTFKEDIQKAQVSGQGDSLHEHIANLAGSPAIKKGILQTVKVVDELVKVMGRHKPENIVIEMARENQTTQKGQKNSRERMKRIEEGIKELGSQILKEHPVENTQLQNEKLYLYYLQNGRDMYVDQELDINRLSDYDVDHIVPQSFLKDDSIDNKVLTRSDKARGKSDNVPSEEVVKKMKNYWRQLLNAKLITQRKFDNLTKAERGGLSELDKAGFIKRQLVETRQITKHVAQILDSRMNTKYDENDKLIREVKVITLKSKLVSDFRKDFQFYKVREINNYHHAHDAYLNAVVGTALIKKYPKLESEFVYGDYKVYDVRKMIAKSEQEIGKATAKYFFYSNIMNFFKTEITLANGEIRKRPLIETNGETGEIVWDKGRDFATVRKVLSMPQVNIVKKTEVQTGGFSKESILPKRNSDKLIARKKDWDPKKYGGFDSPTVAYSVLVVAKVEKGKSKKLKSVKELLGITIMERSSFEKNPIDFLEAKGYKEVKKDLIIKLPKYSLFELENGRKRMLASAGELQKGNELALPSKYVNFLYLASHYEKLKGSPEDNEQKQLFVEQHKHYLDEIIEQISEFSKRVILADANLDKVLSAYNKHRDKPIREQAENIIHLFTLTNLGAPAAFKYFDTTIDRKRYTSTKEVLDATLIHQSITGLYETRIDLSQLGGDGGEAAAKGGSGGTLQLEEEYRLFEPESTQKQEMDIWLKNFPQAWAETGGMGTAHCQAPVLIQLKATATPISIRQYPMPHEAYQGIKPHIRRMLDQGILKPCQSPWNTPLLPVKKPGTEDYRPVQDLREVNKRVEDIHPTVPNPYNLLSTLPPSHPWYTVLDLKDAFFCLRLHSESQLLFAFEWRDPEIGLSGQLTWTRLPQGFKNSPTLFNEALHSDLADFRVRYPALVLLQYVDDLLLAAATRTECLEGTKALLETLGNKGYRASAKKAQICLQEVTYLGYSLKDGQRWLTKARKEAILSIPVPKNSRQVREFLGKAGYCRLFIPGFAELAAPLYPLTRPGTLFQWGTEQQLAFEDIKKALLSSPALGLPDITKPFELFIDENSGFAKGVLVQKLGPWKRPVAYLSKKLDTVASGWPPCLRMVAAIAILVKDAGKLTLGQPLTILTSHPVEALVRQPPNKWLSNARMTHYQAMLLDAERVHFGPTVSLNPATLLPLPSGGNHHDCLQILAETHGTRPDLTDQPLPDADLTWYTDGSSFIRNGEREAGAAVTTESEVIWAAPLPPGTSAQRAELIALTQALKMAEGKKLTVYTDSRYAFATTHVHGEIYRRRGWLTSEGKEIKNKNEILALLEALFLPKRLSIIHCPGHQKGDSPQAKGNRLADDTAKKAATETHSSLTVLPAGKRTADGSEFEKRTADGSEFESPKKKAKVE

SEQ ID NO: 6631 - protein, 2091 aa, synthetic construct
MPAAKRVKLDGGDKKYSIGLDIGTNSVGWAVITDEYKVPSKKFKVLGNTDRHSIKKNLIGALLFDSGETAEATRLKRTARRRYTRRKNRICYLQEIFSNEMAKVDDSFFHRLEESFLVEEDKKHERHPIFGNIVDEVAYHEKYPTIYHLRKKLVDSTDKADLRLIYLALAHMIKFRGHFLIEGDLNPDNSDVDKLFIQLVQTYNQLFEENPINASGVDAKAILSARLSKSRRLENLIAQLPGEKKNGLFGNLIALSLGLTPNFKSNFDLAEDAKLQLSKDTYDDDLDNLLAQIGDQYADLFLAAKNLSDAILLSDILRVNTEITKAPLSASMIKRYDEHHQDLTLLKALVRQQLPEKYKEIFFDQSKNGYAGYIDGGASQEEFYKFIKPILEKMDGTEELLVKLNREDLLRKQRTFDNGSIPHQIHLGELHAILRRQEDFYPFLKDNREKIEKILTFRIPYYVGPLARGNSRFAWMTRKSEETITPWNFEEVVDKGASAQSFIERMTNFDKNLPNEKVLPKHSLLYEYFTVYNELTKVKYVTEGMRKPAFLSGEQKKAIVDLLFKTNRKVTVKQLKEDYFKKIECFDSVEISGVEDRFNASLGTYHDLLKIIKDKDFLDNEENEDILEDIVLTLTLFEDREMIEERLKTYAHLFDDKVMKQLKRRRYTGWGRLSRKLINGIRDKQSGKTILDFLKSDGFANRNFMQLIHDDSLTFKEDIQKAQVSGQGDSLHEHIANLAGSPAIKKGILQTVKVVDELVKVMGRHKPENIVIEMARENQTTQKGQKNSRERMKRIEEGIKELGSQILKEHPVENTQLQNEKLYLYYLQNGRDMYVDQELDINRLSDYDVDHIVPQSFLKDDSIDNKVLTRSDKARGKSDNVPSEEVVKKMKNYWRQLLNAKLITQRKFDNLTKAERGGLSELDKAGFIKRQLVETRQITKHVAQILDSRMNTKYDENDKLIREVKVITLKSKLVSDFRKDFQFYKVREINNYHHAHDAYLNAVVGTALIKKYPKLESEFVYGDYKVYDVRKMIAKSEQEIGKATAKYFFYSNIMNFFKTEITLANGEIRKRPLIETNGETGEIVWDKGRDFATVRKVLSMPQVNIVKKTEVQTGGFSKESILPKRNSDKLIARKKDWDPKKYGGFDSPTVAYSVLVVAKVEKGKSKKLKSVKELLGITIMERSSFEKNPIDFLEAKGYKEVKKDLIIKLPKYSLFELENGRKRMLASAGELQKGNELALPSKYVNFLYLASHYEKLKGSPEDNEQKQLFVEQHKHYLDEIIEQISEFSKRVILADANLDKVLSAYNKHRDKPIREQAENIIHLFTLTNLGAPAAFKYFDTTIDRKRYTSTKEVLDATLIHQSITGLYETRIDLSQLGGDGGEAAAKGGSGGVLNLEEEYRLHEKPVPSSIDPSWLQLFPTVWAERAGMGLANQVPPVVVELRSGASPVAVRQYPMSKEAREGIRPHIQKFLDLGVLVPCRSPWNTPLLPVKKPGTNDYRPVQDLREINKRVQDIHPTVPNPYNLLSSLPPSYTWYSVLDLKDAFFCLRLHPNSQPLFAFEWKDPEKGNTGQLTWTRLPQGFKNSPTLFNEALHRDLAPFRALNPQVVLLQYVDDLLVAAPTYEDCKKGTQKLLQELSKLGYRVSAKKAQLCQREVTYLGYLLKEGKRWLTPARKATVMKIPVPTTPRQVREFLGKAGFCRLFIPGFASLAAPLYPLTKPSIPFIWTEEHQQAFDHIKKALLSAPALALPDLTKPFTLYIDERAGVARGVLTQTLGPWRRPVAYLSKKLDPVASGWPTCLKAVAAVALLLKDADKLTLGQNVTVIASHSLESIVRQPPDRWMTNARMTHYQSLLLNERVSFAPPAVLNPATLLPVESEATPVHRCSEILAEETGTRRDLEDQPLPGVPTWYTDGSSFITEGKRRAGAPIVDGKRTVWASSLPEGTSAQKAELVALTQALRLAEGKNINIYTDSRYAFATAHIHGAIYKQRGWLTSAGKDIKNKEEILALLEAIHLPRRVAIIHCPGHQRGSNPVATGNRRADEAAKQAALSTRVLAGTTKPAGKRTADGSEFEKRTADGSEFESPKKKAKVE

SEQ ID NO: 6632 - protein, 2093 aa, synthetic construct
MPAAKRVKLDGGDKKYSIGLDIGTNSVGWAVITDEYKVPSKKFKVLGNTDRHSIKKNLIGALLFDSGETAEATRLKRTARRRYTRRKNRICYLQEIFSNEMAKVDDSFFHRLEESFLVEEDKKHERHPIFGNIVDEVAYHEKYPTIYHLRKKLVDSTDKADLRLIYLALAHMIKFRGHFLIEGDLNPDNSDVDKLFIQLVQTYNQLFEENPINASGVDAKAILSARLSKSRRLENLIAQLPGEKKNGLFGNLIALSLGLTPNFKSNFDLAEDAKLQLSKDTYDDDLDNLLAQIGDQYADLFLAAKNLSDAILLSDILRVNTEITKAPLSASMIKRYDEHHQDLTLLKALVRQQLPEKYKEIFFDQSKNGYAGYIDGGASQEEFYKFIKPILEKMDGTEELLVKLNREDLLRKQRTFDNGSIPHQIHLGELHAILRRQEDFYPFLKDNREKIEKILTFRIPYYVGPLARGNSRFAWMTRKSEETITPWNFEEVVDKGASAQSFIERMTNFDKNLPNEKVLPKHSLLYEYFTVYNELTKVKYVTEGMRKPAFLSGEQKKAIVDLLFKTNRKVTVKQLKEDYFKKIECFDSVEISGVEDRFNASLGTYHDLLKIIKDKDFLDNEENEDILEDIVLTLTLFEDREMIEERLKTYAHLFDDKVMKQLKRRRYTGWGRLSRKLINGIRDKQSGKTILDFLKSDGFANRNFMQLIHDDSLTFKEDIQKAQVSGQGDSLHEHIANLAGSPAIKKGILQTVKVVDELVKVMGRHKPENIVIEMARENQTTQKGQKNSRERMKRIEEGIKELGSQILKEHPVENTQLQNEKLYLYYLQNGRDMYVDQELDINRLSDYDVDHIVPQSFLKDDSIDNKVLTRSDKARGKSDNVPSEEVVKKMKNYWRQLLNAKLITQRKFDNLTKAERGGLSELDKAGFIKRQLVETRQITKHVAQILDSRMNTKYDENDKLIREVKVITLKSKLVSDFRKDFQFYKVREINNYHHAHDAYLNAVVGTALIKKYPKLESEFVYGDYKVYDVRKMIAKSEQEIGKATAKYFFYSNIMNFFKTEITLANGEIRKRPLIETNGETGEIVWDKGRDFATVRKVLSMPQVNIVKKTEVQTGGFSKESILPKRNSDKLIARKKDWDPKKYGGFDSPTVAYSVLVVAKVEKGKSKKLKSVKELLGITIMERSSFEKNPIDFLEAKGYKEVKKDLIIKLPKYSLFELENGRKRMLASAGELQKGNELALPSKYVNFLYLASHYEKLKGSPEDNEQKQLFVEQHKHYLDEIIEQISEFSKRVILADANLDKVLSAYNKHRDKPIREQAENIIHLFTLTNLGAPAAFKYFDTTIDRKRYTSTKEVLDATLIHQSITGLYETRIDLSQLGGDGGEAAAKGGSGGTLGIEDEYRLHETSTEPDVSLGSTWLSDFPQAWAETGGMGLAVRQAPLIIPLKATSTPVSIQQYPMSHEARLGIKPHIQRLLDQGILVPCQSPWNTPLLPVKKPGTNDYRPVQDLREVNKRVEDIHPTVPNPYNLLSGLPPSHQWYTVLDLKDAFFCLRLHPTSQPLFAFEWRDPGMGISGQLTWTRLPQGFKNSPTLFNEALHRDLADFRIQHPDLILLQYVDDILLAATSELDCQQGTRALLQTLGDLGYRASAKKAQICQKQVKYLGYLLREGQRWLTEARKETVMGQPVPKTPRQLREFLGTAGFCRLWIPGFAEMAAPLYPLTKPGTLFSWGPDQQKAYQEIKQALLTAPALGLPDLTKPFELFVDEKQGYAKGVLTQKLGPWRRPVAYLSKKLDPVAAGWPPCLRMVAAIAVLTKDAGKLTMGQPLVILAPHAVEALVKQPPDRWLSNARMTHYQAMLLDTDRVQFGPVVALNPATLLPLPEEGAPHDCLEILAETHGTRPDLTDQPIPDADHTWYTDGSSFLQEGQRKAGAAVTTETEVIWAGALPAGTSAQRAELIALTQALKMAEGKRLNVYTDSRYAFATAHIHGEIYRRRGWLTSEGREIKNKSEILALLKALFLPKRLSIIHCLGHQKGDSAEARGNRLADQAAREAAIKTPPDTSTLLAGKRTADGSEFEKRTADGSEFESPKKKAKVE

SEQ ID NO: 6633 - protein, 2093 aa, synthetic construct
MPAAKRVKLDGGDKKYSIGLDIGTNSVGWAVITDEYKVPSKKFKVLGNTDRHSIKKNLIGALLFDSGETAEATRLKRTARRRYTRRKNRICYLQEIFSNEMAKVDDSFFHRLEESFLVEEDKKHERHPIFGNIVDEVAYHEKYPTIYHLRKKLVDSTDKADLRLIYLALAHMIKFRGHFLIEGDLNPDNSDVDKLFIQLVQTYNQLFEENPINASGVDAKAILSARLSKSRRLENLIAQLPGEKKNGLFGNLIALSLGLTPNFKSNFDLAEDAKLQLSKDTYDDDLDNLLAQIGDQYADLFLAAKNLSDAILLSDILRVNTEITKAPLSASMIKRYDEHHQDLTLLKALVRQQLPEKYKEIFFDQSKNGYAGYIDGGASQEEFYKFIKPILEKMDGTEELLVKLNREDLLRKQRTFDNGSIPHQIHLGELHAILRRQEDFYPFLKDNREKIEKILTFRIPYYVGPLARGNSRFAWMTRKSEETITPWNFEEVVDKGASAQSFIERMTNFDKNLPNEKVLPKHSLLYEYFTVYNELTKVKYVTEGMRKPAFLSGEQKKAIVDLLFKTNRKVTVKQLKEDYFKKIECFDSVEISGVEDRFNASLGTYHDLLKIIKDKDFLDNEENEDILEDIVLTLTLFEDREMIEERLKTYAHLFDDKVMKQLKRRRYTGWGRLSRKLINGIRDKQSGKTILDFLKSDGFANRNFMQLIHDDSLTFKEDIQKAQVSGQGDSLHEHIANLAGSPAIKKGILQTVKVVDELVKVMGRHKPENIVIEMARENQTTQKGQKNSRERMKRIEEGIKELGSQILKEHPVENTQLQNEKLYLYYLQNGRDMYVDQELDINRLSDYDVDHIVPQSFLKDDSIDNKVLTRSDKARGKSDNVPSEEVVKKMKNYWRQLLNAKLITQRKFDNLTKAERGGLSELDKAGFIKRQLVETRQITKHVAQILDSRMNTKYDENDKLIREVKVITLKSKLVSDFRKDFQFYKVREINNYHHAHDAYLNAVVGTALIKKYPKLESEFVYGDYKVYDVRKMIAKSEQEIGKATAKYFFYSNIMNFFKTEITLANGEIRKRPLIETNGETGEIVWDKGRDFATVRKVLSMPQVNIVKKTEVQTGGFSKESILPKRNSDKLIARKKDWDPKKYGGFDSPTVAYSVLVVAKVEKGKSKKLKSVKELLGITIMERSSFEKNPIDFLEAKGYKEVKKDLIIKLPKYSLFELENGRKRMLASAGELQKGNELALPSKYVNFLYLASHYEKLKGSPEDNEQKQLFVEQHKHYLDEIIEQISEFSKRVILADANLDKVLSAYNKHRDKPIREQAENIIHLFTLTNLGAPAAFKYFDTTIDRKRYTSTKEVLDATLIHQSITGLYETRIDLSQLGGDGGEAAAKGGSGGTLGIEDEYRLHETSTEPDVSLGSTWLSDFPQAWAETGGMGLAVRQAPLIIPLKATSTPVSIQQYPMSHEARLGIKPHIQRLLDQGILVPCQSPWNTPLLPVKKPGTNDYRPVQDLREVNKRVEDIHPTVPNPYNLLSGLPPSHQWYTVLDLKDAFFCLRLHPTSQPLFAFEWRDPGMGISGQLTWTRLPQGFKNSPTLFDEALHRDLADFRIQHPDLILLQYVDDILLAATSELDCQQGTRALLQTLGDLGYRASAKKAQICQKQVKYLGYLLREGQRWLTEARKETVMGQPVPKTPRQLREFLGTAGFCRLWIPGFAEMAAPLYPLTKTGTLFSWGPDQQKAYQEIKQALLTAPALGLPDLTKPFELFVDEKQGYAKGVLTQKLGPWRRPVAYLSKKLDPVAAGWPPCLRMVAAIAVLTKDAGKLTMGQPLVILAPHAVEALVKQPPDRWLSNARMTHYQAMLLDTDRVQFGPVVALNPATLLPLPEEGAPHDCLEILAETHGTRPDLTDQPIPDADHTWYTDGSSFLQEGQRKAGAAVTTETEVIWAGALPAGTSAQRAELIALTQALKMAEGKRLNVYTDSRYAFATAHIHGEIYRRRGLLTSEGREIKNKSEILALLKALFLPKRLSIIHCLGHQKGDSAEARGNRLADQAAREAAIKTPPDTSTLLAGKRTADGSEFEKRTADGSEFESPKKKAKVE

SEQ ID NO: 6634 - protein, 2093 aa, synthetic construct; identical to SEQ ID NO: 6632

SEQ ID NO: 6635 - protein, 2087 aa, synthetic construct
MPAAKRVKLDGGDKKYSIGLDIGTNSVGWAVITDEYKVPSKKFKVLGNTDRHSIKKNLIGALLFDSGETAEATRLKRTARRRYTRRKNRICYLQEIFSNEMAKVDDSFFHRLEESFLVEEDKKHERHPIFGNIVDEVAYHEKYPTIYHLRKKLVDSTDKADLRLIYLALAHMIKFRGHFLIEGDLNPDNSDVDKLFIQLVQTYNQLFEENPINASGVDAKAILSARLSKSRRLENLIAQLPGEKKNGLFGNLIALSLGLTPNFKSNFDLAEDAKLQLSKDTYDDDLDNLLAQIGDQYADLFLAAKNLSDAILLSDILRVNTEITKAPLSASMIKRYDEHHQDLTLLKALVRQQLPEKYKEIFFDQSKNGYAGYIDGGASQEEFYKFIKPILEKMDGTEELLVKLNREDLLRKQRTFDNGSIPHQIHLGELHAILRRQEDFYPFLKDNREKIEKILTFRIPYYVGPLARGNSRFAWMTRKSEETITPWNFEEVVDKGASAQSFIERMTNFDKNLPNEKVLPKHSLLYEYFTVYNELTKVKYVTEGMRKPAFLSGEQKKAIVDLLFKTNRKVTVKQLKEDYFKKIECFDSVEISGVEDRFNASLGTYHDLLKIIKDKDFLDNEENEDILEDIVLTLTLFEDREMIEERLKTYAHLFDDKVMKQLKRRRYTGWGRLSRKLINGIRDKQSGKTILDFLKSDGFANRNFMQLIHDDSLTFKEDIQKAQVSGQGDSLHEHIANLAGSPAIKKGILQTVKVVDELVKVMGRHKPENIVIEMARENQTTQKGQKNSRERMKRIEEGIKELGSQILKEHPVENTQLQNEKLYLYYLQNGRDMYVDQELDINRLSDYDVDHIVPQSFLKDDSIDNKVLTRSDKARGKSDNVPSEEVVKKMKNYWRQLLNAKLITQRKFDNLTKAERGGLSELDKAGFIKRQLVETRQITKHVAQILDSRMNTKYDENDKLIREVKVITLKSKLVSDFRKDFQFYKVREINNYHHAHDAYLNAVVGTALIKKYPKLESEFVYGDYKVYDVRKMIAKSEQEIGKATAKYFFYSNIMNFFKTEITLANGEIRKRPLIETNGETGEIVWDKGRDFATVRKVLSMPQVNIVKKTEVQTGGFSKESILPKRNSDKLIARKKDWDPKKYGGFDSPTVAYSVLVVAKVEKGKSKKLKSVKELLGITIMERSSFEKNPIDFLEAKGYKEVKKDLIIKLPKYSLFELENGRKRMLASAGELQKGNELALPSKYVNFLYLASHYEKLKGSPEDNEQKQLFVEQHKHYLDEIIEQISEFSKRVILADANLDKVLSAYNKHRDKPIREQAENIIHLFTLTNLGAPAAFKYFDTTIDRKRYTSTKEVLDATLIHQSITGLYETRIDLSQLGGDGGEAAAKGGSGGTLQLDDEYRLYSPLVKPDQNIQFWLEQFPQAWAETAGMGLAKQVPPQVIQLKASATPVSVRQYPLSKEAQEGIRPHVQRLIQQGILVPVQSPWNTPLLPVRKPGTNDYRPVQDLREVNKRVQDIHPTVPNPYNLLCALPPQRSWYTVLDLKDAFFCLRLHPTSQPLFAFEWRDPGTGRTGQLTWTRLPQGFKNSPTIFDEALHRDLANFRIQHPQVTLLQYVDDLLLAGATKQDCLEGTKALLLELSDLGYRASAKKAQICRREVTYLGYSLRDGQRWLTEARKKTVVQIPAPTTAKQVREFLGTAGFCRLWIPGFATLAAPLYPLTKEKGEFSWAPEHQKAFDAIKKALLSAPALALPDVTKPFTLYVDERKGVARGVLTQTLGPWRRPVAYLSKKLDPVASGWPVCLKAIAAVAILVKDADKLTLGQNITVIAPHALENIVRQPPDRWMTNARMTHYQSLLLTERVTFAPPAALNPATLLPEETDEPVTHDCHQLLIEETGVRKDLTDIPLTGEVLTWFTDGSSYVVEGKRMAGAAVVDGTRTIWASSLPEGTSAQKAELMALTQALRLAEGKSINIYTDSRYAFATAHVHGAIYKQRGLLTSAGREIKNKEEILSLLEALHLPKRLAIIHCPGHQKAKDPISRGNQMADRVAKQAAQGVNLLAGKRTADGSEFEKRTADGSEFESPKKKAKVE

SEQ ID NO: 6636 - protein, 2087 aa, synthetic construct; identical to SEQ ID NO: 6635

SEQ ID NO: 6637 - protein, 2084 aa, synthetic construct
MPAAKRVKLDGGDKKYSIGLDIGTNSVGWAVITDEYKVPSKKFKVLGNTDRHSIKKNLIGALLFDSGETAEATRLKRTARRRYTRRKNRICYLQEIFSNEMAKVDDSFFHRLEESFLVEEDKKHERHPIFGNIVDEVAYHEKYPTIYHLRKKLVDSTDKADLRLIYLALAHMIKFRGHFLIEGDLNPDNSDVDKLFIQLVQTYNQLFEENPINASGVDAKAILSARLSKSRRLENLIAQLPGEKKNGLFGNLIALSLGLTPNFKSNFDLAEDAKLQLSKDTYDDDLDNLLAQIGDQYADLFLAAKNLSDAILLSDILRVNTEITKAPLSASMIKRYDEHHQDLTLLKALVRQQLPEKYKEIFFDQSKNGYAGYIDGGASQEEFYKFIKPILEKMDGTEELLVKLNREDLLRKQRTFDNGSIPHQIHLGELHAILRRQEDFYPFLKDNREKIEKILTFRIPYYVGPLARGNSRFAWMTRKSEETITPWNFEEVVDKGASAQSFIERMTNFDKNLPNEKVLPKHSLLYEYFTVYNELTKVKYVTEGMRKPAFLSGEQKKAIVDLLFKTNRKVTVKQLKEDYFKKIECFDSVEISGVEDRFNASLGTYHDLLKIIKDKDFLDNEENEDILEDIVLTLTLFEDREMIEERLKTYAHLFDDKVMKQLKRRRYTGWGRLSRKLINGIRDKQSGKTILDFLKSDGFANRNFMQLIHDDSLTFKEDIQKAQVSGQGDSLHEHIANLAGSPAIKKGILQTVKVVDELVKVMGRHKPENIVIEMARENQTTQKGQKNSRERMKRIEEGIKELGSQILKEHPVENTQLQNEKLYLYYLQNGRDMYVDQELDINRLSDYDVDHIVPQSFLKDDSIDNKVLTRSDKARGKSDNVPSEEVVKKMKNYWRQLLNAKLITQRKFDNLTKAERGGLSELDKAGFIKRQLVETRQITKHVAQILDSRMNTKYDENDKLIREVKVITLKSKLVSDFRKDFQFYKVREINNYHHAHDAYLNAVVGTALIKKYPKLESEFVYGDYKVYDVRKMIAKSEQEIGKATAKYFFYSNIMNFFKTEITLANGEIRKRPLIETNGETGEIVWDKGRDFATVRKVLSMPQVNIVKKTEVQTGGFSKESILPKRNSDKLIARKKDWDPKKYGGFDSPTVAYSVLVVAKVEKGKSKKLKSVKELLGITIMERSSFEKNPIDFLEAKGYKEVKKDLIIKLPKYSLFELENGRKRMLASAGELQKGNELALPSKYVNFLYLASHYEKLKGSPEDNEQKQLFVEQHKHYLDEIIEQISEFSKRVILADANLDKVLSAYNKHRDKPIREQAENIIHLFTLTNLGAPAAFKYFDTTIDRKRYTSTKEVLDATLIHQSITGLYETRIDLSQLGGDGGEAAAKGGSGGIPWLMKKPLQLTTLVPLQEYEERLLKQTMLTGSYKEKLQSLFLKYDALWQHWENQVGHRRIKPHHIATGTVNPRPQKQYPINPKAKASIQTVINDLLKQGVLIQQNSIMNTPVYPVPKPDGKWRMVLDYREVNKTIPLIAAQNQHSAGILSSIFRGKYKTTLDLSNGFWAHSITPESYWLTAFTWLGQQYCWTRLPQGFLNSPALFNADVVDLLKEVPNVQVYVDDIYISHDDPREHLEQLEKVFSLLLNAGYVVSLKKSEIAQHEVEFLGFNITKEGRGLTETFKQKLLNITPPRDLKQLQSILGLLNFARNFIPNFSELVKPLYNIIATAPGKYITWTTDNSQQLQNIISMLNSAENLEERNPEVRLIMKVNTSPSAGYIRFYNEFAKRPIMYLNYVYTKAEVKFTNTEKLLTTIHKGLIKALDLGMGQEILVYSPIVSMTKIQKTPLPERKALPIRWITWMSYLEDPRIQFHYDKTLPELQQVPTVTDDIIAKIKHPSEFSMVFYTDGSAIKHPNVNKSHNAGMGIAQVQFKPEFTVINTWSIPLGDHTAQLAEVAAVEFACKKALKIDGPVLIVTDSFYVAESVNKELPYWQSNGFFNNKKKPLKHVSKWKSIADCIQLKPDIIIIHEKGHQPTASTFHTEGNNLADKLATQGSYVVNAGKRTADGSEFEKRTADGSEFESPKKKAKVE

SEQ ID NO: 6638 - protein, 2084 aa, synthetic construct
MPAAKRVKLDGGDKKYSIGLDIGTNSVGWAVITDEYKVPSKKFKVLGNTDRHSIKKNLIGALLFDSGETAEATRLKRTARRRYTRRKNRICYLQEIFSNEMAKVDDSFFHRLEESFLVEEDKKHERHPIFGNIVDEVAYHEKYPTIYHLRKKLVDSTDKADLRLIYLALAHMIKFRGHFLIEGDLNPDNSDVDKLFIQLVQTYNQLFEENPINASGVDAKAILSARLSKSRRLENLIAQLPGEKKNGLFGNLIALSLGLTPNFKSNFDLAEDAKLQLSKDTYDDDLDNLLAQIGDQYADLFLAAKNLSDAILLSDILRVNTEITKAPLSASMIKRYDEHHQDLTLLKALVRQQLPEKYKEIFFDQSKNGYAGYIDGGASQEEFYKFIKPILEKMDGTEELLVKLNREDLLRKQRTFDNGSIPHQIHLGELHAILRRQEDFYPFLKDNREKIEKILTFRIPYYVGPLARGNSRFAWMTRKSEETITPWNFEEVVDKGASAQSFIERMTNFDKNLPNEKVLPKHSLLYEYFTVYNELTKVKYVTEGMRKPAFLSGEQKKAIVDLLFKTNRKVTVKQLKEDYFKKIECFDSVEISGVEDRFNASLGTYHDLLKIIKDKDFLDNEENEDILEDIVLTLTLFEDREMIEERLKTYAHLFDDKVMKQLKRRRYTGWGRLSRKLINGIRDKQSGKTILDFLKSDGFANRNFMQLIHDDSLTFKEDIQKAQVSGQGDSLHEHIANLAGSPAIKKGILQTVKVVDELVKVMGRHKPENIVIEMARENQTTQKGQKNSRERMKRIEEGIKELGSQILKEHPVENTQLQNEKLYLYYLQNGRDMYVDQELDINRLSDYDVDHIVPQSFLKDDSIDNKVLTRSDKARGKSDNVPSEEVVKKMKNYWRQLLNAKLITQRKFDNLTKAERGGLSELDKAGFIKRQLVETRQITKHVAQILDSRMNTKYDENDKLIREVKVITLKSKLVSDFRKDFQFYKVREINNYHHAHDAYLNAVVGTALIKKYPKLESEFVYGDYKVYDVRKMIAKSEQEIGKATAKYFFYSNIMNFFKTEITLANGEIRKRPLIETNGETGEIVWDKGRDFATVRKVLSMPQVNIVKKTEVQTGGFSKESILPKRNSDKLIARKKDWDPKKYGGFDSPTVAYSVLVVAKVEKGKSKKLKSVKELLGITIMERSSFEKNPIDFLEAKGYKEVKKDLIIKLPKYSLFELENGRKRMLASAGELQKGNELALPSKYVNFLYLASHYEKLKGSPEDNEQKQLFVEQHKHYLDEIIEQISEFSKRVILADANLDKVLSAYNKHRDKPIREQAENIIHLFTLTNLGAPAAFKYFDTTIDRKRYTSTKEVLDATLIHQSITGLYETRIDLSQLGGDGGEAAAKGGSGGIPWLMKKPLQLTTLVPLQEYEERLLKQTMLTGSYKEKLQSLFLKYDALWQHWENQVGHRRIKPHHIATGTVNPRPQKQYPINPKAKASIQTVINDLLKQGVLIQQNSIMNTPVYPVPKPDGKWRMVLDYREVNKTIPLIAAQNQHSAGILSSIFRGKYKTTLDLSNGFWAHSITPESYWLTAFTWLGQQYCWTRLPQGFLNSPALFNADVVDLLKEVPNVQVYVDDIYISHDDPREHLEQLEKVFSLLLNAGYVVSLKKSEIAQHEVEFLGFNITKEGRGLTETFKQKLLNITPPRDLKQLQSILGKLNFARNFIPNFSELVKPLYNIIATAPGKYITWTTDNSQQLQNIISMLNSAENLEERNPEVRLIMKVNTSPSAGYIRFYNEFAKRPIMYLNYVYTKAEVKFTNTEKLLTTIHKGLIKALDLGMGQEILVYSPIVSMTKIQKTPLPERKALPIRWITWMSYLEDPRIQFHYDKTLPELQQVPTVTDDIIAKIKHPSEFSMVFYTDGSAIKHPNVNKSHNAGMGIAQVQFKPEFTVINTWSIPLGDHTAQLAEVAAVEFACKKALKIDGPVLIVTDSFYVAESVNKELPYWQSNGFFNNKKKPLKHVSKWKSIADCIQLKPDIIIIHEKGHQPTASTFHTEGNNLADKLATQGSYVVNAGKRTADGSEFEKRTADGSEFESPKKKAKVE

SEQ ID NO: 6639 - protein, 2093 aa, synthetic construct
MPAAKRVKLDGGDKKYSIGLDIGTNSVGWAVITDEYKVPSKKFKVLGNTDRHSIKKNLIGALLFDSGETAEATRLKRTARRRYTRRKNRICYLQEIFSNEMAKVDDSFFHRLEESFLVEEDKKHERHPIFGNIVDEVAYHEKYPTIYHLRKKLVDSTDKADLRLIYLALAHMIKFRGHFLIEGDLNPDNSDVDKLFIQLVQTYNQLFEENPINASGVDAKAILSARLSKSRRLENLIAQLPGEKKNGLFGNLIALSLGLTPNFKSNFDLAEDAKLQLSKDTYDDDLDNLLAQIGDQYADLFLAAKNLSDAILLSDILRVNTEITKAPLSASMIKRYDEHHQDLTLLKALVRQQLPEKYKEIFFDQSKNGYAGYIDGGASQEEFYKFIKPILEKMDGTEELLVKLNREDLLRKQRTFDNGSIPHQIHLGELHAILRRQEDFYPFLKDNREKIEKILTFRIPYYVGPLARGNSRFAWMTRKSEETITPWNFEEVVDKGASAQSFIERMTNFDKNLPNEKVLPKHSLLYEYFTVYNELTKVKYVTEGMRKPAFLSGEQKKAIVDLLFKTNRKVTVKQLKEDYFKKIECFDSVEISGVEDRFNASLGTYHDLLKIIKDKDFLDNEENEDILEDIVLTLTLFEDREMIEERLKTYAHLFDDKVMKQLKRRRYTGWGRLSRKLINGIRDKQSGKTILDFLKSDGFANRNFMQLIHDDSLTFKEDIQKAQVSGQGDSLHEHIANLAGSPAIKKGILQTVKVVDELVKVMGRHKPENIVIEMARENQTTQKGQKNSRERMKRIEEGIKELGSQILKEHPVENTQLQNEKLYLYYLQNGRDMYVDQELDINRLSDYDVDHIVPQSFLKDDSIDNKVLTRSDKARGKSDNVPSEEVVKKMKNYWRQLLNAKLITQRKFDNLTKAERGGLSELDKAGFIKRQLVETRQITKHVAQILDSRMNTKYDENDKLIREVKVITLKSKLVSDFRKDFQFYKVREINNYHHAHDAYLNAVVGTALIKKYPKLESEFVYGDYKVYDVRKMIAKSEQEIGKATAKYFFYSNIMNFFKTEITLANGEIRKRPLIETNGETGEIVWDKGRDFATVRKVLSMPQVNIVKKTEVQTGGFSKESILPKRNSDKLIARKKDWDPKKYGGFDSPTVAYSVLVVAKVEKGKSKKLKSVKELLGITIMERSSFEKNPIDFLEAKGYKEVKKDLIIKLPKYSLFELENGRKRMLASAGELQKGNELALPSKYVNFLYLASHYEKLKGSPEDNEQKQLFVEQHKHYLDEIIEQISEFSKRVILADANLDKVLSAYNKHRDKPIREQAENIIHLFTLTNLGAPAAFKYFDTTIDRKRYTSTKEVLDATLIHQSITGLYETRIDLSQLGGDGGEAAAKGGSGGTLNIEDEYRLHETSKEPDVPLGSTWLSDFPQAWAETGGMGLAVRQAPLIIPLKATSTPVSIKQYPMSQEARLGIKPHIQRLLDQGILVPCQSPWNTPLLPVKKPGTNDYRPVQDLREVNKRVEDIHPTVPNPYNLLSGLPPSHQWYTVLDLKDAFFCLRLHPTSQPLFAFEWRDPEMGISGQLTWTRLPQGFKNSPTLFNEALHRDLADFRIQHPDLILLQYVDDLLLAATSEQDCQRGTRALLQTLGNLGYRASAKKAQICQKQVKYLGYLLKEGQRWLTEARKETVMGQPTPKTPRQLREFLGTAGFCRLWIPGFAEMAAPLYPLTKPGTLFNWGPDQQKAYQEIKQALLTAPALGLPDLTKPFELFVDEKQGYAKGVLTQKLGPWRRPVAYLSKKLDPVAAGWPPCLRMVAAIAVLTKDAGKLTMGQPLVILAPHAVEALVKQPPDRWLSNARMTHYQAMLLDTDRVQFGPVVALNPATLLPLPEKEAPHDCLEILAETHGTRPDLTDQPIPDADYTWYTDGSSFLQEGQRRAGAAVTTETEVIWARALPAGTSAQRAELIALTQALKMAEGKKLNVYTDSRYAFATAHVHGEIYRRRGWLTSEGREIKNKNEILALLKALFLPKRLSIIHCPGHQKGNSAEARGNRMADQAAREAAMKAVLETSTLLAGKRTADGSEFEKRTADGSEFESPKKKAKVE

SEQ ID NO: 6640 - protein, 2097 aa, synthetic construct
MPAAKRVKLDGGDKKYSIGLDIGTNSVGWAVITDEYKVPSKKFKVLGNTDRHSIKKNLIGALLFDSGETAEATRLKRTARRRYTRRKNRICYLQEIFSNEMAKVDDSFFHRLEESFLVEEDKKHERHPIFGNIVDEVAYHEKYPTIYHLRKKLVDSTDKADLRLIYLALAHMIKFRGHFLIEGDLNPDNSDVDKLFIQLVQTYNQLFEENPINASGVDAKAILSARLSKSRRLENLIAQLPGEKKNGLFGNLIALSLGLTPNFKSNFDLAEDAKLQLSKDTYDDDLDNLLAQIGDQYADLFLAAKNLSDAILLSDILRVNTEITKAPLSASMIKRYDEHHQDLTLLKALVRQQLPEKYKEIFFDQSKNGYAGYIDGGASQEEFYKFIKPILEKMDGTEELLVKLNREDLLRKQRTFDNGSIPHQIHLGELHAILRRQEDFYPFLKDNREKIEKILTFRIPYYVGPLARGNSRFAWMTRKSEETITPWNFEEVVDKGASAQSFIERMTNFDKNLPNEKVLPKHSLLYEYFTVYNELTKVKYVTEGMRKPAFLSGEQKKAIVDLLFKTNRKVTVKQLKEDYFKKIECFDSVEISGVEDRFNASLGTYHDLLKIIKDKDFLDNEENEDILEDIVLTLTLFEDREMIEERLKTYAHLFDDKVMKQLKRRRYTGWGRLSRKLINGIRDKQSGKTILDFLKSDGFANRNFMQLIHDDSLTFKEDIQKAQVSGQGDSLHEHIANLAGSPAIKKGILQTVKVVDELVKVMGRHKPENIVIEMARENQTTQKGQKNSRERMKRIEEGIKELGSQILKEHPVENTQLQNEKLYLYYLQNGRDMYVDQELDINRLSDYDVDHIVPQSFLKDDSIDNKVLTRSDKARGKSDNVPSEEVVKKMKNYWRQLLNAKLITQRKFDNLTKAERGGLSELDKAGFIKRQLVETRQITKHVAQILDSRMNTKYDENDKLIREVKVITLKSKLVSDFRKDFQFYKVREINNYHHAHDAYLNAVVGTALIKKYPKLESEFVYGDYKVYDVRKMIAKSEQEIGKATAKYFFYSNIMNFFKTEITLANGEIRKRPLIETNGETGEIVWDKGRDFATVRKVLSMPQVNIVKKTEVQTGGFSKESILPKRNSDKLIARKKDWDPKKYGGFDSPTVAYSVLVVAKVEKGKSKKLKSVKELLGITIMERSSFEKNPIDFLEAKGYKEVKKDLIIKLPKYSLFELENGRKRMLASAGELQKGNELALPSKYVNFLYLASHYEKLKGSPEDNEQKQLFVEQHKHYLDEIIEQISEFSKRVILADANLDKVLSAYNKHRDKPIREQAENIIHLFTLTNLGAPAAFKYFDTTIDRKRYTSTKEVLDATLIHQSITGLYETRIDLSQLGGDGGGGSPAPGGTVSLQDEHRLFDIPVTTSLPDVWLQDFPQAWAETGGLGRAKCQAPIIIDLKPTAVPVSIKQYPMSLEAHMGIRQHIIKFLELGVLRPCRSPWNTPLLPVKKPGTQDYRPVQDLREINKRTVDIHPTVPNPYNLLSTLKPDYSWYTVLDLKDAFFCLPLAPQSQELFAFEWKDPERGISGQLTWTRLPQGFKNSPTLFNEALHRDLTDFRTQHPEVTLLQYVDDLLLAAPTKKACTQGTRHLLQELGEKGYRASAKKAQICQTKVTYLGYILSEGKRWLTPGRIETVARIPPPRNPREVREFLGTAGFCRLWIPGFAELAAPLYALTKPSTPFTWQTEHQLAFEALKKALLSAPALGLPDTSKPFTLFLDERQGIAKGVLTQKLGPWKRPVAYLSKKLDPVAAGWPPCLRIMAATAMLVKDSAKLTLGQPLTVITPHTLEAIVRQPPDRWITNARLTHYQALLLDTDRVQFGPPVTLNPATLLPVPENQPSPHDCRQVLAETHGTREDLKDQELPDADHTWYTDGSSYLDSGTRRAGAAVVDGHNTIWAQSLPPGTSAQKAELIALTKALELSKGKKANIYTDSRYAFATAHTHGSIYERRGWLTSEGKEIKNKAEIIALLKALFLPQEVAIIHCPGHQKGQDPVAVGNRQADRVARQAAMAEVLTLATEPDNTSHITAGKRTADGSEFEKRTADGSEFESPKKKAKVE

SEQ ID NO: 6641 - protein, 2168 aa, synthetic construct
MPAAKRVKLDGGDKKYSIGLDIGTNSVGWAVITDEYKVPSKKFKVLGNTDRHSIKKNLIGALLFDSGETAEATRLKRTARRRYTRRKNRICYLQEIFSNEMAKVDDSFFHRLEESFLVEEDKKHERHPIFGNIVDEVAYHEKYPTIYHLRKKLVDSTDKADLRLIYLALAHMIKFRGHFLIEGDLNPDNSDVDKLFIQLVQTYNQLFEENPINASGVDAKAILSARLSKSRRLENLIAQLPGEKKNGLFGNLIALSLGLTPNFKSNFDLAEDAKLQLSKDTYDDDLDNLLAQIGDQYADLFLAAKNLSDAILLSDILRVNTEITKAPLSASMIKRYDEHHQDLTLLKALVRQQLPEKYKEIFFDQSKNGYAGYIDGGASQEEFYKFIKPILEKMDGTEELLVKLNREDLLRKQRTFDNGSIPHQIHLGELHAILRRQEDFYPFLKDNREKIEKILTFRIPYYVGPLARGNSRFAWMTRKSEETITPWNFEEVVDKGASAQSFIERMTNFDKNLPNEKVLPKHSLLYEYFTVYNELTKVKYVTEGMRKPAFLSGEQKKAIVDLLFKTNRKVTVKQLKEDYFKKIECFDSVEISGVEDRFNASLGTYHDLLKIIKDKDFLDNEENEDILEDIVLTLTLFEDREMIEERLKTYAHLFDDKVMKQLKRRRYTGWGRLSRKLINGIRDKQSGKTILDFLKSDGFANRNFMQLIHDDSLTFKEDIQKAQVSGQGDSLHEHIANLAGSPAIKKGILQTVKVVDELVKVMGRHKPENIVIEMARENQTTQKGQKNSRERMKRIEEGIKELGSQILKEHPVENTQLQNEKLYLYYLQNGRDMYVDQELDINRLSDYDVDHIVPQSFLKDDSIDNKVLTRSDKARGKSDNVPSEEVVKKMKNYWRQLLNAKLITQRKFDNLTKAERGGLSELDKAGFIKRQLVETRQITKHVAQILDSRMNTKYDENDKLIREVKVITLKSKLVSDFRKDFQFYKVREINNYHHAHDAYLNAVVGTALIKKYPKLESEFVYGDYKVYDVRKMIAKSEQEIGKATAKYFFYSNIMNFFKTEITLANGEIRKRPLIETNGETGEIVWDKGRDFATVRKVLSMPQVNIVKKTEVQTGGFSKESILPKRNSDKLIARKKDWDPKKYGGFDSPTVAYSVLVVAKVEKGKSKKLKSVKELLGITIMERSSFEKNPIDFLEAKGYKEVKKDLIIKLPKYSLFELENGRKRMLASAGELQKGNELALPSKYVNFLYLASHYEKLKGSPEDNEQKQLFVEQHKHYLDEIIEQISEFSKRVILADANLDKVLSAYNKHRDKPIREQAENIIHLFTLTNLGAPAAFKYFDTTIDRKRYTSTKEVLDATLIHQSITGLYETRIDLSQLGGDGGGGSPAPGGMDLLKPLTVERKGVKIKGYWNSQADITCVPKDLLQGEEPVRQQNVTTIHGTQEGDVYYVNLKIDGRRINTEVIGTTLDYAIITPGDVPWILKKPLELTIKLDLEEQQGTLLNNSILSKKGKEELKQLFEKYSALWQSWENQVGHRRIRPHKIATGTVKPTPQKQYHINPKAKPDIQIVINDLLKQGVLIQKESTMNTPVYPVPKPNGRWRMVLDYRAVNKVTPLIAVQNQHSYGILGSLFKGRYKTTIDLSNGFWAHPIVPEDYWITAFTWQGKQYCWTVLPQGFLNSPGLFNGDVVDLLQGIPNVEVYVDDVYISHDSEKEHLEYLDILFNRLKEAGYIISLKKSNIANSIVDFLGFQITNEGRGLTDTFKEKLENITAPTTLKQLQSILGLLNFARNFIPDFTELIAPLYALIPKSPKNYVPWQIEHSTTLETLITKLNGAEYLQGRKGDKTLIMKVNASYTTGYIRYYNEGEKKPISYVSIVFSKTELKFTELEKLLTTVHKGLLKALDLSMGQNIHVYSPIVSMQNIQKTPQTAKKALASRWLSWLSYLEDPRIRFFYDPQMPALKDLPAVDTGKDNKKHPSNFQHIFYTDGSAITSPTKEGHLNAGMGIVYFINKDGNLQKQQEWSISLGNHTAQFAEIAAFEFALKKCLPLGGNILVVTDSNYVAKAYNEELDVWASNGFVNNRKKPLKHISKWKSVADLKRLRPDVVVTHEPGHQKLDSSPHAYGNNLADQLATQASFKVHAGKRTADGSEFEKRTADGSEFESPKKKAKVE

SEQ ID NO: 6642 - protein, 2090 aa, synthetic construct
MPAAKRVKLDGGDKKYSIGLDIGTNSVGWAVITDEYKVPSKKFKVLGNTDRHSIKKNLIGALLFDSGETAEATRLKRTARRRYTRRKNRICYLQEIFSNEMAKVDDSFFHRLEESFLVEEDKKHERHPIFGNIVDEVAYHEKYPTIYHLRKKLVDSTDKADLRLIYLALAHMIKFRGHFLIEGDLNPDNSDVDKLFIQLVQTYNQLFEENPINASGVDAKAILSARLSKSRRLENLIAQLPGEKKNGLFGNLIALSLGLTPNFKSNFDLAEDAKLQLSKDTYDDDLDNLLAQIGDQYADLFLAAKNLSDAILLSDILRVNTEITKAPLSASMIKRYDEHHQDLTLLKALVRQQLPEKYKEIFFDQSKNGYAGYIDGGASQEEFYKFIKPILEKMDGTEELLVKLNREDLLRKQRTFDNGSIPHQIHLGELHAILRRQEDFYPFLKDNREKIEKILTFRIPYYVGPLARGNSRFAWMTRKSEETITPWNFEEVVDKGASAQSFIERMTNFDKNLPNEKVLPKHSLLYEYFTVYNELTKVKYVTEGMRKPAFLSGEQKKAIVDLLFKTNRKVTVKQLKEDYFKKIECFDSVEISGVEDRFNASLGTYHDLLKIIKDKDFLDNEENEDILEDIVLTLTLFEDREMIEERLKTYAHLFDDKVMKQLKRRRYTGWGRLSRKLINGIRDKQSGKTILDFLKSDGFANRNFMQLIHDDSLTFKEDIQKAQVSGQGDSLHEHIANLAGSPAIKKGILQTVKVVDELVKVMGRHKPENIVIEMARENQTTQKGQKNSRERMKRIEEGIKELGSQILKEHPVENTQLQNEKLYLYYLQNGRDMYVDQELDINRLSDYDVDHIVPQSFLKDDSIDNKVLTRSDKARGKSDNVPSEEVVKKMKNYWRQLLNAKLITQRKFDNLTKAERGGLSELDKAGFIKRQLVETRQITKHVAQILDSRMNTKYDENDKLIREVKVITLKSKLVSDFRKDFQFYKVREINNYHHAHDAYLNAVVGTALIKKYPKLESEFVYGDYKVYDVRKMIAKSEQEIGKATAKYFFYSNIMNFFKTEITLANGEIRKRPLIETNGETGEIVWDKGRDFATVRKVLSMPQVNIVKKTEVQTGGFSKESILPKRNSDKLIARKKDWDPKKYGGFDSPTVAYSVLVVAKVEKGKSKKLKSVKELLGITIMERSSFEKNPIDFLEAKGYKEVKKDLIIKLPKYSLFELENGRKRMLASAGELQKGNELALPSKYVNFLYLASHYEKLKGSPEDNEQKQLFVEQHKHYLDEIIEQISEFSKRVILADANLDKVLSAYNKHRDKPIREQAENIIHLFTLTNLGAPAAFKYFDTTIDRKRYTSTKEVLDATLIHQSITGLYETRIDLSQLGGDGGGGSPAPGGTLQLEEEYRLFEPESTQKQEMDIWLKNFPQAWAETGGMGTAHCQAPVLIQLKATATPISIRQYPMPHEAYQGIKPHIRRMLDQGILKPCQSPWNTPLLPVKKPGTEDYRPVQDLREVNKRVEDIHPTVPNPYNLLSTLPPSHPWYTVLDLKDAFFCLRLHSESQLLFAFEWRDPEIGLSGQLTWTRLPQGFKNSPTLFNEALHSDLADFRVRYPALVLLQYVDDLLLAAATRTECLEGTKALLETLGNKGYRASAKKAQICLQEVTYLGYSLKDGQRWLTKARKEAILSIPVPKNSRQVREFLGKAGYCRLFIPGFAELAAPLYPLTRPGTLFQWGTEQQLAFEDIKKALLSSPALGLPDITKPFELFIDENSGFAKGVLVQKLGPWKRPVAYLSKKLDTVASGWPPCLRMVAAIAILVKDAGKLTLGQPLTILTSHPVEALVRQPPNKWLSNARMTHYQAMLLDAERVHFGPTVSLNPATLLPLPSGGNHHDCLQILAETHGTRPDLTDQPLPDADLTWYTDGSSFIRNGEREAGAAVTTESEVIWAAPLPPGTSAQRAELIALTQALKMAEGKKLTVYTDSRYAFATTHVHGEIYRRRGWLTSEGKEIKNKNEILALLEALFLPKRLSIIHCPGHQKGDSPQAKGNRLADDTAKKAATETHSSLTVLPAGKRTADGSEFEKRTADGSEFESPKKKAKVE

SEQ ID NO: 6643 - protein, 2171 aa, synthetic construct
MPAAKRVKLDGGDKKYSIGLDIGTNSVGWAVITDEYKVPSKKFKVLGNTDRHSIKKNLIGALLFDSGETAEATRLKRTARRRYTRRKNRICYLQEIFSNEMAKVDDSFFHRLEESFLVEEDKKHERHPIFGNIVDEVAYHEKYPTIYHLRKKLVDSTDKADLRLIYLALAHMIKFRGHFLIEGDLNPDNSDVDKLFIQLVQTYNQLFEENPINASGVDAKAILSARLSKSRRLENLIAQLPGEKKNGLFGNLIALSLGLTPNFKSNFDLAEDAKLQLSKDTYDDDLDNLLAQIGDQYADLFLAAKNLSDAILLSDILRVNTEITKAPLSASMIKRYDEHHQDLTLLKALVRQQLPEKYKEIFFDQSKNGYAGYIDGGASQEEFYKFIKPILEKMDGTEELLVKLNREDLLRKQRTFDNGSIPHQIHLGELHAILRRQEDFYPFLKDNREKIEKILTFRIPYYVGPLARGNSRFAWMTRKSEETITPWNFEEVVDKGASAQSFIERMTNFDKNLPNEKVLPKHSLLYEYFTVYNELTKVKYVTEGMRKPAFLSGEQKKAIVDLLFKTNRKVTVKQLKEDYFKKIECFDSVEISGVEDRFNASLGTYHDLLKIIKDKDFLDNEENEDILEDIVLTLTLFEDREMIEERLKTYAHLFDDKVMKQLKRRRYTGWGRLSRKLINGIRDKQSGKTILDFLKSDGFANRNFMQLIHDDSLTFKEDIQKAQVSGQGDSLHEHIANLAGSPAIKKGILQTVKVVDELVKVMGRHKPENIVIEMARENQTTQKGQKNSRERMKRIEEGIKELGSQILKEHPVENTQLQNEKLYLYYLQNGRDMYVDQELDINRLSDYDVDHIVPQSFLKDDSIDNKVLTRSDKARGKSDNVPSEEVVKKMKNYWRQLLNAKLITQRKFDNLTKAERGGLSELDKAGFIKRQLVETRQITKHVAQILDSRMNTKYDENDKLIREVKVITLKSKLVSDFRKDFQFYKVREINNYHHAHDAYLNAVVGTALIKKYPKLESEFVYGDYKVYDVRKMIAKSEQEIGKATAKYFFYSNIMNFFKTEITLANGEIRKRPLIETNGETGEIVWDKGRDFATVRKVLSMPQVNIVKKTEVQTGGFSKESILPKRNSDKLIARKKDWDPKKYGGFDSPTVAYSVLVVAKVEKGKSKKLKSVKELLGITIMERSSFEKNPIDFLEAKGYKEVKKDLIIKLPKYSLFELENGRKRMLASAGELQKGNELALPSKYVNFLYLASHYEKLKGSPEDNEQKQLFVEQHKHYLDEIIEQISEFSKRVILADANLDKVLSAYNKHRDKPIREQAENIIHLFTLTNLGAPAAFKYFDTTIDRKRYTSTKEVLDATLIHQSITGLYETRIDLSQLGGDGGGGSPAPGGMNPLQLLQPLPAEIKGTKLLAHWNSGATITCIPESFLEDEQPIKKTLIKTIHGEKQQNVYYVTFKVKGRKVEAEVIASPYEYILLSPTDVPWLTQQPLQLTILVPLQEYQEKILSKTALPEDQKQQLKTLFVKYDNLWQHWENQVGHRKIRPHNIATGDYPPRPQKQYPINPKAKPSIQIVIDDLLKQGVLTPQNSTMNTPVYPVPKPDGRWRMVLDYREVNKTIPLTAAQNQHSAGILATIVRQKYKTTLDLANGFWAHPITPESYWLTAFTWQGKQYCWTRLPQGFLNSPALFNADVVDLLKEIPNVQVYVDDIYLSHDDPKEHVQQLEKVFQILLQAGYVVSLKKSEIGQKTVEFLGFNITKEGRGLTDTFKTKLLNITPPKDLKQLQSILGKLNFARNFIPNFAELVQPLYNLIAPAKGKYIEWSEENTKQLNMVIEALNTASNLEERLPEQRLVIKVNTSPSAGYVRYYNETGKKPIMYLNYVFSKAELKFSMLEKLLTTMHKALIKAMDLAMGQEILVYSPIVSMTKIQKTPLPERKALPIRWITWMTYLEDPRIQFHYDKTLPELKHIPDVYTSSQSPVKHPSQYEGVFYTDGSAIKSPDPTKSNNAGMGIVHATYKPEYQVLNQWSIPLGNHTAQMAEIAAVEFACKKALKIPGPVLVITDSFYVAESANKELPYWKSNGFVNNKKKPLKHISKWKSIAECLSMKPDITIQHEKGISLQIPVFILKGNALADKLATQGSYVVNAGKRTADGSEFEKRTADGSEFESPKKKAKVE

SEQ ID NO: 6644 - protein, 2089 aa, synthetic construct
MPAAKRVKLDGGDKKYSIGLDIGTNSVGWAVITDEYKVPSKKFKVLGNTDRHSIKKNLIGALLFDSGETAEATRLKRTARRRYTRRKNRICYLQEIFSNEMAKVDDSFFHRLEESFLVEEDKKHERHPIFGNIVDEVAYHEKYPTIYHLRKKLVDSTDKADLRLIYLALAHMIKFRGHFLIEGDLNPDNSDVDKLFIQLVQTYNQLFEENPINASGVDAKAILSARLSKSRRLENLIAQLPGEKKNGLFGNLIALSLGLTPNFKSNFDLAEDAKLQLSKDTYDDDLDNLLAQIGDQYADLFLAAKNLSDAILLSDILRVNTEITKAPLSASMIKRYDEHHQDLTLLKALVRQQLPEKYKEIFFDQSKNGYAGYIDGGASQEEFYKFIKPILEKMDGTEELLVKLNREDLLRKQRTFDNGSIPHQIHLGELHAILRRQEDFYPFLKDNREKIEKILTFRIPYYVGPLARGNSRFAWMTRKSEETITPWNFEEVVDKGASAQSFIERMTNFDKNLPNEKVLPKHSLLYEYFTVYNELTKVKYVTEGMRKPAFLSGEQKKAIVDLLFKTNRKVTVKQLKEDYFKKIECFDSVEISGVEDRFNASLGTYHDLLKIIKDKDFLDNEENEDILEDIVLTLTLFEDREMIEERLKTYAHLFDDKVMKQLKRRRYTGWGRLSRKLINGIRDKQSGKTILDFLKSDGFANRNFMQLIHDDSLTFKEDIQKAQVSGQGDSLHEHIANLAGSPAIKKGILQTVKVVDELVKVMGRHKPENIVIEMARENQTTQKGQKNSRERMKRIEEGIKELGSQILKEHPVENTQLQNEKLYLYYLQNGRDMYVDQELDINRLSDYDVDHIVPQSFLKDDSIDNKVLTRSDKARGKSDNVPSEEVVKKMKNYWRQLLNAKLITQRKFDNLTKAERGGLSELDKAGFIKRQLVETRQITKHVAQILDSRMNTKYDENDKLIREVKVITLKSKLVSDFRKDFQFYKVREINNYHHAHDAYLNAVVGTALIKKYPKLESEFVYGDYKVYDVRKMIAKSEQEIGKATAKYFFYSNIMNFFKTEITLANGEIRKRPLIETNGETGEIVWDKGRDFATVRKVLSMPQVNIVKKTEVQTGGFSKESILPKRNSDKLIARKKDWDPKKYGGFDSPTVAYSVLVVAKVEKGKSKKLKSVKELLGITIMERSSFEKNPIDFLEAKGYKEVKKDLIIKLPKYSLFELENGRKRMLASAGELQKGNELALPSKYVNFLYLASHYEKLKGSPEDNEQKQLFVEQHKHYLDEIIEQISEFSKRVILADANLDKVLSAYNKHRDKPIREQAENIIHLFTLTNLGAPAAFKYFDTTIDRKRYTSTKEVLDATLIHQSITGLYETRIDLSQLGGDGGGGSPAPGGVLNLEEEYRLHEKPVPSSIDPSWLQLFPTVWAERAGMGLANQVPPVVVELRSGASPVAVRQYPMSKEAREGIRPHIQKFLDLGVLVPCRSPWNTPLLPVKKPGTNDYRPVQDLREINKRVQDIHPTVPNPYNLLSSLPPSYTWYSVLDLKDAFFCLRLHPNSQPLFAFEWKDPEKGNTGQLTWTRLPQGFKNSPTLFNEALHRDLAPFRALNPQVVLLQYVDDLLVAAPTYEDCKKGTQKLLQELSKLGYRVSAKKAQLCQREVTYLGYLLKEGKRWLTPARKATVMKIPVPTTPRQVREFLGTAGFCRLWIPGFASLAAPLYPLTKPSIPFIWTEEHQQAFDHIKKALLSAPALALPDLTKPFTLYIDERAGVARGVLTQTLGPWRRPVAYLSKKLDPVASGWPTCLKAVAAVALLLKDADKLTLGQNVTVIASHSLESIVRQPPDRWMTNARMTHYQSLLLNERVSFAPPAVLNPATLLPVESEATPVHRCSEILAEETGTRRDLEDQPLPGVPTWYTDGSSFITEGKRRAGAPIVDGKRTVWASSLPEGTSAQKAELVALTQALRLAEGKNINIYTDSRYAFATAHIHGAIYKQRGWLTSAGKDIKNKEEILALLEAIHLPRRVAIIHCPGHQRGSNPVATGNRRADEAAKQAALSTRVLAGTTKPAGKRTADGSEFEKRTADGSEFESPKKKAKVE

SEQ ID NO: 6645 - protein, 2213 aa, synthetic construct
MPAAKRVKLDGGDKKYSIGLDIGTNSVGWAVITDEYKVPSKKFKVLGNTDRHSIKKNLIGALLFDSGETAEATRLKRTARRRYTRRKNRICYLQEIFSNEMAKVDDSFFHRLEESFLVEEDKKHERHPIFGNIVDEVAYHEKYPTIYHLRKKLVDSTDKADLRLIYLALAHMIKFRGHFLIEGDLNPDNSDVDKLFIQLVQTYNQLFEENPINASGVDAKAILSARLSKSRRLENLIAQLPGEKKNGLFGNLIALSLGLTPNFKSNFDLAEDAKLQLSKDTYDDDLDNLLAQIGDQYADLFLAAKNLSDAILLSDILRVNTEITKAPLSASMIKRYDEHHQDLTLLKALVRQQLPEKYKEIFFDQSKNGYAGYIDGGASQEEFYKFIKPILEKMDGTEELLVKLNREDLLRKQRTFDNGSIPHQIHLGELHAILRRQEDFYPFLKDNREKIEKILTFRIPYYVGPLARGNSRFAWMTRKSEETITPWNFEEVVDKGASAQSFIERMTNFDKNLPNEKVLPKHSLLYEYFTVYNELTKVKYVTEGMRKPAFLSGEQKKAIVDLLFKTNRKVTVKQLKEDYFKKIECFDSVEISGVEDRFNASLGTYHDLLKIIKDKDFLDNEENEDILEDIVLTLTLFEDREMIEERLKTYAHLFDDKVMKQLKRRRYTGWGRLSRKLINGIRDKQSGKTILDFLKSDGFANRNFMQLIHDDSLTFKEDIQKAQVSGQGDSLHEHIANLAGSPAIKKGILQTVKVVDELVKVMGRHKPENIVIEMARENQTTQKGQKNSRERMKRIEEGIKELGSQILKEHPVENTQLQNEKLYLYYLQNGRDMYVDQELDINRLSDYDVDHIVPQSFLKDDSIDNKVLTRSDKARGKSDNVPSEEVVKKMKNYWRQLLNAKLITQRKFDNLTKAERGGLSELDKAGFIKRQLVETRQITKHVAQILDSRMNTKYDENDKLIREVKVITLKSKLVSDFRKDFQFYKVREINNYHHAHDAYLNAVVGTALIKKYPKLESEFVYGDYKVYDVRKMIAKSEQEIGKATAKYFFYSNIMNFFKTEITLANGEIRKRPLIETNGETGEIVWDKGRDFATVRKVLSMPQVNIVKKTEVQTGGFSKESILPKRNSDKLIARKKDWDPKKYGGFDSPTVAYSVLVVAKVEKGKSKKLKSVKELLGITIMERSSFEKNPIDFLEAKGYKEVKKDLIIKLPKYSLFELENGRKRMLASAGELQKGNELALPSKYVNFLYLASHYEKLKGSPEDNEQKQLFVEQHKHYLDEIIEQISEFSKRVILADANLDKVLSAYNKHRDKPIREQAENIIHLFTLTNLGAPAAFKYFDTTIDRKRYTSTKEVLDATLIHQSITGLYETRIDLSQLGGDGGGGSPAPGGTLGDQGSRGSDPLPEPRVTLTVEGIPTEFLVNTGAEHSVLTKPMGKMGSKRTVVAGATGSKVYPWTTKRLLKIGQKQVTHSFLVIPECPAPLLGRDLLTKLKAQIQFSTEGPQVTWEDRPAMCLVLNLEEEYRLHEKPVPPSIDPSWLQLFPMVWAEKAGMGLANQVPPVVVELKSDASPVAVRQYPMSKEAREGIRPHIQRFLDLGILVPCQSPWNTPLLPVKKPGTNDYRPVQDLREVNKRVQDIHPTVPNPYNLLSSLPPSHTWYSVLDLKDAFFCLKLHPNSQPLFAFEWRDPEKGNTGQLTWTRLPQGFKNSPTLFNEALHRDLASFRALNPQVVMLQYVDDLLVAAPTYRDCKEGTRRLLQELSKLGYRVSAKKAQLCREEVTYLGYLLKGGKRWLTPARKATVMKIPTPTTPRQVREFLGTAGFCRLWIPGFASLAAPLYPLTRPKVPFTWTEAHQEAFGRIKEALLSAPALALPDLTKPFALYVDEKEGVARGVLTQTLGPWRRPVAYLSKKLDPVASGWPTCLKAIAAVALLLKDADKLTLGQNVLVIAPHNLESIVRQPPDRWMTNARMTHYQSLLLNERVSFAPPAILNPATLLPVESDDTPIHICSEILAEETGTRPDLRDQPLPGVPAWYTDGSSFIMDGRRQAGAAIVDNKRTVWASNLPEGTSAQKAELIALTQALRLAEGKSINIYTDSRYAFATAHVHGAIYKQRGWLTSAGKDIKNKEEILALLEAIHLPKRVAIIHCPGHQRGTDPVATGNRKADEAAKQAAQSTRILTETTKNAGKRTADGSEFEKRTADGSEFESPKKKAKVE

SEQ ID NO: 6646 - protein, 2213 aa, synthetic construct
MPAAKRVKLDGGDKKYSIGLDIGTNSVGWAVITDEYKVPSKKFKVLGNTDRHSIKKNLIGALLFDSGETAEATRLKRTARRRYTRRKNRICYLQEIFSNEMAKVDDSFFHRLEESFLVEEDKKHERHPIFGNIVDEVAYHEKYPTIYHLRKKLVDSTDKADLRLIYLALAHMIKFRGHFLIEGDLNPDNSDVDKLFIQLVQTYNQLFEENPINASGVDAKAILSARLSKSRRLENLIAQLPGEKKNGLFGNLIALSLGLTPNFKSNFDLAEDAKLQLSKDTYDDDLDNLLAQIGDQYADLFLAAKNLSDAILLSDILRVNTEITKAPLSASMIKRYDEHHQDLTLLKALVRQQLPEKYKEIFFDQSKNGYAGYIDGGASQEEFYKFIKPILEKMDGTEELLVKLNREDLLRKQRTFDNGSIPHQIHLGELHAILRRQEDFYPFLKDNREKIEKILTFRIPYYVGPLARGNSRFAWMTRKSEETITPWNFEEVVDKGASAQSFIERMTNFDKNLPNEKVLPKHSLLYEYFTVYNELTKVKYVTEGMRKPAFLSGEQKKAIVDLLFKTNRKVTVKQLKEDYFKKIECFDSVEISGVEDRFNASLGTYHDLLKIIKDKDFLDNEENEDILEDIVLTLTLFEDREMIEERLKTYAHLFDDKVMKQLKRRRYTGWGRLSRKLINGIRDKQSGKTILDFLKSDGFANRNFMQLIHDDSLTFKEDIQKAQVSGQGDSLHEHIANLAGSPAIKKGILQTVKVVDELVKVMGRHKPENIVIEMARENQTTQKGQKNSRERMKRIEEGIKELGSQILKEHPVENTQLQNEKLYLYYLQNGRDMYVDQELDINRLSDYDVDHIVPQSFLKDDSIDNKVLTRSDKARGKSDNVPSEEVVKKMKNYWRQLLNAKLITQRKFDNLTKAERGGLSELDKAGFIKRQLVETRQITKHVAQILDSRMNTKYDENDKLIREVKVITLKSKLVSDFRKDFQFYKVREINNYHHAHDAYLNAVVGTALIKKYPKLESEFVYGDYKVYDVRKMIAKSEQEIGKATAKYFFYSNIMNFFKTEITLANGEIRKRPLIETNGETGEIVWDKGRDFATVRKVLSMPQVNIVKKTEVQTGGFSKESILPKRNSDKLIARKKDWDPKKYGGFDSPTVAYSVLVVAKVEKGKSKKLKSVKELLGITIMERSSFEKNPIDFLEAKGYKEVKKDLIIKLPKYSLFELENGRKRMLASAGELQKGNELALPSKYVNFLYLASHYEKLKGSPEDNEQKQLFVEQHKHYLDEIIEQISEFSKRVILADANLDKVLSAYNKHRDKPIREQAENIIHLFTLTNLGAPAAFKYFDTTIDRKRYTSTKEVLDATLIHQSITGLYETRIDLSQLGGDGGGGSPAPGGTLGDQGSRGSDPLPEPRVTLTVEGIPTEFLVNTGAEHSVLTKPMGKMGSKRTVVAGATGSKVYPWTTKRLLKIGQKQVTHSFLVIPECPAPLLGRDLLTKLKAQIQFSTEGPQVTWEDRPAMCLVLNLEEEYRLHEKPVPPSIDPSWLQLFPMVWAEKAGMGLANQVPPVVVELKSDASPVAVRQYPMSKEAREGIRPHIQRFLDLGILVPCQSPWNTPLLPVKKPGTNDYRPVQDLREVNKRVQDIHPTVPNPYNLLSSLPPSHTWYSVLDLKDAFFCLKLHPNSQPLFAFEWRDPEKGNTGQLTWTRLPQGFKNSPTLFNEALHRDLASFRALNPQVVMLQYVDDLLVAAPTYRDCKEGTRRLLQELSKLGYRVSAKKAQLCREEVTYLGYLLKGGKRWLTPARKATVMKIPTPTTPRQVREFLGKAGFCRLFIPGFASLAAPLYPLTRPKVPFTWTEAHQEAFGRIKEALLSAPALALPDLTKPFALYVDEKEGVARGVLTQTLGPWRRPVAYLSKKLDPVASGWPTCLKAIAAVALLLKDADKLTLGQNVLVIAPHNLESIVRQPPDRWMTNARMTHYQSLLLNERVSFAPPAILNPATLLPVESDDTPIHICSEILAEETGTRPDLRDQPLPGVPAWYTDGSSFIMDGRRQAGAAIVDNKRTVWASNLPEGTSAQKAELIALTQALRLAEGKSINIYTDSRYAFATAHVHGAIYKQRGWLTSAGKDIKNKEEILALLEAIHLPKRVAIIHCPGHQRGTDPVATGNRKADEAAKQAAQSTRILTETTKNAGKRTADGSEFEKRTADGSEFESPKKKAKVE

SEQ ID NO: 6647 - protein, 2091 aa, synthetic construct
MPAAKRVKLDGGDKKYSIGLDIGTNSVGWAVITDEYKVPSKKFKVLGNTDRHSIKKNLIGALLFDSGETAEATRLKRTARRRYTRRKNRICYLQEIFSNEMAKVDDSFFHRLEESFLVEEDKKHERHPIFGNIVDEVAYHEKYPTIYHLRKKLVDSTDKADLRLIYLALAHMIKFRGHFLIEGDLNPDNSDVDKLFIQLVQTYNQLFEENPINASGVDAKAILSARLSKSRRLENLIAQLPGEKKNGLFGNLIALSLGLTPNFKSNFDLAEDAKLQLSKDTYDDDLDNLLAQIGDQYADLFLAAKNLSDAILLSDILRVNTEITKAPLSASMIKRYDEHHQDLTLLKALVRQQLPEKYKEIFFDQSKNGYAGYIDGGASQEEFYKFIKPILEKMDGTEELLVKLNREDLLRKQRTFDNGSIPHQIHLGELHAILRRQEDFYPFLKDNREKIEKILTFRIPYYVGPLARGNSRFAWMTRKSEETITPWNFEEVVDKGASAQSFIERMTNFDKNLPNEKVLPKHSLLYEYFTVYNELTKVKYVTEGMRKPAFLSGEQKKAIVDLLFKTNRKVTVKQLKEDYFKKIECFDSVEISGVEDRFNASLGTYHDLLKIIKDKDFLDNEENEDILEDIVLTLTLFEDREMIEERLKTYAHLFDDKVMKQLKRRRYTGWGRLSRKLINGIRDKQSGKTILDFLKSDGFANRNFMQLIHDDSLTFKEDIQKAQVSGQGDSLHEHIANLAGSPAIKKGILQTVKVVDELVKVMGRHKPENIVIEMARENQTTQKGQKNSRERMKRIEEGIKELGSQILKEHPVENTQLQNEKLYLYYLQNGRDMYVDQELDINRLSDYDVDHIVPQSFLKDDSIDNKVLTRSDKARGKSDNVPSEEVVKKMKNYWRQLLNAKLITQRKFDNLTKAERGGLSELDKAGFIKRQLVETRQITKHVAQILDSRMNTKYDENDKLIREVKVITLKSKLVSDFRKDFQFYKVREINNYHHAHDAYLNAVVGTALIKKYPKLESEFVYGDYKVYDVRKMIAKSEQEIGKATAKYFFYSNIMNFFKTEITLANGEIRKRPLIETNGETGEIVWDKGRDFATVRKVLSMPQVNIVKKTEVQTGGFSKESILPKRNSDKLIARKKDWDPKKYGGFDSPTVAYSVLVVAKVEKGKSKKLKSVKELLGITIMERSSFEKNPIDFLEAKGYKEVKKDLIIKLPKYSLFELENGRKRMLASAGELQKGNELALPSKYVNFLYLASHYEKLKGSPEDNEQKQLFVEQHKHYLDEIIEQISEFSKRVILADANLDKVLSAYNKHRDKPIREQAENIIHLFTLTNLGAPAAFKYFDTTIDRKRYTSTKEVLDATLIHQSITGLYETRIDLSQLGGDGGGGSPAPGGTLNIEDEYRLHETSKEPDVSLGSTWLSDFPQAWAETGGMGLAVRQAPLIIPLKATSTPVSIKQYPMSQEARLGIKPHIQRLLDQGILVPCQSPWNTPLLPVKKPGTNDYRPVQDLREVNKRVEDIHPTVPNPYNLLSGLPPSHQWYTVLDLKDAFFCLRLHPTSQPLFAFEWRDPEMGISGQLTWTRLPQGFKNSPTLFNEALHRDLAGFRIQHPDLILLQYVDDLLLAATSELDCQQGTRALLQTLGDLGYRASAKKAQICQKQVKYLGYLLKEGQRWLTEARKETVMGQPIPKTPRQLREFLGTAGFCRLWIPGFAEMAAPLYPLTKPGTLFNWGPDQQKAFQEIKQALLTAPALGLPDLTKPFELFVDEKQGYAKGVLTQKLGPWRRPVAYLSKKLDPVAAGWPPCLRMVAAIAVLTKDAGKLTMGQPLVILAPHAVEALVKQPPDRWLSNARMTHYQALLLDTDRVQFGPVVALNPATLLPLPEEGLQHDCLDILAEAHGTRSDLMDQPLPDADHTWYTDGSSFLQEGQRKAGAAVTTETEVIWARALPAGTSAQRAELIALTQALKMAEGKKLNVYTDSRYAFATAHIHGEIYRRRGWLTSEGKEIKNKDEILALLKALFLPKRLSIIHCPGHQKGNSAEARGNRMADQAAREVATRETPETSTLLAGKRTADGSEFEKRTADGSEFESPKKKAKVE

SEQ ID NO: 6648 - protein, 2091 aa, synthetic construct
MPAAKRVKLDGGDKKYSIGLDIGTNSVGWAVITDEYKVPSKKFKVLGNTDRHSIKKNLIGALLFDSGETAEATRLKRTARRRYTRRKNRICYLQEIFSNEMAKVDDSFFHRLEESFLVEEDKKHERHPIFGNIVDEVAYHEKYPTIYHLRKKLVDSTDKADLRLIYLALAHMIKFRGHFLIEGDLNPDNSDVDKLFIQLVQTYNQLFEENPINASGVDAKAILSARLSKSRRLENLIAQLPGEKKNGLFGNLIALSLGLTPNFKSNFDLAEDAKLQLSKDTYDDDLDNLLAQIGDQYADLFLAAKNLSDAILLSDILRVNTEITKAPLSASMIKRYDEHHQDLTLLKALVRQQLPEKYKEIFFDQSKNGYAGYIDGGASQEEFYKFIKPILEKMDGTEELLVKLNREDLLRKQRTFDNGSIPHQIHLGELHAILRRQEDFYPFLKDNREKIEKILTFRIPYYVGPLARGNSRFAWMTRKSEETITPWNFEEVVDKGASAQSFIERMTNFDKNLPNEKVLPKHSLLYEYFTVYNELTKVKYVTEGMRKPAFLSGEQKKAIVDLLFKTNRKVTVKQLKEDYFKKIECFDSVEISGVEDRFNASLGTYHDLLKIIKDKDFLDNEENEDILEDIVLTLTLFEDREMIEERLKTYAHLFDDKVMKQLKRRRYTGWGRLSRKLINGIRDKQSGKTILDFLKSDGFANRNFMQLIHDDSLTFKEDIQKAQVSGQGDSLHEHIANLAGSPAIKKGILQTVKVVDELVKVMGRHKPENIVIEMARENQTTQKGQKNSRERMKRIEEGIKELGSQILKEHPVENTQLQNEKLYLYYLQNGRDMYVDQELDINRLSDYDVDHIVPQSFLKDDSIDNKVLTRSDKARGKSDNVPSEEVVKKMKNYWRQLLNAKLITQRKFDNLTKAERGGLSELDKAGFIKRQLVETRQITKHVAQILDSRMNTKYDENDKLIREVKVITLKSKLVSDFRKDFQFYKVREINNYHHAHDAYLNAVVGTALIKKYPKLESEFVYGDYKVYDVRKMIAKSEQEIGKATAKYFFYSNIMNFFKTEITLANGEIRKRPLIETNGETGEIVWDKGRDFATVRKVLSMPQVNIVKKTEVQTGGFSKESILPKRNSDKLIARKKDWDPKKYGGFDSPTVAYSVLVVAKVEKGKSKKLKSVKELLGITIMERSSFEKNPIDFLEAKGYKEVKKDLIIKLPKYSLFELENGRKRMLASAGELQKGNELALPSKYVNFLYLASHYEKLKGSPEDNEQKQLFVEQHKHYLDEIIEQISEFSKRVILADANLDKVLSAYNKHRDKPIREQAENIIHLFTLTNLGAPAAFKYFDTTIDRKRYTSTKEVLDATLIHQSITGLYETRIDLSQLGGDGGGGSPAPGGTLNIEDEYRLHETSKGPDVPLGSTWLSDFPQAWAETGGMGLAVRQAPLIIPLKATSTPVSIKQYPMSQEARLGIKPHIQRLLDQGILVPCQSPWNTPLLPVKKPGTNDYRPVQDLREVNKRVEDIHPTVPNPYNLLSGLPPSHQWYTVLDLKDAFFCLRLHPTSQSLFAFEWRDPEMGISGQLTWTRLPQGFKNSPTLFNEALHRDLADFRIQHPDLILLQYVDDLLLAATSELDCQQGTRALLQTLGDLGYRASAKKAQICQKQVKYLGYLLKEGQRWLTEARKETVMGQPTPKTPRQLREFLGKAGFCRLFIPGFAEMAAPLYPLTKPGTLFEWGPDQQKAYQEIKQALLTAPALGLPDLTKPFELFVDEKQGYAKGVLTQKLGPWRRPVAYLSKKLDPVAAGWPPCLRMVAAIAVLTKDAGKLTMGQPLVILAPHAVEALVKQPPDRWLSNARMTHYQALLLDTDRVQFGPIVALNPATLLPLPEEGLQHDCLDILAEAHGTRPDLTDQPLPDADHTWYTDGSSFLQEGQRKAGAAVTTETEVVWAKALPAGTSAQRAELIALTQALKMAEGKKLNVYTDSRYAFATAHIHGEIYRRRGWLTSEGKEIKNKDEILALLKALFLPKRLSIIHCPGHQKGNRAEARGNRMADQAAREVATRETPETSTLLAGKRTADGSEFEKRTADGSEFESPKKKAKVE

SEQ ID NO: 6649 - protein, 2082 aa, synthetic construct
MPAAKRVKLDGGDKKYSIGLDIGTNSVGWAVITDEYKVPSKKFKVLGNTDRHSIKKNLIGALLFDSGETAEATRLKRTARRRYTRRKNRICYLQEIFSNEMAKVDDSFFHRLEESFLVEEDKKHERHPIFGNIVDEVAYHEKYPTIYHLRKKLVDSTDKADLRLIYLALAHMIKFRGHFLIEGDLNPDNSDVDKLFIQLVQTYNQLFEENPINASGVDAKAILSARLSKSRRLENLIAQLPGEKKNGLFGNLIALSLGLTPNFKSNFDLAEDAKLQLSKDTYDDDLDNLLAQIGDQYADLFLAAKNLSDAILLSDILRVNTEITKAPLSASMIKRYDEHHQDLTLLKALVRQQLPEKYKEIFFDQSKNGYAGYIDGGASQEEFYKFIKPILEKMDGTEELLVKLNREDLLRKQRTFDNGSIPHQIHLGELHAILRRQEDFYPFLKDNREKIEKILTFRIPYYVGPLARGNSRFAWMTRKSEETITPWNFEEVVDKGASAQSFIERMTNFDKNLPNEKVLPKHSLLYEYFTVYNELTKVKYVTEGMRKPAFLSGEQKKAIVDLLFKTNRKVTVKQLKEDYFKKIECFDSVEISGVEDRFNASLGTYHDLLKIIKDKDFLDNEENEDILEDIVLTLTLFEDREMIEERLKTYAHLFDDKVMKQLKRRRYTGWGRLSRKLINGIRDKQSGKTILDFLKSDGFANRNFMQLIHDDSLTFKEDIQKAQVSGQGDSLHEHIANLAGSPAIKKGILQTVKVVDELVKVMGRHKPENIVIEMARENQTTQKGQKNSRERMKRIEEGIKELGSQILKEHPVENTQLQNEKLYLYYLQNGRDMYVDQELDINRLSDYDVDHIVPQSFLKDDSIDNKVLTRSDKARGKSDNVPSEEVVKKMKNYWRQLLNAKLITQRKFDNLTKAERGGLSELDKAGFIKRQLVETRQITKHVAQILDSRMNTKYDENDKLIREVKVITLKSKLVSDFRKDFQFYKVREINNYHHAHDAYLNAVVGTALIKKYPKLESEFVYGDYKVYDVRKMIAKSEQEIGKATAKYFFYSNIMNFFKTEITLANGEIRKRPLIETNGETGEIVWDKGRDFATVRKVLSMPQVNIVKKTEVQTGGFSKESILPKRNSDKLIARKKDWDPKKYGGFDSPTVAYSVLVVAKVEKGKSKKLKSVKELLGITIMERSSFEKNPIDFLEAKGYKEVKKDLIIKLPKYSLFELENGRKRMLASAGELQKGNELALPSKYVNFLYLASHYEKLKGSPEDNEQKQLFVEQHKHYLDEIIEQISEFSKRVILADANLDKVLSAYNKHRDKPIREQAENIIHLFTLTNLGAPAAFKYFDTTIDRKRYTSTKEVLDATLIHQSITGLYETRIDLSQLGGDGGGGSPAPGGIPWLMKKPLQLTTLVPLQEYEERLLKQTMLTGSYKEKLQSLFLKYDALWQHWENQVGHRRIKPHHIATGTVNPRPQKQYPINPKAKASIQTVINDLLKQGVLIQQNSIMNTPVYPVPKPDGKWRMVLDYREVNKTIPLIAAQNQHSAGILSSIFRGKYKTTLDLSNGFWAHSITPESYWLTAFTWLGQQYCWTRLPQGFLNSPALFNADVVDLLKEVPNVQVYVDDIYISHDDPREHLEQLEKVFSLLLNAGYVVSLKKSEIAQHEVEFLGFNITKEGRGLTETFKQKLLNITPPRDLKQLQSILGKLNFARNFIPNFSELVKPLYNIIATAPGKYITWTTDNSQQLQNIISMLNSAENLEERNPEVRLIMKVNTSPSAGYIRFYNEFAKRPIMYLNYVYTKAEVKFTNTEKLLTTIHKGLIKALDLGMGQEILVYSPIVSMTKIQKTPLPERKALPIRWITWMSYLEDPRIQFHYDKTLPELQQVPTVTDDIIAKIKHPSEFSMVFYTDGSAIKHPNVNKSHNAGMGIAQVQFKPEFTVINTWSIPLGDHTAQLAEVAAVEFACKKALKIDGPVLIVTDSFYVAESVNKELPYWQSNGFFNNKKKPLKHVSKWKSIADCIQLKPDIIIIHEKGHQPTASTFHTEGNNLADKLATQGSYVVNAGKRTADGSEFEKRTADGSEFESPKKKAKVE

SEQ ID NO: 6650 - protein, 2089 aa, synthetic construct
MPAAKRVKLDGGDKKYSIGLDIGTNSVGWAVITDEYKVPSKKFKVLGNTDRHSIKKNLIGALLFDSGETAEATRLKRTARRRYTRRKNRICYLQEIFSNEMAKVDDSFFHRLEESFLVEEDKKHERHPIFGNIVDEVAYHEKYPTIYHLRKKLVDSTDKADLRLIYLALAHMIKFRGHFLIEGDLNPDNSDVDKLFIQLVQTYNQLFEENPINASGVDAKAILSARLSKSRRLENLIAQLPGEKKNGLFGNLIALSLGLTPNFKSNFDLAEDAKLQLSKDTYDDDLDNLLAQIGDQYADLFLAAKNLSDAILLSDILRVNTEITKAPLSASMIKRYDEHHQDLTLLKALVRQQLPEKYKEIFFDQSKNGYAGYIDGGASQEEFYKFIKPILEKMDGTEELLVKLNREDLLRKQRTFDNGSIPHQIHLGELHAILRRQEDFYPFLKDNREKIEKILTFRIPYYVGPLARGNSRFAWMTRKSEETITPWNFEEVVDKGASAQSFIERMTNFDKNLPNEKVLPKHSLLYEYFTVYNELTKVKYVTEGMRKPAFLSGEQKKAIVDLLFKTNRKVTVKQLKEDYFKKIECFDSVEISGVEDRFNASLGTYHDLLKIIKDKDFLDNEENEDILEDIVLTLTLFEDREMIEERLKTYAHLFDDKVMKQLKRRRYTGWGRLSRKLINGIRDKQSGKTILDFLKSDGFANRNFMQLIHDDSLTFKEDIQKAQVSGQGDSLHEHIANLAGSPAIKKGILQTVKVVDELVKVMGRHKPENIVIEMARENQTTQKGQKNSRERMKRIEEGIKELGSQILKEHPVENTQLQNEKLYLYYLQNGRDMYVDQELDINRLSDYDVDHIVPQSFLKDDSIDNKVLTRSDKARGKSDNVPSEEVVKKMKNYWRQLLNAKLITQRKFDNLTKAERGGLSELDKAGFIKRQLVETRQITKHVAQILDSRMNTKYDENDKLIREVKVITLKSKLVSDFRKDFQFYKVREINNYHHAHDAYLNAVVGTALIKKYPKLESEFVYGDYKVYDVRKMIAKSEQEIGKATAKYFFYSNIMNFFKTEITLANGEIRKRPLIETNGETGEIVWDKGRDFATVRKVLSMPQVNIVKKTEVQTGGFSKESILPKRNSDKLIARKKDWDPKKYGGFDSPTVAYSVLVVAKVEKGKSKKLKSVKELLGITIMERSSFEKNPIDFLEAKGYKEVKKDLIIKLPKYSLFELENGRKRMLASAGELQKGNELALPSKYVNFLYLASHYEKLKGSPEDNEQKQLFVEQHKHYLDEIIEQISEFSKRVILADANLDKVLSAYNKHRDKPIREQAENIIHLFTLTNLGAPAAFKYFDTTIDRKRYTSTKEVLDATLIHQSITGLYETRIDLSQLGGDGGGGSPAPGGVLNLEEEYRLHEKPVPSSIDPSWLQLFPTVWAERAGMGLANQVPPVVVELRSGASPVAVRQYPMSKEAREGIRPHIQRFLDLGVLVPCQSPWNTPLLPVKKPGTNDYRPVQDLREINKRVQDIHPTVPNPYNLLSSLPPSHTWYSVLDLKDAFFCLKLHPNSQPLFAFEWRDPEKGNTGQLTWTRLPQGFKNSPTLFNEALHRDLAPFRALNPQVVLLQYVDDLLVAAPTYRDCKEGTQKLLQELSKLGYRVSAKKAQLCQKEVTYLGYLLKEGKRWLTPARKATVMKIPPPTTPRQVREFLGKAGFCRLFIPGFASLAAPLYPLTKPSIPFIWTEEHQKAFDRIKEALLSAPALALPDLTKPFTLYVDERAGVARGVLTQTLGPWRRPVAYLSKKLDPVASGWPTCLKAVAAVALLLKDADKLTLGQNVTVIASHSLESIVRQPPDRWMTNARMTHYQSLLLNERVSFAPPAVLNPATLLPVESEATPVHRCSEILAEETGTRRDLKDQPLPGVPAWYTDGSSFIAEGKRRAGAAIVDGKRTVWASSLPEGTSAQKAELVALTQALRLAEGKDINIYTDSRYAFATAHIHGAIYKQRGWLTSAGKDIKNKEEILALLEAIHLPKRVAIIHCPGHQKGNDPVATGNRRADEAAKQAALSTRVLAETTKPAGKRTADGSEFEKRTADGSEFESPKKKAKVE

SEQ ID NO: 6651 - protein, 2093 aa, synthetic construct
MPAAKRVKLDGGDKKYSIGLDIGTNSVGWAVITDEYKVPSKKFKVLGNTDRHSIKKNLIGALLFDSGETAEATRLKRTARRRYTRRKNRICYLQEIFSNEMAKVDDSFFHRLEESFLVEEDKKHERHPIFGNIVDEVAYHEKYPTIYHLRKKLVDSTDKADLRLIYLALAHMIKFRGHFLIEGDLNPDNSDVDKLFIQLVQTYNQLFEENPINASGVDAKAILSARLSKSRRLENLIAQLPGEKKNGLFGNLIALSLGLTPNFKSNFDLAEDAKLQLSKDTYDDDLDNLLAQIGDQYADLFLAAKNLSDAILLSDILRVNTEITKAPLSASMIKRYDEHHQDLTLLKALVRQQLPEKYKEIFFDQSKNGYAGYIDGGASQEEFYKFIKPILEKMDGTEELLVKLNREDLLRKQRTFDNGSIPHQIHLGELHAILRRQEDFYPFLKDNREKIEKILTFRIPYYVGPLARGNSRFAWMTRKSEETITPWNFEEVVDKGASAQSFIERMTNFDKNLPNEKVLPKHSLLYEYFTVYNELTKVKYVTEGMRKPAFLSGEQKKAIVDLLFKTNRKVTVKQLKEDYFKKIECFDSVEISGVEDRFNASLGTYHDLLKIIKDKDFLDNEENEDILEDIVLTLTLFEDREMIEERLKTYAHLFDDKVMKQLKRRRYTGWGRLSRKLINGIRDKQSGKTILDFLKSDGFANRNFMQLIHDDSLTFKEDIQKAQVSGQGDSLHEHIANLAGSPAIKKGILQTVKVVDELVKVMGRHKPENIVIEMARENQTTQKGQKNSRERMKRIEEGIKELGSQILKEHPVENTQLQNEKLYLYYLQNGRDMYVDQELDINRLSDYDVDHIVPQSFLKDDSIDNKVLTRSDKARGKSDNVPSEEVVKKMKNYWRQLLNAKLITQRKFDNLTKAERGGLSELDKAGFIKRQLVETRQITKHVAQILDSRMNTKYDENDKLIREVKVITLKSKLVSDFRKDFQFYKVREINNYHHAHDAYLNAVVGTALIKKYPKLESEFVYGDYKVYDVRKMIAKSEQEIGKATAKYFFYSNIMNFFKTEITLANGEIRKRPLIETNGETGEIVWDKGRDFATVRKVLSMPQVNIVKKTEVQTGGFSKESILPKRNSDKLIARKKDWDPKKYGGFDSPTVAYSVLVVAKVEKGKSKKLKSVKELLGITIMERSSFEKNPIDFLEAKGYKEVKKDLIIKLPKYSLFELENGRKRMLASAGELQKGNELALPSKYVNFLYLASHYEKLKGSPEDNEQKQLFVEQHKHYLDEIIEQISEFSKRVILADANLDKVLSAYNKHRDKPIREQAENIIHLFTLTNLGAPAAFKYFDTTIDRKRYTSTKEVLDATLIHQSITGLYETRIDLSQLGGDGGPAPGGSGGTAPLEEEYRLFLEAPIQNVTLLEQWKREIPKVWAEINPPGLASTQAPIHVQLLSTALPVRVRQYPITLEAKRSLRETIRKFRAAGILRPVHSPWNTPLLPVRKSGTSEYRMVQDLREVNKRVETIHPTVPNPYTLLSLLPPDRIWYSVLDLKDAFFCIPLAPESQLIFAFEWADAEEGESGQLTWTRLPQGFKNSPTLFNEALNRDLQGFRLDHPSVSLLQYVDDLLIAADTQAACLSATRDLLMTLAELGYRVSGKKAQLCQEEVTYLGFKIHKGSRSLSNSRTQAILQIPVPKTKRQVREFLGTIGYCRLWIPGFAELAQPLYAATRPGNDPLVWGEKEEEAFQSLKLALTQPPALALPSLDKPFQLFVEETSGAAKGVLTQALGPWKRPVAYLSKRLDPVAAGWPRCLRAIAAAALLTREASKLTFGQDIEITSSHNLESLLRSPPDKWLTNARITQYQVLLLDPPRVRFKQTAALNPATLLPETDDTLPIHHCLDTLDSLTSTRPDLTDQPLAQAEATLFTDGSSYIRDGKRYAGAAVVTLDSVIWAEPLPIGTSAQKAELIALTKALEWSKDKSVNIYTDSRYAFATLHVHGMIYRERGWLTAGGKAIKNAPEILALLTAVWLPKRVAVMHCKGHQKDDAPTSTGNRRADEVAREVAIRPLSTQATISAGKRTADGSEFEKRTADGSEFESPKKKAKVE

SEQ ID NO: 6652 - protein, 2093 aa, synthetic construct
MPAAKRVKLDGGDKKYSIGLDIGTNSVGWAVITDEYKVPSKKFKVLGNTDRHSIKKNLIGALLFDSGETAEATRLKRTARRRYTRRKNRICYLQEIFSNEMAKVDDSFFHRLEESFLVEEDKKHERHPIFGNIVDEVAYHEKYPTIYHLRKKLVDSTDKADLRLIYLALAHMIKFRGHFLIEGDLNPDNSDVDKLFIQLVQTYNQLFEENPINASGVDAKAILSARLSKSRRLENLIAQLPGEKKNGLFGNLIALSLGLTPNFKSNFDLAEDAKLQLSKDTYDDDLDNLLAQIGDQYADLFLAAKNLSDAILLSDILRVNTEITKAPLSASMIKRYDEHHQDLTLLKALVRQQLPEKYKEIFFDQSKNGYAGYIDGGASQEEFYKFIKPILEKMDGTEELLVKLNREDLLRKQRTFDNGSIPHQIHLGELHAILRRQEDFYPFLKDNREKIEKILTFRIPYYVGPLARGNSRFAWMTRKSEETITPWNFEEVVDKGASAQSFIERMTNFDKNLPNEKVLPKHSLLYEYFTVYNELTKVKYVTEGMRKPAFLSGEQKKAIVDLLFKTNRKVTVKQLKEDYFKKIECFDSVEISGVEDRFNASLGTYHDLLKIIKDKDFLDNEENEDILEDIVLTLTLFEDREMIEERLKTYAHLFDDKVMKQLKRRRYTGWGRLSRKLINGIRDKQSGKTILDFLKSDGFANRNFMQLIHDDSLTFKEDIQKAQVSGQGDSLHEHIANLAGSPAIKKGILQTVKVVDELVKVMGRHKPENIVIEMARENQTTQKGQKNSRERMKRIEEGIKELGSQILKEHPVENTQLQNEKLYLYYLQNGRDMYVDQELDINRLSDYDVDHIVPQSFLKDDSIDNKVLTRSDKARGKSDNVPSEEVVKKMKNYWRQLLNAKLITQRKFDNLTKAERGGLSELDKAGFIKRQLVETRQITKHVAQILDSRMNTKYDENDKLIREVKVITLKSKLVSDFRKDFQFYKVREINNYHHAHDAYLNAVVGTALIKKYPKLESEFVYGDYKVYDVRKMIAKSEQEIGKATAKYFFYSNIMNFFKTEITLANGEIRKRPLIETNGETGEIVWDKGRDFATVRKVLSMPQVNIVKKTEVQTGGFSKESILPKRNSDKLIARKKDWDPKKYGGFDSPTVAYSVLVVAKVEKGKSKKLKSVKELLGITIMERSSFEKNPIDFLEAKGYKEVKKDLIIKLPKYSLFELENGRKRMLASAGELQKGNELALPSKYVNFLYLASHYEKLKGSPEDNEQKQLFVEQHKHYLDEIIEQISEFSKRVILADANLDKVLSAYNKHRDKPIREQAENIIHLFTLTNLGAPAAFKYFDTTIDRKRYTSTKEVLDATLIHQSITGLYETRIDLSQLGGDGGPAPGGSGGTAPLEEEYRLFLEAPIQNVTLLEQWKREIPKVWAEINPPGLASTQAPIHVQLLSTALPVRVRQYPITLEAKRSLRETIRKFRAAGILRPVHSPWNTPLLPVRKSGTSEYRMVQDLREVNKRVETIHPTVPNPYTLLSLLPPDRIWYSVLDLKDAFFCIPLAPESQLIFAFEWADAEEGESGQLTWTRLPQGFKNSPTLFNEALNRDLQGFRLDHPSVSLLQYVDDLLIAADTQAACLSATRDLLMTLAELGYRVSGKKAQLCQEEVTYLGFKIHKGSRSLSNSRTQAILQIPVPKTKRQVREFLGKIGYCRLFIPGFAELAQPLYAATRPGNDPLVWGEKEEEAFQSLKLALTQPPALALPSLDKPFQLFVEETSGAAKGVLTQALGPWKRPVAYLSKRLDPVAAGWPRCLRAIAAAALLTREASKLTFGQDIEITSSHNLESLLRSPPDKWLTNARITQYQVLLLDPPRVRFKQTAALNPATLLPETDDTLPIHHCLDTLDSLTSTRPDLTDQPLAQAEATLFTDGSSYIRDGKRYAGAAVVTLDSVIWAEPLPIGTSAQKAELIALTKALEWSKDKSVNIYTDSRYAFATLHVHGMIYRERGWLTAGGKAIKNAPEILALLTAVWLPKRVAVMHCKGHQKDDAPTSTGNRRADEVAREVAIRPLSTQATISAGKRTADGSEFEKRTADGSEFESPKKKAKVE

SEQ ID NO: 6653 - protein, 2089 aa, synthetic construct
MPAAKRVKLDGGDKKYSIGLDIGTNSVGWAVITDEYKVPSKKFKVLGNTDRHSIKKNLIGALLFDSGETAEATRLKRTARRRYTRRKNRICYLQEIFSNEMAKVDDSFFHRLEESFLVEEDKKHERHPIFGNIVDEVAYHEKYPTIYHLRKKLVDSTDKADLRLIYLALAHMIKFRGHFLIEGDLNPDNSDVDKLFIQLVQTYNQLFEENPINASGVDAKAILSARLSKSRRLENLIAQLPGEKKNGLFGNLIALSLGLTPNFKSNFDLAEDAKLQLSKDTYDDDLDNLLAQIGDQYADLFLAAKNLSDAILLSDILRVNTEITKAPLSASMIKRYDEHHQDLTLLKALVRQQLPEKYKEIFFDQSKNGYAGYIDGGASQEEFYKFIKPILEKMDGTEELLVKLNREDLLRKQRTFDNGSIPHQIHLGELHAILRRQEDFYPFLKDNREKIEKILTFRIPYYVGPLARGNSRFAWMTRKSEETITPWNFEEVVDKGASAQSFIERMTNFDKNLPNEKVLPKHSLLYEYFTVYNELTKVKYVTEGMRKPAFLSGEQKKAIVDLLFKTNRKVTVKQLKEDYFKKIECFDSVEISGVEDRFNASLGTYHDLLKIIKDKDFLDNEENEDILEDIVLTLTLFEDREMIEERLKTYAHLFDDKVMKQLKRRRYTGWGRLSRKLINGIRDKQSGKTILDFLKSDGFANRNFMQLIHDDSLTFKEDIQKAQVSGQGDSLHEHIANLAGSPAIKKGILQTVKVVDELVKVMGRHKPENIVIEMARENQTTQKGQKNSRERMKRIEEGIKELGSQILKEHPVENTQLQNEKLYLYYLQNGRDMYVDQELDINRLSDYDVDHIVPQSFLKDDSIDNKVLTRSDKARGKSDNVPSEEVVKKMKNYWRQLLNAKLITQRKFDNLTKAERGGLSELDKAGFIKRQLVETRQITKHVAQILDSRMNTKYDENDKLIREVKVITLKSKLVSDFRKDFQFYKVREINNYHHAHDAYLNAVVGTALIKKYPKLESEFVYGDYKVYDVRKMIAKSEQEIGKATAKYFFYSNIMNFFKTEITLANGEIRKRPLIETNGETGEIVWDKGRDFATVRKVLSMPQVNIVKKTEVQTGGFSKESILPKRNSDKLIARKKDWDPKKYGGFDSPTVAYSVLVVAKVEKGKSKKLKSVKELLGITIMERSSFEKNPIDFLEAKGYKEVKKDLIIKLPKYSLFELENGRKRMLASAGELQKGNELALPSKYVNFLYLASHYEKLKGSPEDNEQKQLFVEQHKHYLDEIIEQISEFSKRVILADANLDKVLSAYNKHRDKPIREQAENIIHLFTLTNLGAPAAFKYFDTTIDRKRYTSTKEVLDATLIHQSITGLYETRIDLSQLGGDGGPAPGGSGGVLNLEEEYRLHEKPVPSSIDPSWLQLFPTVWAERAGMGLANQVPPVVVELRSGASPVAVRQYPMSKEAREGIRPHIQKFLDLGVLVPCRSPWNTPLLPVKKPGTNDYRPVQDLREINKRVQDIHPTVPNPYNLLSSLPPSYTWYSVLDLKDAFFCLRLHPNSQPLFAFEWKDPEKGNTGQLTWTRLPQGFKNSPTLFDEALHRDLAPFRALNPQVVLLQYVDDLLVAAPTYEDCKKGTQKLLQELSKLGYRVSAKKAQLCQREVTYLGYLLKEGKRWLTPARKATVMKIPVPTTPRQVREFLGTAGFCRLWIPGFASLAAPLYPLTKESIPFIWTEEHQQAFDHIKKALLSAPALALPDLTKPFTLYIDERAGVARGVLTQTLGPWRRPVAYLSKKLDPVASGWPTCLKAVAAVALLLKDADKLTLGQNVTVIASHSLESIVRQPPDRWMTNARMTHYQSLLLNERVSFAPPAVLNPATLLPVESEATPVHRCSEILAEETGTRRDLEDQPLPGVPTWYTDGSSFITEGKRRAGAPIVDGKRTVWASSLPEGTSAQKAELVALTQALRLAEGKNINIYTDSRYAFATAHIHGAIYKQRGLLTSAGKDIKNKEEILALLEAIHLPRRVAIIHCPGHQRGSNPVATGNRRADEAAKQAALSTRVLAGTTKPAGKRTADGSEFEKRTADGSEFESPKKKAKVE

SEQ ID NO: 6654 - protein, 2213 aa, synthetic construct
MPAAKRVKLDGGDKKYSIGLDIGTNSVGWAVITDEYKVPSKKFKVLGNTDRHSIKKNLIGALLFDSGETAEATRLKRTARRRYTRRKNRICYLQEIFSNEMAKVDDSFFHRLEESFLVEEDKKHERHPIFGNIVDEVAYHEKYPTIYHLRKKLVDSTDKADLRLIYLALAHMIKFRGHFLIEGDLNPDNSDVDKLFIQLVQTYNQLFEENPINASGVDAKAILSARLSKSRRLENLIAQLPGEKKNGLFGNLIALSLGLTPNFKSNFDLAEDAKLQLSKDTYDDDLDNLLAQIGDQYADLFLAAKNLSDAILLSDILRVNTEITKAPLSASMIKRYDEHHQDLTLLKALVRQQLPEKYKEIFFDQSKNGYAGYIDGGASQEEFYKFIKPILEKMDGTEELLVKLNREDLLRKQRTFDNGSIPHQIHLGELHAILRRQEDFYPFLKDNREKIEKILTFRIPYYVGPLARGNSRFAWMTRKSEETITPWNFEEVVDKGASAQSFIERMTNFDKNLPNEKVLPKHSLLYEYFTVYNELTKVKYVTEGMRKPAFLSGEQKKAIVDLLFKTNRKVTVKQLKEDYFKKIECFDSVEISGVEDRFNASLGTYHDLLKIIKDKDFLDNEENEDILEDIVLTLTLFEDREMIEERLKTYAHLFDDKVMKQLKRRRYTGWGRLSRKLINGIRDKQSGKTILDFLKSDGFANRNFMQLIHDDSLTFKEDIQKAQVSGQGDSLHEHIANLAGSPAIKKGILQTVKVVDELVKVMGRHKPENIVIEMARENQTTQKGQKNSRERMKRIEEGIKELGSQILKEHPVENTQLQNEKLYLYYLQNGRDMYVDQELDINRLSDYDVDHIVPQSFLKDDSIDNKVLTRSDKARGKSDNVPSEEVVKKMKNYWRQLLNAKLITQRKFDNLTKAERGGLSELDKAGFIKRQLVETRQITKHVAQILDSRMNTKYDENDKLIREVKVITLKSKLVSDFRKDFQFYKVREINNYHHAHDAYLNAVVGTALIKKYPKLESEFVYGDYKVYDVRKMIAKSEQEIGKATAKYFFYSNIMNFFKTEITLANGEIRKRPLIETNGETGEIVWDKGRDFATVRKVLSMPQVNIVKKTEVQTGGFSKESILPKRNSDKLIARKKDWDPKKYGGFDSPTVAYSVLVVAKVEKGKSKKLKSVKELLGITIMERSSFEKNPIDFLEAKGYKEVKKDLIIKLPKYSLFELENGRKRMLASAGELQKGNELALPSKYVNFLYLASHYEKLKGSPEDNEQKQLFVEQHKHYLDEIIEQISEFSKRVILADANLDKVLSAYNKHRDKPIREQAENIIHLFTLTNLGAPAAFKYFDTTIDRKRYTSTKEVLDATLIHQSITGLYETRIDLSQLGGDGGPAPGGSGGTLGDQGSRGSDPLPEPRVTLTVEGIPTEFLVNTGAEHSVLTKPMGKMGSKRTVVAGATGSKVYPWTTKRLLKIGQKQVTHSFLVIPECPAPLLGRDLLTKLKAQIQFSTEGPQVTWEDRPAMCLVLNLEEEYRLHEKPVPPSIDPSWLQLFPMVWAEKAGMGLANQVPPVVVELKSDASPVAVRQYPMSKEAREGIRPHIQRFLDLGILVPCQSPWNTPLLPVKKPGTNDYRPVQDLREVNKRVQDIHPTVPNPYNLLSSLPPSHTWYSVLDLKDAFFCLKLHPNSQPLFAFEWRDPEKGNTGQLTWTRLPQGFKNSPTLFNEALHRDLASFRALNPQVVMLQYVDDLLVAAPTYRDCKEGTRRLLQELSKLGYRVSAKKAQLCREEVTYLGYLLKGGKRWLTPARKATVMKIPTPTTPRQVREFLGTAGFCRLWIPGFASLAAPLYPLTRPKVPFTWTEAHQEAFGRIKEALLSAPALALPDLTKPFALYVDEKEGVARGVLTQTLGPWRRPVAYLSKKLDPVASGWPTCLKAIAAVALLLKDADKLTLGQNVLVIAPHNLESIVRQPPDRWMTNARMTHYQSLLLNERVSFAPPAILNPATLLPVESDDTPIHICSEILAEETGTRPDLRDQPLPGVPAWYTDGSSFIMDGRRQAGAAIVDNKRTVWASNLPEGTSAQKAELIALTQALRLAEGKSINIYTDSRYAFATAHVHGAIYKQRGWLTSAGKDIKNKEEILALLEAIHLPKRVAIIHCPGHQRGTDPVATGNRKADEAAKQAAQSTRILTETTKNAGKRTADGSEFEKRTADGSEFESPKKKAKVE

SEQ ID NO: 6655 - protein, 2091 aa, synthetic construct
MPAAKRVKLDGGDKKYSIGLDIGTNSVGWAVITDEYKVPSKKFKVLGNTDRHSIKKNLIGALLFDSGETAEATRLKRTARRRYTRRKNRICYLQEIFSNEMAKVDDSFFHRLEESFLVEEDKKHERHPIFGNIVDEVAYHEKYPTIYHLRKKLVDSTDKADLRLIYLALAHMIKFRGHFLIEGDLNPDNSDVDKLFIQLVQTYNQLFEENPINASGVDAKAILSARLSKSRRLENLIAQLPGEKKNGLFGNLIALSLGLTPNFKSNFDLAEDAKLQLSKDTYDDDLDNLLAQIGDQYADLFLAAKNLSDAILLSDILRVNTEITKAPLSASMIKRYDEHHQDLTLLKALVRQQLPEKYKEIFFDQSKNGYAGYIDGGASQEEFYKFIKPILEKMDGTEELLVKLNREDLLRKQRTFDNGSIPHQIHLGELHAILRRQEDFYPFLKDNREKIEKILTFRIPYYVGPLARGNSRFAWMTRKSEETITPWNFEEVVDKGASAQSFIERMTNFDKNLPNEKVLPKHSLLYEYFTVYNELTKVKYVTEGMRKPAFLSGEQKKAIVDLLFKTNRKVTVKQLKEDYFKKIECFDSVEISGVEDRFNASLGTYHDLLKIIKDKDFLDNEENEDILEDIVLTLTLFEDREMIEERLKTYAHLFDDKVMKQLKRRRYTGWGRLSRKLINGIRDKQSGKTILDFLKSDGFANRNFMQLIHDDSLTFKEDIQKAQVSGQGDSLHEHIANLAGSPAIKKGILQTVKVVDELVKVMGRHKPENIVIEMARENQTTQKGQKNSRERMKRIEEGIKELGSQILKEHPVENTQLQNEKLYLYYLQNGRDMYVDQELDINRLSDYDVDHIVPQSFLKDDSIDNKVLTRSDKARGKSDNVPSEEVVKKMKNYWRQLLNAKLITQRKFDNLTKAERGGLSELDKAGFIKRQLVETRQITKHVAQILDSRMNTKYDENDKLIREVKVITLKSKLVSDFRKDFQFYKVREINNYHHAHDAYLNAVVGTALIKKYPKLESEFVYGDYKVYDVRKMIAKSEQEIGKATAKYFFYSNIMNFFKTEITLANGEIRKRPLIETNGETGEIVWDKGRDFATVRKVLSMPQVNIVKKTEVQTGGFSKESILPKRNSDKLIARKKDWDPKKYGGFDSPTVAYSVLVVAKVEKGKSKKLKSVKELLGITIMERSSFEKNPIDFLEAKGYKEVKKDLIIKLPKYSLFELENGRKRMLASAGELQKGNELALPSKYVNFLYLASHYEKLKGSPEDNEQKQLFVEQHKHYLDEIIEQISEFSKRVILADANLDKVLSAYNKHRDKPIREQAENIIHLFTLTNLGAPAAFKYFDTTIDRKRYTSTKEVLDATLIHQSITGLYETRIDLSQLGGDGGPAPGGSGGTLNLEDEYRLYETSAEPEVSPGSTWLSDFPQAWAETGGMGLAVRQAPLIIPLKATSTPVSIKQYPMSQEAKLGIKPHIQRLLDQGILVPCQSPWNTPLLPVKKPGTNDYRPVQDLREVNKRVEDIHPTVPNPYNLLSGLPPSHRWYTVLDLKDAFFCLRLHPTSQPLFAFEWRDPGMGISGQLTWTRLPQGFKNSPTLFNEALHRDLADFRIQHPDLILLQYVDDILLAATSELDCQQGTRALLLTLGNLGYRASAKKAQLCQKQVKYLGYLLKEGQRWLTEARKETVMGQPTPKTPRQLREFLGKAGFCRLFIPGFAEMAAPLYPLTKPGTLFNWGPDQQKAYQEIKQALLTAPALGLPDLTKPFELFVDEKQGYAKGVLTQKLGPWRRPVAYLSKKLDPVAAGWPPCLRMVAAIAVLRKDAGKLTMGQPLVILAPHAVEALVKQPPDRWLSNARMTHYQAMLLDTDRVQFGPVVALNPATLLPLPEEGAPHDCLEILAETHGTRPDLTDQPIPDADHTWYTDGSSFLQEGQRKAGAAVTTETEVIWARALPAGTSAQRAELIALTQALKMAEGKRLNVYTDSRYAFATAHIHGEIYRRRGWLTSEGREIKNKSEILALLKALFLPKRLSIIHCLGHQKGDSAEARGNRLADQAAREAAIKTPPDTSTLLAGKRTADGSEFEKRTADGSEFESPKKKAKVE

SEQ ID NO: 6656 - protein, 2082 aa, synthetic construct
MPAAKRVKLDGGDKKYSIGLDIGTNSVGWAVITDEYKVPSKKFKVLGNTDRHSIKKNLIGALLFDSGETAEATRLKRTARRRYTRRKNRICYLQEIFSNEMAKVDDSFFHRLEESFLVEEDKKHERHPIFGNIVDEVAYHEKYPTIYHLRKKLVDSTDKADLRLIYLALAHMIKFRGHFLIEGDLNPDNSDVDKLFIQLVQTYNQLFEENPINASGVDAKAILSARLSKSRRLENLIAQLPGEKKNGLFGNLIALSLGLTPNFKSNFDLAEDAKLQLSKDTYDDDLDNLLAQIGDQYADLFLAAKNLSDAILLSDILRVNTEITKAPLSASMIKRYDEHHQDLTLLKALVRQQLPEKYKEIFFDQSKNGYAGYIDGGASQEEFYKFIKPILEKMDGTEELLVKLNREDLLRKQRTFDNGSIPHQIHLGELHAILRRQEDFYPFLKDNREKIEKILTFRIPYYVGPLARGNSRFAWMTRKSEETITPWNFEEVVDKGASAQSFIERMTNFDKNLPNEKVLPKHSLLYEYFTVYNELTKVKYVTEGMRKPAFLSGEQKKAIVDLLFKTNRKVTVKQLKEDYFKKIECFDSVEISGVEDRFNASLGTYHDLLKIIKDKDFLDNEENEDILEDIVLTLTLFEDREMIEERLKTYAHLFDDKVMKQLKRRRYTGWGRLSRKLINGIRDKQSGKTILDFLKSDGFANRNFMQLIHDDSLTFKEDIQKAQVSGQGDSLHEHIANLAGSPAIKKGILQTVKVVDELVKVMGRHKPENIVIEMARENQTTQKGQKNSRERMKRIEEGIKELGSQILKEHPVENTQLQNEKLYLYYLQNGRDMYVDQELDINRLSDYDVDHIVPQSFLKDDSIDNKVLTRSDKARGKSDNVPSEEVVKKMKNYWRQLLNAKLITQRKFDNLTKAERGGLSELDKAGFIKRQLVETRQITKHVAQILDSRMNTKYDENDKLIREVKVITLKSKLVSDFRKDFQFYKVREINNYHHAHDAYLNAVVGTALIKKYPKLESEFVYGDYKVYDVRKMIAKSEQEIGKATAKYFFYSNIMNFFKTEITLANGEIRKRPLIETNGETGEIVWDKGRDFATVRKVLSMPQVNIVKKTEVQTGGFSKESILPKRNSDKLIARKKDWDPKKYGGFDSPTVAYSVLVVAKVEKGKSKKLKSVKELLGITIMERSSFEKNPIDFLEAKGYKEVKKDLIIKLPKYSLFELENGRKRMLASAGELQKGNELALPSKYVNFLYLASHYEKLKGSPEDNEQKQLFVEQHKHYLDEIIEQISEFSKRVILADANLDKVLSAYNKHRDKPIREQAENIIHLFTLTNLGAPAAFKYFDTTIDRKRYTSTKEVLDATLIHQSITGLYETRIDLSQLGGDGGPAPGGSGGIPWLMKKPLQLTTLVPLQEYEERLLKQTMLTGSYKEKLQSLFLKYDALWQHWENQVGHRRIKPHHIATGTVNPRPQKQYPINPKAKASIQTVINDLLKQGVLIQQNSIMNTPVYPVPKPDGKWRMVLDYREVNKTIPLIAAQNQHSAGILSSIFRGKYKTTLDLSNGFWAHSITPESYWLTAFTWLGQQYCWTRLPQGFLNSPALFNADVVDLLKEVPNVQVYVDDIYISHDDPREHLEQLEKVFSLLLNAGYVVSLKKSEIAQHEVEFLGFNITKEGRGLTETFKQKLLNITPPRDLKQLQSILGKLNFARNFIPNFSELVKPLYNIIATAPGKYITWTTDNSQQLQNIISMLNSAENLEERNPEVRLIMKVNTSPSAGYIRFYNEFAKRPIMYLNYVYTKAEVKFTNTEKLLTTIHKGLIKALDLGMGQEILVYSPIVSMTKIQKTPLPERKALPIRWITWMSYLEDPRIQFHYDKTLPELQQVPTVTDDIIAKIKHPSEFSMVFYTDGSAIKHPNVNKSHNAGMGIAQVQFKPEFTVINTWSIPLGDHTAQLAEVAAVEFACKKALKIDGPVLIVTDSFYVAESVNKELPYWQSNGFFNNKKKPLKHVSKWKSIADCIQLKPDIIIIHEKGHQPTASTFHTEGNNLADKLATQGSYVVNAGKRTADGSEFEKRTADGSEFESPKKKAKVE

SEQ ID NO: 6657 - protein, 2089 aa, synthetic construct
MPAAKRVKLDGGDKKYSIGLDIGTNSVGWAVITDEYKVPSKKFKVLGNTDRHSIKKNLIGALLFDSGETAEATRLKRTARRRYTRRKNRICYLQEIFSNEMAKVDDSFFHRLEESFLVEEDKKHERHPIFGNIVDEVAYHEKYPTIYHLRKKLVDSTDKADLRLIYLALAHMIKFRGHFLIEGDLNPDNSDVDKLFIQLVQTYNQLFEENPINASGVDAKAILSARLSKSRRLENLIAQLPGEKKNGLFGNLIALSLGLTPNFKSNFDLAEDAKLQLSKDTYDDDLDNLLAQIGDQYADLFLAAKNLSDAILLSDILRVNTEITKAPLSASMIKRYDEHHQDLTLLKALVRQQLPEKYKEIFFDQSKNGYAGYIDGGASQEEFYKFIKPILEKMDGTEELLVKLNREDLLRKQRTFDNGSIPHQIHLGELHAILRRQEDFYPFLKDNREKIEKILTFRIPYYVGPLARGNSRFAWMTRKSEETITPWNFEEVVDKGASAQSFIERMTNFDKNLPNEKVLPKHSLLYEYFTVYNELTKVKYVTEGMRKPAFLSGEQKKAIVDLLFKTNRKVTVKQLKEDYFKKIECFDSVEISGVEDRFNASLGTYHDLLKIIKDKDFLDNEENEDILEDIVLTLTLFEDREMIEERLKTYAHLFDDKVMKQLKRRRYTGWGRLSRKLINGIRDKQSGKTILDFLKSDGFANRNFMQLIHDDSLTFKEDIQKAQVSGQGDSLHEHIANLAGSPAIKKGILQTVKVVDELVKVMGRHKPENIVIEMARENQTTQKGQKNSRERMKRIEEGIKELGSQILKEHPVENTQLQNEKLYLYYLQNGRDMYVDQELDINRLSDYDVDHIVPQSFLKDDSIDNKVLTRSDKARGKSDNVPSEEVVKKMKNYWRQLLNAKLITQRKFDNLTKAERGGLSELDKAGFIKRQLVETRQITKHVAQILDSRMNTKYDENDKLIREVKVITLKSKLVSDFRKDFQFYKVREINNYHHAHDAYLNAVVGTALIKKYPKLESEFVYGDYKVYDVRKMIAKSEQEIGKATAKYFFYSNIMNFFKTEITLANGEIRKRPLIETNGETGEIVWDKGRDFATVRKVLSMPQVNIVKKTEVQTGGFSKESILPKRNSDKLIARKKDWDPKKYGGFDSPTVAYSVLVVAKVEKGKSKKLKSVKELLGITIMERSSFEKNPIDFLEAKGYKEVKKDLIIKLPKYSLFELENGRKRMLASAGELQKGNELALPSKYVNFLYLASHYEKLKGSPEDNEQKQLFVEQHKHYLDEIIEQISEFSKRVILADANLDKVLSAYNKHRDKPIREQAENIIHLFTLTNLGAPAAFKYFDTTIDRKRYTSTKEVLDATLIHQSITGLYETRIDLSQLGGDGGPAPGGSGGVLNLEEEYRLHEKPVPSSIDPSWLQLFPTVWAERAGMGLANQVPPVVVELRSGASPVAVRQYPMSKEAREGIRPHIQRFLDLGVLVPCQSPWNTPLLPVKKPGTNDYRPVQDLREINKRVQDIHPTVPNPYNLLSSLPPSHTWYSVLDLKDAFFCLKLHPNSQPLFAFEWRDPEKGNTGQLTWTRLPQGFKNSPTLFNEALHRDLAPFRALNPQVVLLQYVDDLLVAAPTYRDCKEGTQKLLQELSKLGYRVSAKKAQLCQKEVTYLGYLLKEGKRWLTPARKATVMKIPPPTTPRQVREFLGTAGFCRLWIPGFASLAAPLYPLTKPSIPFIWTEEHQKAFDRIKEALLSAPALALPDLTKPFTLYVDERAGVARGVLTQTLGPWRRPVAYLSKKLDPVASGWPTCLKAVAAVALLLKDADKLTLGQNVTVIASHSLESIVRQPPDRWMTNARMTHYQSLLLNERVSFAPPAVLNPATLLPVESEATPVHRCSEILAEETGTRRDLKDQPLPGVPAWYTDGSSFIAEGKRRAGAAIVDGKRTVWASSLPEGTSAQKAELVALTQALRLAEGKDINIYTDSRYAFATAHIHGAIYKQRGWLTSAGKDIKNKEEILALLEAIHLPKRVAIIHCPGHQKGNDPVATGNRRADEAAKQAALSTRVLAETTKPAGKRTADGSEFEKRTADGSEFESPKKKAKVE

SEQ ID NO: 6658 - protein, 2091 aa, synthetic construct
MPAAKRVKLDGGDKKYSIGLDIGTNSVGWAVITDEYKVPSKKFKVLGNTDRHSIKKNLIGALLFDSGETAEATRLKRTARRRYTRRKNRICYLQEIFSNEMAKVDDSFFHRLEESFLVEEDKKHERHPIFGNIVDEVAYHEKYPTIYHLRKKLVDSTDKADLRLIYLALAHMIKFRGHFLIEGDLNPDNSDVDKLFIQLVQTYNQLFEENPINASGVDAKAILSARLSKSRRLENLIAQLPGEKKNGLFGNLIALSLGLTPNFKSNFDLAEDAKLQLSKDTYDDDLDNLLAQIGDQYADLFLAAKNLSDAILLSDILRVNTEITKAPLSASMIKRYDEHHQDLTLLKALVRQQLPEKYKEIFFDQSKNGYAGYIDGGASQEEFYKFIKPILEKMDGTEELLVKLNREDLLRKQRTFDNGSIPHQIHLGELHAILRRQEDFYPFLKDNREKIEKILTFRIPYYVGPLARGNSRFAWMTRKSEETITPWNFEEVVDKGASAQSFIERMTNFDKNLPNEKVLPKHSLLYEYFTVYNELTKVKYVTEGMRKPAFLSGEQKKAIVDLLFKTNRKVTVKQLKEDYFKKIECFDSVEISGVEDRFNASLGTYHDLLKIIKDKDFLDNEENEDILEDIVLTLTLFEDREMIEERLKTYAHLFDDKVMKQLKRRRYTGWGRLSRKLINGIRDKQSGKTILDFLKSDGFANRNFMQLIHDDSLTFKEDIQKAQVSGQGDSLHEHIANLAGSPAIKKGILQTVKVVDELVKVMGRHKPENIVIEMARENQTTQKGQKNSRERMKRIEEGIKELGSQILKEHPVENTQLQNEKLYLYYLQNGRDMYVDQELDINRLSDYDVDHIVPQSFLKDDSIDNKVLTRSDKARGKSDNVPSEEVVKKMKNYWRQLLNAKLITQRKFDNLTKAERGGLSELDKAGFIKRQLVETRQITKHVAQILDSRMNTKYDENDKLIREVKVITLKSKLVSDFRKDFQFYKVREINNYHHAHDAYLNAVVGTALIKKYPKLESEFVYGDYKVYDVRKMIAKSEQEIGKATAKYFFYSNIMNFFKTEITLANGEIRKRPLIETNGETGEIVWDKGRDFATVRKVLSMPQVNIVKKTEVQTGGFSKESILPKRNSDKLIARKKDWDPKKYGGFDSPTVAYSVLVVAKVEKGKSKKLKSVKELLGITIMERSSFEKNPIDFLEAKGYKEVKKDLIIKLPKYSLFELENGRKRMLASAGELQKGNELALPSKYVNFLYLASHYEKLKGSPEDNEQKQLFVEQHKHYLDEIIEQISEFSKRVILADANLDKVLSAYNKHRDKPIREQAENIIHLFTLTNLGAPAAFKYFDTTIDRKRYTSTKEVLDATLIHQSITGLYETRIDLSQLGGDGGPAPGGSGGTLNIEDEYRLHETSKEPDVPLGSTWLSDFPQAWAETGGMGLAVRQAPLIIPLKATSTPVSIKQYPMSQEARLGIKPHIQRLLDQGILVPCQSPWNTPLLPVKKPGTNDYRPVQDLREVNKRVEDIHPTVPNPYNLLSGLPPSHQWYTVLDLKDAFFCLRLHPTSQPLFAFEWRDPEMGISGQLTWTRLPQGFKNSPTLFNEALHRDLADFRIQHPDLILLQYVDDLLLAATSEQDCQRGTRALLQTLGNLGYRASAKKAQICQKQVKYLGYLLKEGQRWLTEARKETVMGQPTPKTPRQLREFLGTAGFCRLWIPGFAEMAAPLYPLTKPGTLFNWGPDQQKAYQEIKQALLTAPALGLPDLTKPFELFVDEKQGYAKGVLTQKLGPWRRPVAYLSKKLDPVAAGWPPCLRMVAAIAVLTKDAGKLTMGQPLVILAPHAVEALVKQPPDRWLSNARMTHYQAMLLDTDRVQFGPVVALNPATLLPLPEKEAPHDCLEILAETHGTRPDLTDQPIPDADYTWYTDGSSFLQEGQRRAGAAVTTETEVIWARALPAGTSAQRAELIALTQALKMAEGKKLNVYTDSRYAFATAHVHGEIYRRRGWLTSEGREIKNKNEILALLKALFLPKRLSIIHCPGHQKGNSAEARGNRMADQAAREAAMKAVLETSTLLAGKRTADGSEFEKRTADGSEFESPKKKAKVE

SEQ ID NO: 6659 - protein, 2093 aa, synthetic construct
MPAAKRVKLDGGDKKYSIGLDIGTNSVGWAVITDEYKVPSKKFKVLGNTDRHSIKKNLIGALLFDSGETAEATRLKRTARRRYTRRKNRICYLQEIFSNEMAKVDDSFFHRLEESFLVEEDKKHERHPIFGNIVDEVAYHEKYPTIYHLRKKLVDSTDKADLRLIYLALAHMIKFRGHFLIEGDLNPDNSDVDKLFIQLVQTYNQLFEENPINASGVDAKAILSARLSKSRRLENLIAQLPGEKKNGLFGNLIALSLGLTPNFKSNFDLAEDAKLQLSKDTYDDDLDNLLAQIGDQYADLFLAAKNLSDAILLSDILRVNTEITKAPLSASMIKRYDEHHQDLTLLKALVRQQLPEKYKEIFFDQSKNGYAGYIDGGASQEEFYKFIKPILEKMDGTEELLVKLNREDLLRKQRTFDNGSIPHQIHLGELHAILRRQEDFYPFLKDNREKIEKILTFRIPYYVGPLARGNSRFAWMTRKSEETITPWNFEEVVDKGASAQSFIERMTNFDKNLPNEKVLPKHSLLYEYFTVYNELTKVKYVTEGMRKPAFLSGEQKKAIVDLLFKTNRKVTVKQLKEDYFKKIECFDSVEISGVEDRFNASLGTYHDLLKIIKDKDFLDNEENEDILEDIVLTLTLFEDREMIEERLKTYAHLFDDKVMKQLKRRRYTGWGRLSRKLINGIRDKQSGKTILDFLKSDGFANRNFMQLIHDDSLTFKEDIQKAQVSGQGDSLHEHIANLAGSPAIKKGILQTVKVVDELVKVMGRHKPENIVIEMARENQTTQKGQKNSRERMKRIEEGIKELGSQILKEHPVENTQLQNEKLYLYYLQNGRDMYVDQELDINRLSDYDVDHIVPQSFLKDDSIDNKVLTRSDKARGKSDNVPSEEVVKKMKNYWRQLLNAKLITQRKFDNLTKAERGGLSELDKAGFIKRQLVETRQITKHVAQILDSRMNTKYDENDKLIREVKVITLKSKLVSDFRKDFQFYKVREINNYHHAHDAYLNAVVGTALIKKYPKLESEFVYGDYKVYDVRKMIAKSEQEIGKATAKYFFYSNIMNFFKTEITLANGEIRKRPLIETNGETGEIVWDKGRDFATVRKVLSMPQVNIVKKTEVQTGGFSKESILPKRNSDKLIARKKDWDPKKYGGFDSPTVAYSVLVVAKVEKGKSKKLKSVKELLGITIMERSSFEKNPIDFLEAKGYKEVKKDLIIKLPKYSLFELENGRKRMLASAGELQKGNELALPSKYVNFLYLASHYEKLKGSPEDNEQKQLFVEQHKHYLDEIIEQISEFSKRVILADANLDKVLSAYNKHRDKPIREQAENIIHLFTLTNLGAPAAFKYFDTTIDRKRYTSTKEVLDATLIHQSITGLYETRIDLSQLGGDGGGGGGSSGGTAPLEEEYRLFLEAPIQNVTLLEQWKREIPKVWAEINPPGLASTQAPIHVQLLSTALPVRVRQYPITLEAKRSLRETIRKFRAAGILRPVHSPWNTPLLPVRKSGTSEYRMVQDLREVNKRVETIHPTVPNPYTLLSLLPPDRIWYSVLDLKDAFFCIPLAPESQLIFAFEWADAEEGESGQLTWTRLPQGFKNSPTLFNEALNRDLQGFRLDHPSVSLLQYVDDLLIAADTQAACLSATRDLLMTLAELGYRVSGKKAQLCQEEVTYLGFKIHKGSRSLSNSRTQAILQIPVPKTKRQVREFLGTIGYCRLWIPGFAELAQPLYAATRPGNDPLVWGEKEEEAFQSLKLALTQPPALALPSLDKPFQLFVEETSGAAKGVLTQALGPWKRPVAYLSKRLDPVAAGWPRCLRAIAAAALLTREASKLTFGQDIEITSSHNLESLLRSPPDKWLTNARITQYQVLLLDPPRVRFKQTAALNPATLLPETDDTLPIHHCLDTLDSLTSTRPDLTDQPLAQAEATLFTDGSSYIRDGKRYAGAAVVTLDSVIWAEPLPIGTSAQKAELIALTKALEWSKDKSVNIYTDSRYAFATLHVHGMIYRERGWLTAGGKAIKNAPEILALLTAVWLPKRVAVMHCKGHQKDDAPTSTGNRRADEVAREVAIRPLSTQATISAGKRTADGSEFEKRTADGSEFESPKKKAKVE

SEQ ID NO: 6660 - protein, 2082 aa, synthetic construct
MPAAKRVKLDGGDKKYSIGLDIGTNSVGWAVITDEYKVPSKKFKVLGNTDRHSIKKNLIGALLFDSGETAEATRLKRTARRRYTRRKNRICYLQEIFSNEMAKVDDSFFHRLEESFLVEEDKKHERHPIFGNIVDEVAYHEKYPTIYHLRKKLVDSTDKADLRLIYLALAHMIKFRGHFLIEGDLNPDNSDVDKLFIQLVQTYNQLFEENPINASGVDAKAILSARLSKSRRLENLIAQLPGEKKNGLFGNLIALSLGLTPNFKSNFDLAEDAKLQLSKDTYDDDLDNLLAQIGDQYADLFLAAKNLSDAILLSDILRVNTEITKAPLSASMIKRYDEHHQDLTLLKALVRQQLPEKYKEIFFDQSKNGYAGYIDGGASQEEFYKFIKPILEKMDGTEELLVKLNREDLLRKQRTFDNGSIPHQIHLGELHAILRRQEDFYPFLKDNREKIEKILTFRIPYYVGPLARGNSRFAWMTRKSEETITPWNFEEVVDKGASAQSFIERMTNFDKNLPNEKVLPKHSLLYEYFTVYNELTKVKYVTEGMRKPAFLSGEQKKAIVDLLFKTNRKVTVKQLKEDYFKKIECFDSVEISGVEDRFNASLGTYHDLLKIIKDKDFLDNEENEDILEDIVLTLTLFEDREMIEERLKTYAHLFDDKVMKQLKRRRYTGWGRLSRKLINGIRDKQSGKTILDFLKSDGFANRNFMQLIHDDSLTFKEDIQKAQVSGQGDSLHEHIANLAGSPAIKKGILQTVKVVDELVKVMGRHKPENIVIEMARENQTTQKGQKNSRERMKRIEEGIKELGSQILKEHPVENTQLQNEKLYLYYLQNGRDMYVDQELDINRLSDYDVDHIVPQSFLKDDSIDNKVLTRSDKARGKSDNVPSEEVVKKMKNYWRQLLNAKLITQRKFDNLTKAERGGLSELDKAGFIKRQLVETRQITKHVAQILDSRMNTKYDENDKLIREVKVITLKSKLVSDFRKDFQFYKVREINNYHHAHDAYLNAVVGTALIKKYPKLESEFVYGDYKVYDVRKMIAKSEQEIGKATAKYFFYSNIMNFFKTEITLANGEIRKRPLIETNGETGEIVWDKGRDFATVRKVLSMPQVNIVKKTEVQTGGFSKESILPKRNSDKLIARKKDWDPKKYGGFDSPTVAYSVLVVAKVEKGKSKKLKSVKELLGITIMERSSFEKNPIDFLEAKGYKEVKKDLIIKLPKYSLFELENGRKRMLASAGELQKGNELALPSKYVNFLYLASHYEKLKGSPEDNEQKQLFVEQHKHYLDEIIEQISEFSKRVILADANLDKVLSAYNKHRDKPIREQAENIIHLFTLTNLGAPAAFKYFDTTIDRKRYTSTKEVLDATLIHQSITGLYETRIDLSQLGGDGGGGGGSSGGVPWILKKPLELTIKLDLEEQQGTLLNNSILSKKGKEELKQLFEKYSALWQSWENQVGHRRIRPHKIATGTVKPTPQKQYHINPKAKPDIQIVINDLLKQGVLIQKESTMNTPVYPVPKPNGRWRMVLDYRAVNKVTPLIAVQNQHSYGILGSLFKGRYKTTIDLSNGFWAHPIVPEDYWITAFTWQGKQYCWTVLPQGFLNSPGLFTGDVVDLLQGIPNVEVYVDDVYISHDSEKEHLEYLDILFNRLKEAGYIISLKKSNIANSIVDFLGFQITNEGRGLTDTFKEKLENITAPTTLKQLQSILGLLNFARNFIPDFTELIAPLYALIPKSTKNYVPWQIEHSTTLETLITKLNGAEYLQGRKGDKTLIMKVNASYTTGYIRYYNEGEKKPISYVSIVFSKTELKFTELEKLLTTVHKGLLKALDLSMGQNIHVYSPIVSMQNIQKTPQTAKKALASRWLSWLSYLEDPRIRFFYDPQMPALKDLPAVDTGKDNKKHPSNFQHIFYTDGSAITSPTKEGHLNAGMGIVYFINKDGNLQKQQEWSISLGNHTAQFAEIAAFEFALKKCLPLGGNILVVTDSNYVAKAYNEELDVWASNGFVNNRKKPLKHISKWKSVADLKRLRPDVVVTHEPGHQKLDSSPHAYGNNLADQLATQASFKVHAGKRTADGSEFEKRTADGSEFESPKKKAKVE

SEQ ID NO: 6661 - protein, 2091 aa, synthetic construct
MPAAKRVKLDGGDKKYSIGLDIGTNSVGWAVITDEYKVPSKKFKVLGNTDRHSIKKNLIGALLFDSGETAEATRLKRTARRRYTRRKNRICYLQEIFSNEMAKVDDSFFHRLEESFLVEEDKKHERHPIFGNIVDEVAYHEKYPTIYHLRKKLVDSTDKADLRLIYLALAHMIKFRGHFLIEGDLNPDNSDVDKLFIQLVQTYNQLFEENPINASGVDAKAILSARLSKSRRLENLIAQLPGEKKNGLFGNLIALSLGLTPNFKSNFDLAEDAKLQLSKDTYDDDLDNLLAQIGDQYADLFLAAKNLSDAILLSDILRVNTEITKAPLSASMIKRYDEHHQDLTLLKALVRQQLPEKYKEIFFDQSKNGYAGYIDGGASQEEFYKFIKPILEKMDGTEELLVKLNREDLLRKQRTFDNGSIPHQIHLGELHAILRRQEDFYPFLKDNREKIEKILTFRIPYYVGPLARGNSRFAWMTRKSEETITPWNFEEVVDKGASAQSFIERMTNFDKNLPNEKVLPKHSLLYEYFTVYNELTKVKYVTEGMRKPAFLSGEQKKAIVDLLFKTNRKVTVKQLKEDYFKKIECFDSVEISGVEDRFNASLGTYHDLLKIIKDKDFLDNEENEDILEDIVLTLTLFEDREMIEERLKTYAHLFDDKVMKQLKRRRYTGWGRLSRKLINGIRDKQSGKTILDFLKSDGFANRNFMQLIHDDSLTFKEDIQKAQVSGQGDSLHEHIANLAGSPAIKKGILQTVKVVDELVKVMGRHKPENIVIEMARENQTTQKGQKNSRERMKRIEEGIKELGSQILKEHPVENTQLQNEKLYLYYLQNGRDMYVDQELDINRLSDYDVDHIVPQSFLKDDSIDNKVLTRSDKARGKSDNVPSEEVVKKMKNYWRQLLNAKLITQRKFDNLTKAERGGLSELDKAGFIKRQLVETRQITKHVAQILDSRMNTKYDENDKLIREVKVITLKSKLVSDFRKDFQFYKVREINNYHHAHDAYLNAVVGTALIKKYPKLESEFVYGDYKVYDVRKMIAKSEQEIGKATAKYFFYSNIMNFFKTEITLANGEIRKRPLIETNGETGEIVWDKGRDFATVRKVLSMPQVNIVKKTEVQTGGFSKESILPKRNSDKLIARKKDWDPKKYGGFDSPTVAYSVLVVAKVEKGKSKKLKSVKELLGITIMERSSFEKNPIDFLEAKGYKEVKKDLIIKLPKYSLFELENGRKRMLASAGELQKGNELALPSKYVNFLYLASHYEKLKGSPEDNEQKQLFVEQHKHYLDEIIEQISEFSKRVILADANLDKVLSAYNKHRDKPIREQAENIIHLFTLTNLGAPAAFKYFDTTIDRKRYTSTKEVLDATLIHQSITGLYETRIDLSQLGGDGGGGGGSSGGTLGIEDEYRLHETSTEPDVSLGSTWLSDFPQAWAETGGMGLAVRQAPLIIPLKATSTPVSIQQYPMSHEARLGIKPHIQRLLDQGILVPCQSPWNTPLLPVKKPGTNDYRPVQDLREVNKRVEDIHPTVPNPYNLLSGLPPSHQWYTVLDLKDAFFCLRLHPTSQPLFAFEWRDPGMGISGQLTWTRLPQGFKNSPTLFDEALHRDLADFRIQHPDLILLQYVDDILLAATSELDCQQGTRALLQTLGDLGYRASAKKAQICQKQVKYLGYLLREGQRWLTEARKETVMGQPVPKTPRQLREFLGTAGFCRLWIPGFAEMAAPLYPLTKTGTLFSWGPDQQKAYQEIKQALLTAPALGLPDLTKPFELFVDEKQGYAKGVLTQKLGPWRRPVAYLSKKLDPVAAGWPPCLRMVAAIAVLTKDAGKLTMGQPLVILAPHAVEALVKQPPDRWLSNARMTHYQAMLLDTDRVQFGPVVALNPATLLPLPEEGAPHDCLEILAETHGTRPDLTDQPIPDADHTWYTDGSSFLQEGQRKAGAAVTTETEVIWAGALPAGTSAQRAELIALTQALKMAEGKRLNVYTDSRYAFATAHIHGEIYRRRGLLTSEGREIKNKSEILALLKALFLPKRLSIIHCLGHQKGDSAEARGNRLADQAAREAAIKTPPDTSTLLAGKRTADGSEFEKRTADGSEFESPKKKAKVE

SEQ ID NO: 6662 - protein, 2091 aa, synthetic construct
MPAAKRVKLDGGDKKYSIGLDIGTNSVGWAVITDEYKVPSKKFKVLGNTDRHSIKKNLIGALLFDSGETAEATRLKRTARRRYTRRKNRICYLQEIFSNEMAKVDDSFFHRLEESFLVEEDKKHERHPIFGNIVDEVAYHEKYPTIYHLRKKLVDSTDKADLRLIYLALAHMIKFRGHFLIEGDLNPDNSDVDKLFIQLVQTYNQLFEENPINASGVDAKAILSARLSKSRRLENLIAQLPGEKKNGLFGNLIALSLGLTPNFKSNFDLAEDAKLQLSKDTYDDDLDNLLAQIGDQYADLFLAAKNLSDAILLSDILRVNTEITKAPLSASMIKRYDEHHQDLTLLKALVRQQLPEKYKEIFFDQSKNGYAGYIDGGASQEEFYKFIKPILEKMDGTEELLVKLNREDLLRKQRTFDNGSIPHQIHLGELHAILRRQEDFYPFLKDNREKIEKILTFRIPYYVGPLARGNSRFAWMTRKSEETITPWNFEEVVDKGASAQSFIERMTNFDKNLPNEKVLPKHSLLYEYFTVYNELTKVKYVTEGMRKPAFLSGEQKKAIVDLLFKTNRKVTVKQLKEDYFKKIECFDSVEISGVEDRFNASLGTYHDLLKIIKDKDFLDNEENEDILEDIVLTLTLFEDREMIEERLKTYAHLFDDKVMKQLKRRRYTGWGRLSRKLINGIRDKQSGKTILDFLKSDGFANRNFMQLIHDDSLTFKEDIQKAQVSGQGDSLHEHIANLAGSPAIKKGILQTVKVVDELVKVMGRHKPENIVIEMARENQTTQKGQKNSRERMKRIEEGIKELGSQILKEHPVENTQLQNEKLYLYYLQNGRDMYVDQELDINRLSDYDVDHIVPQSFLKDDSIDNKVLTRSDKARGKSDNVPSEEVVKKMKNYWRQLLNAKLITQRKFDNLTKAERGGLSELDKAGFIKRQLVETRQITKHVAQILDSRMNTKYDENDKLIREVKVITLKSKLVSDFRKDFQFYKVREINNYHHAHDAYLNAVVGTALIKKYPKLESEFVYGDYKVYDVRKMIAKSEQEIGKATAKYFFYSNIMNFFKTEITLANGEIRKRPLIETNGETGEIVWDKGRDFATVRKVLSMPQVNIVKKTEVQTGGFSKESILPKRNSDKLIARKKDWDPKKYGGFDSPTVAYSVLVVAKVEKGKSKKLKSVKELLGITIMERSSFEKNPIDFLEAKGYKEVKKDLIIKLPKYSLFELENGRKRMLASAGELQKGNELALPSKYVNFLYLASHYEKLKGSPEDNEQKQLFVEQHKHYLDEIIEQISEFSKRVILADANLDKVLSAYNKHRDKPIREQAENIIHLFTLTNLGAPAAFKYFDTTIDRKRYTSTKEVLDATLIHQSITGLYETRIDLSQLGGDGGGGGGSSGGTLNIEDEYRLHETSKEPDVSLGSTWLSDFPQAWAETGGMGLAVRQAPLIIPLKATSTPVSIKQYPMSQEARLGIKPHIQRLLDQGILVPCQSPWNTPLLPVKKPGTNDYRPVQDLREVNKRVEDIHPTVPNPYNLLSGLPPSHQWYTVLDLKDAFFCLRLHPTSQPLFAFEWRDPEMGISGQLTWTRLPQGFKNSPTLFNEALHRDLAGFRIQHPDLILLQYVDDLLLAATSELDCQQGTRALLQTLGDLGYRASAKKAQICQKQVKYLGYLLKEGQRWLTEARKETVMGQPIPKTPRQLREFLGTAGFCRLWIPGFAEMAAPLYPLTKPGTLFNWGPDQQKAFQEIKQALLTAPALGLPDLTKPFELFVDEKQGYAKGVLTQKLGPWRRPVAYLSKKLDPVAAGWPPCLRMVAAIAVLTKDAGKLTMGQPLVILAPHAVEALVKQPPDRWLSNARMTHYQALLLDTDRVQFGPVVALNPATLLPLPEEGLQHDCLDILAEAHGTRSDLMDQPLPDADHTWYTDGSSFLQEGQRKAGAAVTTETEVIWARALPAGTSAQRAELIALTQALKMAEGKKLNVYTDSRYAFATAHIHGEIYRRRGWLTSEGKEIKNKDEILALLKALFLPKRLSIIHCPGHQKGNSAEARGNRMADQAAREVATRETPETSTLLAGKRTADGSEFEKRTADGSEFESPKKKAKVE

SEQ ID NO: 6663 - protein, 2091 aa, synthetic construct
MPAAKRVKLDGGDKKYSIGLDIGTNSVGWAVITDEYKVPSKKFKVLGNTDRHSIKKNLIGALLFDSGETAEATRLKRTARRRYTRRKNRICYLQEIFSNEMAKVDDSFFHRLEESFLVEEDKKHERHPIFGNIVDEVAYHEKYPTIYHLRKKLVDSTDKADLRLIYLALAHMIKFRGHFLIEGDLNPDNSDVDKLFIQLVQTYNQLFEENPINASGVDAKAILSARLSKSRRLENLIAQLPGEKKNGLFGNLIALSLGLTPNFKSNFDLAEDAKLQLSKDTYDDDLDNLLAQIGDQYADLFLAAKNLSDAILLSDILRVNTEITKAPLSASMIKRYDEHHQDLTLLKALVRQQLPEKYKEIFFDQSKNGYAGYIDGGASQEEFYKFIKPILEKMDGTEELLVKLNREDLLRKQRTFDNGSIPHQIHLGELHAILRRQEDFYPFLKDNREKIEKILTFRIPYYVGPLARGNSRFAWMTRKSEETITPWNFEEVVDKGASAQSFIERMTNFDKNLPNEKVLPKHSLLYEYFTVYNELTKVKYVTEGMRKPAFLSGEQKKAIVDLLFKTNRKVTVKQLKEDYFKKIECFDSVEISGVEDRFNASLGTYHDLLKIIKDKDFLDNEENEDILEDIVLTLTLFEDREMIEERLKTYAHLFDDKVMKQLKRRRYTGWGRLSRKLINGIRDKQSGKTILDFLKSDGFANRNFMQLIHDDSLTFKEDIQKAQVSGQGDSLHEHIANLAGSPAIKKGILQTVKVVDELVKVMGRHKPENIVIEMARENQTTQKGQKNSRERMKRIEEGIKELGSQILKEHPVENTQLQNEKLYLYYLQNGRDMYVDQELDINRLSDYDVDHIVPQSFLKDDSIDNKVLTRSDKARGKSDNVPSEEVVKKMKNYWRQLLNAKLITQRKFDNLTKAERGGLSELDKAGFIKRQLVETRQITKHVAQILDSRMNTKYDENDKLIREVKVITLKSKLVSDFRKDFQFYKVREINNYHHAHDAYLNAVVGTALIKKYPKLESEFVYGDYKVYDVRKMIAKSEQEIGKATAKYFFYSNIMNFFKTEITLANGEIRKRPLIETNGETGEIVWDKGRDFATVRKVLSMPQVNIVKKTEVQTGGFSKESILPKRNSDKLIARKKDWDPKKYGGFDSPTVAYSVLVVAKVEKGKSKKLKSVKELLGITIMERSSFEKNPIDFLEAKGYKEVKKDLIIKLPKYSLFELENGRKRMLASAGELQKGNELALPSKYVNFLYLASHYEKLKGSPEDNEQKQLFVEQHKHYLDEIIEQISEFSKRVILADANLDKVLSAYNKHRDKPIREQAENIIHLFTLTNLGAPAAFKYFDTTIDRKRYTSTKEVLDATLIHQSITGLYETRIDLSQLGGDGGGGGGSSGGTLNIEDEHRLHETSKEPDVSLGSTWLSDFPQAWAETGGMGLAVRQAPLIIPLKATSTPVSIKQYPMSQEARLGIKPHIQRLLDQGILVPCQSPWNTPLLPVKKPGTNDYRPVQDLREVNKRVEDIHPTVPNPYNLLSGLPPSHQWYTVLDLKDAFFCLRLHPTSQPLFAFEWRDPEMGISGQLTWTRLPQGFKNSPTLFNEALHRDLADFRIQHPDLILLQYVDDLLLAATSELDCQQGTRALLQTLGNLGYRASAKKAQICQKQVKYLGYLLKEGQRWLTEARKETVMGQPTPKTPRQLREFLGTAGFCRLWIPGFAEMAAPLYPLTKPGTLFNWGPDQQKAYQEIKQALLTAPALGLPDLTKPFELFVDEKQGYAKGVLTQKLGPWRRPVAYLSKKLDPVAAGWPPCLRMVAAIAVLTKDAGKLTMGQPLVILAPHAVEALVKQPPDRWLSNARMTHYQALLLDTDRVQFGPVVALNPATLLPLPEEGLQHNCLDILAEAHGTRPDLTDQPLPDADHTWYTDGSSLLQEGQRKAGAAVTTETEVIWAKALPAGTSAQRAELIALTQALKMAEGKKLNVYTDSRYAFATAHIHGEIYRRRGWLTSEGKEIKNKDEILALLKALFLPKRLSIIHCPGHQKGHSAEARGNRMADQAARKAAITETPDTSTLLAGKRTADGSEFEKRTADGSEFESPKKKAKVE

SEQ ID NO: 6664 - protein, 2091 aa, synthetic construct; identical to SEQ ID NO: 6663

SEQ ID NO: 6665 - protein, 2083 aa, synthetic construct
MPAAKRVKLDGGDKKYSIGLDIGTNSVGWAVITDEYKVPSKKFKVLGNTDRHSIKKNLIGALLFDSGETAEATRLKRTARRRYTRRKNRICYLQEIFSNEMAKVDDSFFHRLEESFLVEEDKKHERHPIFGNIVDEVAYHEKYPTIYHLRKKLVDSTDKADLRLIYLALAHMIKFRGHFLIEGDLNPDNSDVDKLFIQLVQTYNQLFEENPINASGVDAKAILSARLSKSRRLENLIAQLPGEKKNGLFGNLIALSLGLTPNFKSNFDLAEDAKLQLSKDTYDDDLDNLLAQIGDQYADLFLAAKNLSDAILLSDILRVNTEITKAPLSASMIKRYDEHHQDLTLLKALVRQQLPEKYKEIFFDQSKNGYAGYIDGGASQEEFYKFIKPILEKMDGTEELLVKLNREDLLRKQRTFDNGSIPHQIHLGELHAILRRQEDFYPFLKDNREKIEKILTFRIPYYVGPLARGNSRFAWMTRKSEETITPWNFEEVVDKGASAQSFIERMTNFDKNLPNEKVLPKHSLLYEYFTVYNELTKVKYVTEGMRKPAFLSGEQKKAIVDLLFKTNRKVTVKQLKEDYFKKIECFDSVEISGVEDRFNASLGTYHDLLKIIKDKDFLDNEENEDILEDIVLTLTLFEDREMIEERLKTYAHLFDDKVMKQLKRRRYTGWGRLSRKLINGIRDKQSGKTILDFLKSDGFANRNFMQLIHDDSLTFKEDIQKAQVSGQGDSLHEHIANLAGSPAIKKGILQTVKVVDELVKVMGRHKPENIVIEMARENQTTQKGQKNSRERMKRIEEGIKELGSQILKEHPVENTQLQNEKLYLYYLQNGRDMYVDQELDINRLSDYDVDHIVPQSFLKDDSIDNKVLTRSDKARGKSDNVPSEEVVKKMKNYWRQLLNAKLITQRKFDNLTKAERGGLSELDKAGFIKRQLVETRQITKHVAQILDSRMNTKYDENDKLIREVKVITLKSKLVSDFRKDFQFYKVREINNYHHAHDAYLNAVVGTALIKKYPKLESEFVYGDYKVYDVRKMIAKSEQEIGKATAKYFFYSNIMNFFKTEITLANGEIRKRPLIETNGETGEIVWDKGRDFATVRKVLSMPQVNIVKKTEVQTGGFSKESILPKRNSDKLIARKKDWDPKKYGGFDSPTVAYSVLVVAKVEKGKSKKLKSVKELLGITIMERSSFEKNPIDFLEAKGYKEVKKDLIIKLPKYSLFELENGRKRMLASAGELQKGNELALPSKYVNFLYLASHYEKLKGSPEDNEQKQLFVEQHKHYLDEIIEQISEFSKRVILADANLDKVLSAYNKHRDKPIREQAENIIHLFTLTNLGAPAAFKYFDTTIDRKRYTSTKEVLDATLIHQSITGLYETRIDLSQLGGDGGGGGGSSGGLDDEYRLYSPLVKPDQNIQFWLEQFPQAWAETAGMGLAKQVPPQVIQLKASATPVSVRQYPLSKEAQEGIRPHVQRLIQQGILVPVQSPWNTPLLPVRKPGTNDYRPVQDLREVNKRVQDIHPTVPNPYNLLCALPPQRSWYTVLDLKDAFFCLRLHPTSQPLFAFEWRDPGTGRTGQLTWTRLPQGFKNSPTIFNEALHRDLANFRIQHPQVTLLQYVDDLLLAGATKQDCLEGTKALLLELSDLGYRASAKKAQICRREVTYLGYSLRDGQRWLTEARKKTVVQIPAPTTAKQVREFLGKAGFCRLFIPGFATLAAPLYPLTKPKGEFSWAPEHQKAFDAIKKALLSAPALALPDVTKPFTLYVDERKGVARGVLTQTLGPWRRPVAYLSKKLDPVASGWPVCLKAIAAVAILVKDADKLTLGQNITVIAPHALENIVRQPPDRWMTNARMTHYQSLLLTERVTFAPPAALNPATLLPEETDEPVTHDCHQLLIEETGVRKDLTDIPLTGEVLTWFTDGSSYVVEGKRMAGAAVVDGTRTIWASSLPEGTSAQKAELMALTQALRLAEGKSINIYTDSRYAFATAHVHGAIYKQRGWLTSAGREIKNKEEILSLLEALHLPKRLAIIHCPGHQKAKDPISRGNQMADRVAKQAAQGVNLLPAGKRTADGSEFEKRTADGSEFESPKKKAKVE

SEQ ID NO: 6666 - protein, 2083 aa, synthetic construct; identical to SEQ ID NO: 6665

SEQ ID NO: 6667 - protein, 2082 aa, synthetic construct
MPAAKRVKLDGGDKKYSIGLDIGTNSVGWAVITDEYKVPSKKFKVLGNTDRHSIKKNLIGALLFDSGETAEATRLKRTARRRYTRRKNRICYLQEIFSNEMAKVDDSFFHRLEESFLVEEDKKHERHPIFGNIVDEVAYHEKYPTIYHLRKKLVDSTDKADLRLIYLALAHMIKFRGHFLIEGDLNPDNSDVDKLFIQLVQTYNQLFEENPINASGVDAKAILSARLSKSRRLENLIAQLPGEKKNGLFGNLIALSLGLTPNFKSNFDLAEDAKLQLSKDTYDDDLDNLLAQIGDQYADLFLAAKNLSDAILLSDILRVNTEITKAPLSASMIKRYDEHHQDLTLLKALVRQQLPEKYKEIFFDQSKNGYAGYIDGGASQEEFYKFIKPILEKMDGTEELLVKLNREDLLRKQRTFDNGSIPHQIHLGELHAILRRQEDFYPFLKDNREKIEKILTFRIPYYVGPLARGNSRFAWMTRKSEETITPWNFEEVVDKGASAQSFIERMTNFDKNLPNEKVLPKHSLLYEYFTVYNELTKVKYVTEGMRKPAFLSGEQKKAIVDLLFKTNRKVTVKQLKEDYFKKIECFDSVEISGVEDRFNASLGTYHDLLKIIKDKDFLDNEENEDILEDIVLTLTLFEDREMIEERLKTYAHLFDDKVMKQLKRRRYTGWGRLSRKLINGIRDKQSGKTILDFLKSDGFANRNFMQLIHDDSLTFKEDIQKAQVSGQGDSLHEHIANLAGSPAIKKGILQTVKVVDELVKVMGRHKPENIVIEMARENQTTQKGQKNSRERMKRIEEGIKELGSQILKEHPVENTQLQNEKLYLYYLQNGRDMYVDQELDINRLSDYDVDHIVPQSFLKDDSIDNKVLTRSDKARGKSDNVPSEEVVKKMKNYWRQLLNAKLITQRKFDNLTKAERGGLSELDKAGFIKRQLVETRQITKHVAQILDSRMNTKYDENDKLIREVKVITLKSKLVSDFRKDFQFYKVREINNYHHAHDAYLNAVVGTALIKKYPKLESEFVYGDYKVYDVRKMIAKSEQEIGKATAKYFFYSNIMNFFKTEITLANGEIRKRPLIETNGETGEIVWDKGRDFATVRKVLSMPQVNIVKKTEVQTGGFSKESILPKRNSDKLIARKKDWDPKKYGGFDSPTVAYSVLVVAKVEKGKSKKLKSVKELLGITIMERSSFEKNPIDFLEAKGYKEVKKDLIIKLPKYSLFELENGRKRMLASAGELQKGNELALPSKYVNFLYLASHYEKLKGSPEDNEQKQLFVEQHKHYLDEIIEQISEFSKRVILADANLDKVLSAYNKHRDKPIREQAENIIHLFTLTNLGAPAAFKYFDTTIDRKRYTSTKEVLDATLIHQSITGLYETRIDLSQLGGDGGGGGGSSGGIPWLMKKPLQLTTLVPLQEYEERLLKQTMLTGSYKEKLQSLFLKYDALWQHWENQVGHRRIKPHHIATGTVNPRPQKQYPINPKAKASIQTVINDLLKQGVLIQQNSIMNTPVYPVPKPDGKWRMVLDYREVNKTIPLIAAQNQHSAGILSSIFRGKYKTTLDLSNGFWAHSITPESYWLTAFTWLGQQYCWTRLPQGFLNSPALFNADVVDLLKEVPNVQVYVDDIYISHDDPREHLEQLEKVFSLLLNAGYVVSLKKSEIAQHEVEFLGFNITKEGRGLTETFKQKLLNITPPRDLKQLQSILGLLNFARNFIPNFSELVKPLYNIIATAPGKYITWTTDNSQQLQNIISMLNSAENLEERNPEVRLIMKVNTSPSAGYIRFYNEFAKRPIMYLNYVYTKAEVKFTNTEKLLTTIHKGLIKALDLGMGQEILVYSPIVSMTKIQKTPLPERKALPIRWITWMSYLEDPRIQFHYDKTLPELQQVPTVTDDIIAKIKHPSEFSMVFYTDGSAIKHPNVNKSHNAGMGIAQVQFKPEFTVINTWSIPLGDHTAQLAEVAAVEFACKKALKIDGPVLIVTDSFYVAESVNKELPYWQSNGFFNNKKKPLKHVSKWKSIADCIQLKPDIIIIHEKGHQPTASTFHTEGNNLADKLATQGSYVVNAGKRTADGSEFEKRTADGSEFESPKKKAKVE

SEQ ID NO: 6668 - protein, 2089 aa, synthetic construct
MPAAKRVKLDGGDKKYSIGLDIGTNSVGWAVITDEYKVPSKKFKVLGNTDRHSIKKNLIGALLFDSGETAEATRLKRTARRRYTRRKNRICYLQEIFSNEMAKVDDSFFHRLEESFLVEEDKKHERHPIFGNIVDEVAYHEKYPTIYHLRKKLVDSTDKADLRLIYLALAHMIKFRGHFLIEGDLNPDNSDVDKLFIQLVQTYNQLFEENPINASGVDAKAILSARLSKSRRLENLIAQLPGEKKNGLFGNLIALSLGLTPNFKSNFDLAEDAKLQLSKDTYDDDLDNLLAQIGDQYADLFLAAKNLSDAILLSDILRVNTEITKAPLSASMIKRYDEHHQDLTLLKALVRQQLPEKYKEIFFDQSKNGYAGYIDGGASQEEFYKFIKPILEKMDGTEELLVKLNREDLLRKQRTFDNGSIPHQIHLGELHAILRRQEDFYPFLKDNREKIEKILTFRIPYYVGPLARGNSRFAWMTRKSEETITPWNFEEVVDKGASAQSFIERMTNFDKNLPNEKVLPKHSLLYEYFTVYNELTKVKYVTEGMRKPAFLSGEQKKAIVDLLFKTNRKVTVKQLKEDYFKKIECFDSVEISGVEDRFNASLGTYHDLLKIIKDKDFLDNEENEDILEDIVLTLTLFEDREMIEERLKTYAHLFDDKVMKQLKRRRYTGWGRLSRKLINGIRDKQSGKTILDFLKSDGFANRNFMQLIHDDSLTFKEDIQKAQVSGQGDSLHEHIANLAGSPAIKKGILQTVKVVDELVKVMGRHKPENIVIEMARENQTTQKGQKNSRERMKRIEEGIKELGSQILKEHPVENTQLQNEKLYLYYLQNGRDMYVDQELDINRLSDYDVDHIVPQSFLKDDSIDNKVLTRSDKARGKSDNVPSEEVVKKMKNYWRQLLNAKLITQRKFDNLTKAERGGLSELDKAGFIKRQLVETRQITKHVAQILDSRMNTKYDENDKLIREVKVITLKSKLVSDFRKDFQFYKVREINNYHHAHDAYLNAVVGTALIKKYPKLESEFVYGDYKVYDVRKMIAKSEQEIGKATAKYFFYSNIMNFFKTEITLANGEIRKRPLIETNGETGEIVWDKGRDFATVRKVLSMPQVNIVKKTEVQTGGFSKESILPKRNSDKLIARKKDWDPKKYGGFDSPTVAYSVLVVAKVEKGKSKKLKSVKELLGITIMERSSFEKNPIDFLEAKGYKEVKKDLIIKLPKYSLFELENGRKRMLASAGELQKGNELALPSKYVNFLYLASHYEKLKGSPEDNEQKQLFVEQHKHYLDEIIEQISEFSKRVILADANLDKVLSAYNKHRDKPIREQAENIIHLFTLTNLGAPAAFKYFDTTIDRKRYTSTKEVLDATLIHQSITGLYETRIDLSQLGGDGGGGGGSSGGVLNLEEEYRLHEKPVPSSIDPSWLQLFPTVWAERAGMGLANQVPPVVVELRSGASPVAVRQYPMSKEAREGIRPHIQRFLDLGVLVPCQSPWNTPLLPVKKPGTNDYRPVQDLREINKRVQDIHPTVPNPYNLLSSLPPSHTWYSVLDLKDAFFCLKLHPNSQPLFAFEWRDPEKGNTGQLTWTRLPQGFKNSPTLFNEALHRDLAPFRALNPQVVLLQYVDDLLVAAPTYRDCKEGTQKLLQELSKLGYRVSAKKAQLCQKEVTYLGYLLKEGKRWLTPARKATVMKIPPPTTPRQVREFLGTAGFCRLWIPGFASLAAPLYPLTKPSIPFIWTEEHQKAFDRIKEALLSAPALALPDLTKPFTLYVDERAGVARGVLTQTLGPWRRPVAYLSKKLDPVASGWPTCLKAVAAVALLLKDADKLTLGQNVTVIASHSLESIVRQPPDRWMTNARMTHYQSLLLNERVSFAPPAVLNPATLLPVESEATPVHRCSEILAEETGTRRDLKDQPLPGVPAWYTDGSSFIAEGKRRAGAAIVDGKRTVWASSLPEGTSAQKAELVALTQALRLAEGKDINIYTDSRYAFATAHIHGAIYKQRGWLTSAGKDIKNKEEILALLEAIHLPKRVAIIHCPGHQKGNDPVATGNRRADEAAKQAALSTRVLAETTKPAGKRTADGSEFEKRTADGSEFESPKKKAKVE

SEQ ID NO: 6669 - protein, 2089 aa, synthetic construct
MPAAKRVKLDGGDKKYSIGLDIGTNSVGWAVITDEYKVPSKKFKVLGNTDRHSIKKNLIGALLFDSGETAEATRLKRTARRRYTRRKNRICYLQEIFSNEMAKVDDSFFHRLEESFLVEEDKKHERHPIFGNIVDEVAYHEKYPTIYHLRKKLVDSTDKADLRLIYLALAHMIKFRGHFLIEGDLNPDNSDVDKLFIQLVQTYNQLFEENPINASGVDAKAILSARLSKSRRLENLIAQLPGEKKNGLFGNLIALSLGLTPNFKSNFDLAEDAKLQLSKDTYDDDLDNLLAQIGDQYADLFLAAKNLSDAILLSDILRVNTEITKAPLSASMIKRYDEHHQDLTLLKALVRQQLPEKYKEIFFDQSKNGYAGYIDGGASQEEFYKFIKPILEKMDGTEELLVKLNREDLLRKQRTFDNGSIPHQIHLGELHAILRRQEDFYPFLKDNREKIEKILTFRIPYYVGPLARGNSRFAWMTRKSEETITPWNFEEVVDKGASAQSFIERMTNFDKNLPNEKVLPKHSLLYEYFTVYNELTKVKYVTEGMRKPAFLSGEQKKAIVDLLFKTNRKVTVKQLKEDYFKKIECFDSVEISGVEDRFNASLGTYHDLLKIIKDKDFLDNEENEDILEDIVLTLTLFEDREMIEERLKTYAHLFDDKVMKQLKRRRYTGWGRLSRKLINGIRDKQSGKTILDFLKSDGFANRNFMQLIHDDSLTFKEDIQKAQVSGQGDSLHEHIANLAGSPAIKKGILQTVKVVDELVKVMGRHKPENIVIEMARENQTTQKGQKNSRERMKRIEEGIKELGSQILKEHPVENTQLQNEKLYLYYLQNGRDMYVDQELDINRLSDYDVDHIVPQSFLKDDSIDNKVLTRSDKARGKSDNVPSEEVVKKMKNYWRQLLNAKLITQRKFDNLTKAERGGLSELDKAGFIKRQLVETRQITKHVAQILDSRMNTKYDENDKLIREVKVITLKSKLVSDFRKDFQFYKVREINNYHHAHDAYLNAVVGTALIKKYPKLESEFVYGDYKVYDVRKMIAKSEQEIGKATAKYFFYSNIMNFFKTEITLANGEIRKRPLIETNGETGEIVWDKGRDFATVRKVLSMPQVNIVKKTEVQTGGFSKESILPKRNSDKLIARKKDWDPKKYGGFDSPTVAYSVLVVAKVEKGKSKKLKSVKELLGITIMERSSFEKNPIDFLEAKGYKEVKKDLIIKLPKYSLFELENGRKRMLASAGELQKGNELALPSKYVNFLYLASHYEKLKGSPEDNEQKQLFVEQHKHYLDEIIEQISEFSKRVILADANLDKVLSAYNKHRDKPIREQAENIIHLFTLTNLGAPAAFKYFDTTIDRKRYTSTKEVLDATLIHQSITGLYETRIDLSQLGGDGGGGGGSSGGVLNLEEEYRLHEKPVPSSIDPSWLQLFPTVWAERAGMGLANQVPPVVVELRSGASPVAVRQYPMSKEAREGIRPHIQRFLDLGVLVPCQSPWNTPLLPVKKPGTNDYRPVQDLREINKRVQDIHPTVPNPYNLLSSLPPSHTWYSVLDLKDAFFCLKLHPNSQPLFAFEWRDPEKGNTGQLTWTRLPQGFKNSPTLFNEALHRDLAPFRALNPQVVLLQYVDDLLVAAPTYRDCKEGTQKLLQELSKLGYRVSAKKAQLCQKEVTYLGYLLKEGKRWLTPARKATVMKIPPPTTPRQVREFLGKAGFCRLFIPGFASLAAPLYPLTKPSIPFIWTEEHQKAFDRIKEALLSAPALALPDLTKPFTLYVDERAGVARGVLTQTLGPWRRPVAYLSKKLDPVASGWPTCLKAVAAVALLLKDADKLTLGQNVTVIASHSLESIVRQPPDRWMTNARMTHYQSLLLNERVSFAPPAVLNPATLLPVESEATPVHRCSEILAEETGTRRDLKDQPLPGVPAWYTDGSSFIAEGKRRAGAAIVDGKRTVWASSLPEGTSAQKAELVALTQALRLAEGKDINIYTDSRYAFATAHIHGAIYKQRGWLTSAGKDIKNKEEILALLEAIHLPKRVAIIHCPGHQKGNDPVATGNRRADEAAKQAALSTRVLAETTKPAGKRTADGSEFEKRTADGSEFESPKKKAKVE

SEQ ID NO: 6670 - protein, 2091 aa, synthetic construct
MPAAKRVKLDGGDKKYSIGLDIGTNSVGWAVITDEYKVPSKKFKVLGNTDRHSIKKNLIGALLFDSGETAEATRLKRTARRRYTRRKNRICYLQEIFSNEMAKVDDSFFHRLEESFLVEEDKKHERHPIFGNIVDEVAYHEKYPTIYHLRKKLVDSTDKADLRLIYLALAHMIKFRGHFLIEGDLNPDNSDVDKLFIQLVQTYNQLFEENPINASGVDAKAILSARLSKSRRLENLIAQLPGEKKNGLFGNLIALSLGLTPNFKSNFDLAEDAKLQLSKDTYDDDLDNLLAQIGDQYADLFLAAKNLSDAILLSDILRVNTEITKAPLSASMIKRYDEHHQDLTLLKALVRQQLPEKYKEIFFDQSKNGYAGYIDGGASQEEFYKFIKPILEKMDGTEELLVKLNREDLLRKQRTFDNGSIPHQIHLGELHAILRRQEDFYPFLKDNREKIEKILTFRIPYYVGPLARGNSRFAWMTRKSEETITPWNFEEVVDKGASAQSFIERMTNFDKNLPNEKVLPKHSLLYEYFTVYNELTKVKYVTEGMRKPAFLSGEQKKAIVDLLFKTNRKVTVKQLKEDYFKKIECFDSVEISGVEDRFNASLGTYHDLLKIIKDKDFLDNEENEDILEDIVLTLTLFEDREMIEERLKTYAHLFDDKVMKQLKRRRYTGWGRLSRKLINGIRDKQSGKTILDFLKSDGFANRNFMQLIHDDSLTFKEDIQKAQVSGQGDSLHEHIANLAGSPAIKKGILQTVKVVDELVKVMGRHKPENIVIEMARENQTTQKGQKNSRERMKRIEEGIKELGSQILKEHPVENTQLQNEKLYLYYLQNGRDMYVDQELDINRLSDYDVDHIVPQSFLKDDSIDNKVLTRSDKARGKSDNVPSEEVVKKMKNYWRQLLNAKLITQRKFDNLTKAERGGLSELDKAGFIKRQLVETRQITKHVAQILDSRMNTKYDENDKLIREVKVITLKSKLVSDFRKDFQFYKVREINNYHHAHDAYLNAVVGTALIKKYPKLESEFVYGDYKVYDVRKMIAKSEQEIGKATAKYFFYSNIMNFFKTEITLANGEIRKRPLIETNGETGEIVWDKGRDFATVRKVLSMPQVNIVKKTEVQTGGFSKESILPKRNSDKLIARKKDWDPKKYGGFDSPTVAYSVLVVAKVEKGKSKKLKSVKELLGITIMERSSFEKNPIDFLEAKGYKEVKKDLIIKLPKYSLFELENGRKRMLASAGELQKGNELALPSKYVNFLYLASHYEKLKGSPEDNEQKQLFVEQHKHYLDEIIEQISEFSKRVILADANLDKVLSAYNKHRDKPIREQAENIIHLFTLTNLGAPAAFKYFDTTIDRKRYTSTKEVLDATLIHQSITGLYETRIDLSQLGGDGGGGGGSSGGTLNIEDEYRLHETSKEPDVPLGSTWLSDFPQAWAETGGMGLAVRQAPLIIPLKATSTPVSIKQYPMSQEARLGIKPHIQRLLDQGILVPCQSPWNTPLLPVKKPGTNDYRPVQDLREVNKRVEDIHPTVPNPYNLLSGLPPSHQWYTVLDLKDAFFCLRLHPTSQPLFAFEWRDPEMGISGQLTWTRLPQGFKNSPTLFNEALHRDLADFRIQHPDLILLQYVDDLLLAATSEQDCQRGTRALLQTLGNLGYRASAKKAQICQKQVKYLGYLLKEGQRWLTEARKETVMGQPTPKTPRQLREFLGTAGFCRLWIPGFAEMAAPLYPLTKPGTLFNWGPDQQKAYQEIKQALLTAPALGLPDLTKPFELFVDEKQGYAKGVLTQKLGPWRRPVAYLSKKLDPVAAGWPPCLRMVAAIAVLTKDAGKLTMGQPLVILAPHAVEALVKQPPDRWLSNARMTHYQAMLLDTDRVQFGPVVALNPATLLPLPEKEAPHDCLEILAETHGTRPDLTDQPIPDADYTWYTDGSSFLQEGQRRAGAAVTTETEVIWARALPAGTSAQRAELIALTQALKMAEGKKLNVYTDSRYAFATAHVHGEIYRRRGWLTSEGREIKNKNEILALLKALFLPKRLSIIHCPGHQKGNSAEARGNRMADQAAREAAMKAVLETSTLLAGKRTADGSEFEKRTADGSEFESPKKKAKVE

SEQ ID NO: 6671 - protein, 2093 aa, synthetic construct
MPAAKRVKLDGGDKKYSIGLDIGTNSVGWAVITDEYKVPSKKFKVLGNTDRHSIKKNLIGALLFDSGETAEATRLKRTARRRYTRRKNRICYLQEIFSNEMAKVDDSFFHRLEESFLVEEDKKHERHPIFGNIVDEVAYHEKYPTIYHLRKKLVDSTDKADLRLIYLALAHMIKFRGHFLIEGDLNPDNSDVDKLFIQLVQTYNQLFEENPINASGVDAKAILSARLSKSRRLENLIAQLPGEKKNGLFGNLIALSLGLTPNFKSNFDLAEDAKLQLSKDTYDDDLDNLLAQIGDQYADLFLAAKNLSDAILLSDILRVNTEITKAPLSASMIKRYDEHHQDLTLLKALVRQQLPEKYKEIFFDQSKNGYAGYIDGGASQEEFYKFIKPILEKMDGTEELLVKLNREDLLRKQRTFDNGSIPHQIHLGELHAILRRQEDFYPFLKDNREKIEKILTFRIPYYVGPLARGNSRFAWMTRKSEETITPWNFEEVVDKGASAQSFIERMTNFDKNLPNEKVLPKHSLLYEYFTVYNELTKVKYVTEGMRKPAFLSGEQKKAIVDLLFKTNRKVTVKQLKEDYFKKIECFDSVEISGVEDRFNASLGTYHDLLKIIKDKDFLDNEENEDILEDIVLTLTLFEDREMIEERLKTYAHLFDDKVMKQLKRRRYTGWGRLSRKLINGIRDKQSGKTILDFLKSDGFANRNFMQLIHDDSLTFKEDIQKAQVSGQGDSLHEHIANLAGSPAIKKGILQTVKVVDELVKVMGRHKPENIVIEMARENQTTQKGQKNSRERMKRIEEGIKELGSQILKEHPVENTQLQNEKLYLYYLQNGRDMYVDQELDINRLSDYDVDHIVPQSFLKDDSIDNKVLTRSDKARGKSDNVPSEEVVKKMKNYWRQLLNAKLITQRKFDNLTKAERGGLSELDKAGFIKRQLVETRQITKHVAQILDSRMNTKYDENDKLIREVKVITLKSKLVSDFRKDFQFYKVREINNYHHAHDAYLNAVVGTALIKKYPKLESEFVYGDYKVYDVRKMIAKSEQEIGKATAKYFFYSNIMNFFKTEITLANGEIRKRPLIETNGETGEIVWDKGRDFATVRKVLSMPQVNIVKKTEVQTGGFSKESILPKRNSDKLIARKKDWDPKKYGGFDSPTVAYSVLVVAKVEKGKSKKLKSVKELLGITIMERSSFEKNPIDFLEAKGYKEVKKDLIIKLPKYSLFELENGRKRMLASAGELQKGNELALPSKYVNFLYLASHYEKLKGSPEDNEQKQLFVEQHKHYLDEIIEQISEFSKRVILADANLDKVLSAYNKHRDKPIREQAENIIHLFTLTNLGAPAAFKYFDTTIDRKRYTSTKEVLDATLIHQSITGLYETRIDLSQLGGDGGGSSGGGGGTAPLEEEYRLFLEAPIQNVTLLEQWKREIPKVWAEINPPGLASTQAPIHVQLLSTALPVRVRQYPITLEAKRSLRETIRKFRAAGILRPVHSPWNTPLLPVRKSGTSEYRMVQDLREVNKRVETIHPTVPNPYTLLSLLPPDRIWYSVLDLKDAFFCIPLAPESQLIFAFEWADAEEGESGQLTWTRLPQGFKNSPTLFDEALNRDLQGFRLDHPSVSLLQYVDDLLIAADTQAACLSATRDLLMTLAELGYRVSGKKAQLCQEEVTYLGFKIHKGSRSLSNSRTQAILQIPVPKTKRQVREFLGTIGYCRLWIPGFAELAQPLYAATRGGNDPLVWGEKEEEAFQSLKLALTQPPALALPSLDKPFQLFVEETSGAAKGVLTQALGPWKRPVAYLSKRLDPVAAGWPRCLRAIAAAALLTREASKLTFGQDIEITSSHNLESLLRSPPDKWLTNARITQYQVLLLDPPRVRFKQTAALNPATLLPETDDTLPIHHCLDTLDSLTSTRPDLTDQPLAQAEATLFTDGSSYIRDGKRYAGAAVVTLDSVIWAEPLPIGTSAQKAELIALTKALEWSKDKSVNIYTDSRYAFATLHVHGMIYRERGLLTAGGKAIKNAPEILALLTAVWLPKRVAVMHCKGHQKDDAPTSTGNRRADEVAREVAIRPLSTQATISAGKRTADGSEFEKRTADGSEFESPKKKAKVE

SEQ ID NO: 6672 - protein, 2097 aa, synthetic construct
MPAAKRVKLDGGDKKYSIGLDIGTNSVGWAVITDEYKVPSKKFKVLGNTDRHSIKKNLIGALLFDSGETAEATRLKRTARRRYTRRKNRICYLQEIFSNEMAKVDDSFFHRLEESFLVEEDKKHERHPIFGNIVDEVAYHEKYPTIYHLRKKLVDSTDKADLRLIYLALAHMIKFRGHFLIEGDLNPDNSDVDKLFIQLVQTYNQLFEENPINASGVDAKAILSARLSKSRRLENLIAQLPGEKKNGLFGNLIALSLGLTPNFKSNFDLAEDAKLQLSKDTYDDDLDNLLAQIGDQYADLFLAAKNLSDAILLSDILRVNTEITKAPLSASMIKRYDEHHQDLTLLKALVRQQLPEKYKEIFFDQSKNGYAGYIDGGASQEEFYKFIKPILEKMDGTEELLVKLNREDLLRKQRTFDNGSIPHQIHLGELHAILRRQEDFYPFLKDNREKIEKILTFRIPYYVGPLARGNSRFAWMTRKSEETITPWNFEEVVDKGASAQSFIERMTNFDKNLPNEKVLPKHSLLYEYFTVYNELTKVKYVTEGMRKPAFLSGEQKKAIVDLLFKTNRKVTVKQLKEDYFKKIECFDSVEISGVEDRFNASLGTYHDLLKIIKDKDFLDNEENEDILEDIVLTLTLFEDREMIEERLKTYAHLFDDKVMKQLKRRRYTGWGRLSRKLINGIRDKQSGKTILDFLKSDGFANRNFMQLIHDDSLTFKEDIQKAQVSGQGDSLHEHIANLAGSPAIKKGILQTVKVVDELVKVMGRHKPENIVIEMARENQTTQKGQKNSRERMKRIEEGIKELGSQILKEHPVENTQLQNEKLYLYYLQNGRDMYVDQELDINRLSDYDVDHIVPQSFLKDDSIDNKVLTRSDKARGKSDNVPSEEVVKKMKNYWRQLLNAKLITQRKFDNLTKAERGGLSELDKAGFIKRQLVETRQITKHVAQILDSRMNTKYDENDKLIREVKVITLKSKLVSDFRKDFQFYKVREINNYHHAHDAYLNAVVGTALIKKYPKLESEFVYGDYKVYDVRKMIAKSEQEIGKATAKYFFYSNIMNFFKTEITLANGEIRKRPLIETNGETGEIVWDKGRDFATVRKVLSMPQVNIVKKTEVQTGGFSKESILPKRNSDKLIARKKDWDPKKYGGFDSPTVAYSVLVVAKVEKGKSKKLKSVKELLGITIMERSSFEKNPIDFLEAKGYKEVKKDLIIKLPKYSLFELENGRKRMLASAGELQKGNELALPSKYVNFLYLASHYEKLKGSPEDNEQKQLFVEQHKHYLDEIIEQISEFSKRVILADANLDKVLSAYNKHRDKPIREQAENIIHLFTLTNLGAPAAFKYFDTTIDRKRYTSTKEVLDATLIHQSITGLYETRIDLSQLGGDGGGSSGGGGGTVSLQDEHRLFDIPVTTSLPDVWLQDFPQAWAETGGLGRAKCQAPIIIDLKPTAVPVSIKQYPMSLEAHMGIRQHIIKFLELGVLRPCRSPWNTPLLPVKKPGTQDYRPVQDLREINKRTVDIHPTVPNPYNLLSTLKPDYSWYTVLDLKDAFFCLPLAPQSQELFAFEWKDPERGISGQLTWTRLPQGFKNSPTLFNEALHRDLTDFRTQHPEVTLLQYVDDLLLAAPTKKACTQGTRHLLQELGEKGYRASAKKAQICQTKVTYLGYILSEGKRWLTPGRIETVARIPPPRNPREVREFLGKAGFCRLFIPGFAELAAPLYALTKPSTPFTWQTEHQLAFEALKKALLSAPALGLPDTSKPFTLFLDERQGIAKGVLTQKLGPWKRPVAYLSKKLDPVAAGWPPCLRIMAATAMLVKDSAKLTLGQPLTVITPHTLEAIVRQPPDRWITNARLTHYQALLLDTDRVQFGPPVTLNPATLLPVPENQPSPHDCRQVLAETHGTREDLKDQELPDADHTWYTDGSSYLDSGTRRAGAAVVDGHNTIWAQSLPPGTSAQKAELIALTKALELSKGKKANIYTDSRYAFATAHTHGSIYERRGWLTSEGKEIKNKAEIIALLKALFLPQEVAIIHCPGHQKGQDPVAVGNRQADRVARQAAMAEVLTLATEPDNTSHITAGKRTADGSEFEKRTADGSEFESPKKKAKVE

SEQ ID NO: 6673 - protein, 2008 aa, synthetic construct
MPAAKRVKLDGGDKKYSIGLDIGTNSVGWAVITDEYKVPSKKFKVLGNTDRHSIKKNLIGALLFDSGETAEATRLKRTARRRYTRRKNRICYLQEIFSNEMAKVDDSFFHRLEESFLVEEDKKHERHPIFGNIVDEVAYHEKYPTIYHLRKKLVDSTDKADLRLIYLALAHMIKFRGHFLIEGDLNPDNSDVDKLFIQLVQTYNQLFEENPINASGVDAKAILSARLSKSRRLENLIAQLPGEKKNGLFGNLIALSLGLTPNFKSNFDLAEDAKLQLSKDTYDDDLDNLLAQIGDQYADLFLAAKNLSDAILLSDILRVNTEITKAPLSASMIKRYDEHHQDLTLLKALVRQQLPEKYKEIFFDQSKNGYAGYIDGGASQEEFYKFIKPILEKMDGTEELLVKLNREDLLRKQRTFDNGSIPHQIHLGELHAILRRQEDFYPFLKDNREKIEKILTFRIPYYVGPLARGNSRFAWMTRKSEETITPWNFEEVVDKGASAQSFIERMTNFDKNLPNEKVLPKHSLLYEYFTVYNELTKVKYVTEGMRKPAFLSGEQKKAIVDLLFKTNRKVTVKQLKEDYFKKIECFDSVEISGVEDRFNASLGTYHDLLKIIKDKDFLDNEENEDILEDIVLTLTLFEDREMIEERLKTYAHLFDDKVMKQLKRRRYTGWGRLSRKLINGIRDKQSGKTILDFLKSDGFANRNFMQLIHDDSLTFKEDIQKAQVSGQGDSLHEHIANLAGSPAIKKGILQTVKVVDELVKVMGRHKPENIVIEMARENQTTQKGQKNSRERMKRIEEGIKELGSQILKEHPVENTQLQNEKLYLYYLQNGRDMYVDQELDINRLSDYDVDHIVPQSFLKDDSIDNKVLTRSDKARGKSDNVPSEEVVKKMKNYWRQLLNAKLITQRKFDNLTKAERGGLSELDKAGFIKRQLVETRQITKHVAQILDSRMNTKYDENDKLIREVKVITLKSKLVSDFRKDFQFYKVREINNYHHAHDAYLNAVVGTALIKKYPKLESEFVYGDYKVYDVRKMIAKSEQEIGKATAKYFFYSNIMNFFKTEITLANGEIRKRPLIETNGETGEIVWDKGRDFATVRKVLSMPQVNIVKKTEVQTGGFSKESILPKRNSDKLIARKKDWDPKKYGGFDSPTVAYSVLVVAKVEKGKSKKLKSVKELLGITIMERSSFEKNPIDFLEAKGYKEVKKDLIIKLPKYSLFELENGRKRMLASAGELQKGNELALPSKYVNFLYLASHYEKLKGSPEDNEQKQLFVEQHKHYLDEIIEQISEFSKRVILADANLDKVLSAYNKHRDKPIREQAENIIHLFTLTNLGAPAAFKYFDTTIDRKRYTSTKEVLDATLIHQSITGLYETRIDLSQLGGDGGGSSGGGGGAVLGLEHLPRPPQISQFPLNPERLQALQHLVRKALEAGHIEPYTGPGNNPVFPVKKANGTWRFIHDLRATNSLTIDLSSSSPGPPDLSSLPTTLAHLQTIDLRDAFFQIPLPKQFQPYFAFTVPQQCNYGPGTRYAWKVLPQGFKNSPTLFEMQLAHILQPIRQAFPQCTILQYMDDILLASPSHEDLLLLSEATMASLISHGLPVSENKTQQTPGTIKFLGQIISPNHLTYDAVPTVPIRSRWALPELQALLGEIQWVSKGTPTLRQPLHSLYCALQRHTDPRDQIYLNPSQVQSLVQLRQALSQNCRSRLVQTLPLLGAIMLTLTGTTTVVFQSKEQWPLVWLHAPLPHTSQCPWGQLLASAVLLLDKYTLQSYGLLCQTIHHNISTQTFNQFIQTSDHPSVPILLHHSHRFKNLGAQTGELWNTFLKTAAPLAPVKALMPVFTLSPVIINTAPCLFSDGSTSRAAYILWDKQILSQRSFPLPPPHKSAQRAELLGLLHGLSSARSWRCLNIFLDSKYLYHYLRTLALGTFQGRSSQAPFQALLPRLLSRKVVYLHHVRSHTNLPDPISRLNALTDALLITPVLQLAGKRTADGSEFEKRTADGSEFESPKKKAKVE

SEQ ID NO: 6674 - protein, 2122 aa, synthetic construct
MPAAKRVKLDGGDKKYSIGLDIGTNSVGWAVITDEYKVPSKKFKVLGNTDRHSIKKNLIGALLFDSGETAEATRLKRTARRRYTRRKNRICYLQEIFSNEMAKVDDSFFHRLEESFLVEEDKKHERHPIFGNIVDEVAYHEKYPTIYHLRKKLVDSTDKADLRLIYLALAHMIKFRGHFLIEGDLNPDNSDVDKLFIQLVQTYNQLFEENPINASGVDAKAILSARLSKSRRLENLIAQLPGEKKNGLFGNLIALSLGLTPNFKSNFDLAEDAKLQLSKDTYDDDLDNLLAQIGDQYADLFLAAKNLSDAILLSDILRVNTEITKAPLSASMIKRYDEHHQDLTLLKALVRQQLPEKYKEIFFDQSKNGYAGYIDGGASQEEFYKFIKPILEKMDGTEELLVKLNREDLLRKQRTFDNGSIPHQIHLGELHAILRRQEDFYPFLKDNREKIEKILTFRIPYYVGPLARGNSRFAWMTRKSEETITPWNFEEVVDKGASAQSFIERMTNFDKNLPNEKVLPKHSLLYEYFTVYNELTKVKYVTEGMRKPAFLSGEQKKAIVDLLFKTNRKVTVKQLKEDYFKKIECFDSVEISGVEDRFNASLGTYHDLLKIIKDKDFLDNEENEDILEDIVLTLTLFEDREMIEERLKTYAHLFDDKVMKQLKRRRYTGWGRLSRKLINGIRDKQSGKTILDFLKSDGFANRNFMQLIHDDSLTFKEDIQKAQVSGQGDSLHEHIANLAGSPAIKKGILQTVKVVDELVKVMGRHKPENIVIEMARENQTTQKGQKNSRERMKRIEEGIKELGSQILKEHPVENTQLQNEKLYLYYLQNGRDMYVDQELDINRLSDYDVDHIVPQSFLKDDSIDNKVLTRSDKARGKSDNVPSEEVVKKMKNYWRQLLNAKLITQRKFDNLTKAERGGLSELDKAGFIKRQLVETRQITKHVAQILDSRMNTKYDENDKLIREVKVITLKSKLVSDFRKDFQFYKVREINNYHHAHDAYLNAVVGTALIKKYPKLESEFVYGDYKVYDVRKMIAKSEQEIGKATAKYFFYSNIMNFFKTEITLANGEIRKRPLIETNGETGEIVWDKGRDFATVRKVLSMPQVNIVKKTEVQTGGFSKESILPKRNSDKLIARKKDWDPKKYGGFDSPTVAYSVLVVAKVEKGKSKKLKSVKELLGITIMERSSFEKNPIDFLEAKGYKEVKKDLIIKLPKYSLFELENGRKRMLASAGELQKGNELALPSKYVNFLYLASHYEKLKGSPEDNEQKQLFVEQHKHYLDEIIEQISEFSKRVILADANLDKVLSAYNKHRDKPIREQAENIIHLFTLTNLGAPAAFKYFDTTIDRKRYTSTKEVLDATLIHQSITGLYETRIDLSQLGGDGGGSSGGGGGLLGRDLLTKLKAQIQFSTEGPQVTWEDRPAMCLVLNLEEEYRLHEKPVPPSIDPSWLQLFPMVWAEKAGMGLANQVPPVVVELKSDASPVAVRQYPMSKEAREGIRPHIQRFLDLGILVPCQSPWNTPLLPVKKPGTNDYRPVQDLREVNKRVQDIHPTVPNPYNLLSSLPPSHTWYSVLDLKDAFFCLKLHPNSQPLFAFEWRDPEKGNTGQLTWTRLPQGFKNSPTLFNEALHRDLASFRALNPQVVMLQYVDDLLVAAPTYRDCKEGTRRLLQELSKLGYRVSAKKAQLCREEVTYLGYLLKGGKRWLTPARKATVMKIPTPTTPRQVREFLGTAGFCRLWIPGFASLAAPLYPLTRPKVPFTWTEAHQEAFGRIKEALLSAPALALPDLTKPFALYVDEKEGVARGVLTQTLGPWRRPVAYLSKKLDPVASGWPTCLKAIAAVALLLKDADKLTLGQNVLVIAPHNLESIVRQPPDRWMTNARMTHYQSLLLNERVSFAPPAILNPATLLPVESDDTPIHICSEILAEETGTRPDLRDQPLPGVPAWYTDGSSFIMDGRRQAGAAIVDNKRTVWASNLPEGTSAQKAELIALTQALRLAEGKSINIYTDSRYAFATAHVHGAIYKQRGWLTSAGKDIKNKEEILALLEAIHLPKRVAIIHCPGHQRGTDPVATGNRKADEAAKQAAQSTRILTETTKNAGKRTADGSEFEKRTADGSEFESPKKKAKVE

SEQ ID NO: 6675 - protein, 2213 aa, synthetic construct
MPAAKRVKLDGGDKKYSIGLDIGTNSVGWAVITDEYKVPSKKFKVLGNTDRHSIKKNLIGALLFDSGETAEATRLKRTARRRYTRRKNRICYLQEIFSNEMAKVDDSFFHRLEESFLVEEDKKHERHPIFGNIVDEVAYHEKYPTIYHLRKKLVDSTDKADLRLIYLALAHMIKFRGHFLIEGDLNPDNSDVDKLFIQLVQTYNQLFEENPINASGVDAKAILSARLSKSRRLENLIAQLPGEKKNGLFGNLIALSLGLTPNFKSNFDLAEDAKLQLSKDTYDDDLDNLLAQIGDQYADLFLAAKNLSDAILLSDILRVNTEITKAPLSASMIKRYDEHHQDLTLLKALVRQQLPEKYKEIFFDQSKNGYAGYIDGGASQEEFYKFIKPILEKMDGTEELLVKLNREDLLRKQRTFDNGSIPHQIHLGELHAILRRQEDFYPFLKDNREKIEKILTFRIPYYVGPLARGNSRFAWMTRKSEETITPWNFEEVVDKGASAQSFIERMTNFDKNLPNEKVLPKHSLLYEYFTVYNELTKVKYVTEGMRKPAFLSGEQKKAIVDLLFKTNRKVTVKQLKEDYFKKIECFDSVEISGVEDRFNASLGTYHDLLKIIKDKDFLDNEENEDILEDIVLTLTLFEDREMIEERLKTYAHLFDDKVMKQLKRRRYTGWGRLSRKLINGIRDKQSGKTILDFLKSDGFANRNFMQLIHDDSLTFKEDIQKAQVSGQGDSLHEHIANLAGSPAIKKGILQTVKVVDELVKVMGRHKPENIVIEMARENQTTQKGQKNSRERMKRIEEGIKELGSQILKEHPVENTQLQNEKLYLYYLQNGRDMYVDQELDINRLSDYDVDHIVPQSFLKDDSIDNKVLTRSDKARGKSDNVPSEEVVKKMKNYWRQLLNAKLITQRKFDNLTKAERGGLSELDKAGFIKRQLVETRQITKHVAQILDSRMNTKYDENDKLIREVKVITLKSKLVSDFRKDFQFYKVREINNYHHAHDAYLNAVVGTALIKKYPKLESEFVYGDYKVYDVRKMIAKSEQEIGKATAKYFFYSNIMNFFKTEITLANGEIRKRPLIETNGETGEIVWDKGRDFATVRKVLSMPQVNIVKKTEVQTGGFSKESILPKRNSDKLIARKKDWDPKKYGGFDSPTVAYSVLVVAKVEKGKSKKLKSVKELLGITIMERSSFEKNPIDFLEAKGYKEVKKDLIIKLPKYSLFELENGRKRMLASAGELQKGNELALPSKYVNFLYLASHYEKLKGSPEDNEQKQLFVEQHKHYLDEIIEQISEFSKRVILADANLDKVLSAYNKHRDKPIREQAENIIHLFTLTNLGAPAAFKYFDTTIDRKRYTSTKEVLDATLIHQSITGLYETRIDLSQLGGDGGGSSGGGGGTLGDQGSRGSDPLPEPRVTLTVEGIPTEFLVNTGAEHSVLTKPMGKMGSKRTVVAGATGSKVYPWTTKRLLKIGQKQVTHSFLVIPECPAPLLGRDLLTKLKAQIQFSTEGPQVTWEDRPAMCLVLNLEEEYRLHEKPVPPSIDPSWLQLFPMVWAEKAGMGLANQVPPVVVELKSDASPVAVRQYPMSKEAREGIRPHIQRFLDLGILVPCQSPWNTPLLPVKKPGTNDYRPVQDLREVNKRVQDIHPTVPNPYNLLSSLPPSHTWYSVLDLKDAFFCLKLHPNSQPLFAFEWRDPEKGNTGQLTWTRLPQGFKNSPTLFNEALHRDLASFRALNPQVVMLQYVDDLLVAAPTYRDCKEGTRRLLQELSKLGYRVSAKKAQLCREEVTYLGYLLKGGKRWLTPARKATVMKIPTPTTPRQVREFLGTAGFCRLWIPGFASLAAPLYPLTRPKVPFTWTEAHQEAFGRIKEALLSAPALALPDLTKPFALYVDEKEGVARGVLTQTLGPWRRPVAYLSKKLDPVASGWPTCLKAIAAVALLLKDADKLTLGQNVLVIAPHNLESIVRQPPDRWMTNARMTHYQSLLLNERVSFAPPAILNPATLLPVESDDTPIHICSEILAEETGTRPDLRDQPLPGVPAWYTDGSSFIMDGRRQAGAAIVDNKRTVWASNLPEGTSAQKAELIALTQALRLAEGKSINIYTDSRYAFATAHVHGAIYKQRGWLTSAGKDIKNKEEILALLEAIHLPKRVAIIHCPGHQRGTDPVATGNRKADEAAKQAAQSTRILTETTKNAGKRTADGSEFEKRTADGSEFESPKKKAKVE

SEQ ID NO: 6676 - protein, 2213 aa, synthetic construct
MPAAKRVKLDGGDKKYSIGLDIGTNSVGWAVITDEYKVPSKKFKVLGNTDRHSIKKNLIGALLFDSGETAEATRLKRTARRRYTRRKNRICYLQEIFSNEMAKVDDSFFHRLEESFLVEEDKKHERHPIFGNIVDEVAYHEKYPTIYHLRKKLVDSTDKADLRLIYLALAHMIKFRGHFLIEGDLNPDNSDVDKLFIQLVQTYNQLFEENPINASGVDAKAILSARLSKSRRLENLIAQLPGEKKNGLFGNLIALSLGLTPNFKSNFDLAEDAKLQLSKDTYDDDLDNLLAQIGDQYADLFLAAKNLSDAILLSDILRVNTEITKAPLSASMIKRYDEHHQDLTLLKALVRQQLPEKYKEIFFDQSKNGYAGYIDGGASQEEFYKFIKPILEKMDGTEELLVKLNREDLLRKQRTFDNGSIPHQIHLGELHAILRRQEDFYPFLKDNREKIEKILTFRIPYYVGPLARGNSRFAWMTRKSEETITPWNFEEVVDKGASAQSFIERMTNFDKNLPNEKVLPKHSLLYEYFTVYNELTKVKYVTEGMRKPAFLSGEQKKAIVDLLFKTNRKVTVKQLKEDYFKKIECFDSVEISGVEDRFNASLGTYHDLLKIIKDKDFLDNEENEDILEDIVLTLTLFEDREMIEERLKTYAHLFDDKVMKQLKRRRYTGWGRLSRKLINGIRDKQSGKTILDFLKSDGFANRNFMQLIHDDSLTFKEDIQKAQVSGQGDSLHEHIANLAGSPAIKKGILQTVKVVDELVKVMGRHKPENIVIEMARENQTTQKGQKNSRERMKRIEEGIKELGSQILKEHPVENTQLQNEKLYLYYLQNGRDMYVDQELDINRLSDYDVDHIVPQSFLKDDSIDNKVLTRSDKARGKSDNVPSEEVVKKMKNYWRQLLNAKLITQRKFDNLTKAERGGLSELDKAGFIKRQLVETRQITKHVAQILDSRMNTKYDENDKLIREVKVITLKSKLVSDFRKDFQFYKVREINNYHHAHDAYLNAVVGTALIKKYPKLESEFVYGDYKVYDVRKMIAKSEQEIGKATAKYFFYSNIMNFFKTEITLANGEIRKRPLIETNGETGEIVWDKGRDFATVRKVLSMPQVNIVKKTEVQTGGFSKESILPKRNSDKLIARKKDWDPKKYGGFDSPTVAYSVLVVAKVEKGKSKKLKSVKELLGITIMERSSFEKNPIDFLEAKGYKEVKKDLIIKLPKYSLFELENGRKRMLASAGELQKGNELALPSKYVNFLYLASHYEKLKGSPEDNEQKQLFVEQHKHYLDEIIEQISEFSKRVILADANLDKVLSAYNKHRDKPIREQAENIIHLFTLTNLGAPAAFKYFDTTIDRKRYTSTKEVLDATLIHQSITGLYETRIDLSQLGGDGGGSSGGGGGTLGDQGSRGSDPLPEPRVTLTVEGIPTEFLVNTGAEHSVLTKPMGKMGSKRTVVAGATGSKVYPWTTKRLLKIGQKQVTHSFLVIPECPAPLLGRDLLTKLKAQIQFSTEGPQVTWEDRPAMCLVLNLEEEYRLHEKPVPPSIDPSWLQLFPMVWAEKAGMGLANQVPPVVVELKSDASPVAVRQYPMSKEAREGIRPHIQRFLDLGILVPCQSPWNTPLLPVKKPGTNDYRPVQDLREVNKRVQDIHPTVPNPYNLLSSLPPSHTWYSVLDLKDAFFCLKLHPNSQPLFAFEWRDPEKGNTGQLTWTRLPQGFKNSPTLFNEALHRDLASFRALNPQVVMLQYVDDLLVAAPTYRDCKEGTRRLLQELSKLGYRVSAKKAQLCREEVTYLGYLLKGGKRWLTPARKATVMKIPTPTTPRQVREFLGKAGFCRLFIPGFASLAAPLYPLTRPKVPFTWTEAHQEAFGRIKEALLSAPALALPDLTKPFALYVDEKEGVARGVLTQTLGPWRRPVAYLSKKLDPVASGWPTCLKAIAAVALLLKDADKLTLGQNVLVIAPHNLESIVRQPPDRWMTNARMTHYQSLLLNERVSFAPPAILNPATLLPVESDDTPIHICSEILAEETGTRPDLRDQPLPGVPAWYTDGSSFIMDGRRQAGAAIVDNKRTVWASNLPEGTSAQKAELIALTQALRLAEGKSINIYTDSRYAFATAHVHGAIYKQRGWLTSAGKDIKNKEEILALLEAIHLPKRVAIIHCPGHQRGTDPVATGNRKADEAAKQAAQSTRILTETTKNAGKRTADGSEFEKRTADGSEFESPKKKAKVE

SEQ ID NO: 6677 - protein, 2091 aa, synthetic construct
MPAAKRVKLDGGDKKYSIGLDIGTNSVGWAVITDEYKVPSKKFKVLGNTDRHSIKKNLIGALLFDSGETAEATRLKRTARRRYTRRKNRICYLQEIFSNEMAKVDDSFFHRLEESFLVEEDKKHERHPIFGNIVDEVAYHEKYPTIYHLRKKLVDSTDKADLRLIYLALAHMIKFRGHFLIEGDLNPDNSDVDKLFIQLVQTYNQLFEENPINASGVDAKAILSARLSKSRRLENLIAQLPGEKKNGLFGNLIALSLGLTPNFKSNFDLAEDAKLQLSKDTYDDDLDNLLAQIGDQYADLFLAAKNLSDAILLSDILRVNTEITKAPLSASMIKRYDEHHQDLTLLKALVRQQLPEKYKEIFFDQSKNGYAGYIDGGASQEEFYKFIKPILEKMDGTEELLVKLNREDLLRKQRTFDNGSIPHQIHLGELHAILRRQEDFYPFLKDNREKIEKILTFRIPYYVGPLARGNSRFAWMTRKSEETITPWNFEEVVDKGASAQSFIERMTNFDKNLPNEKVLPKHSLLYEYFTVYNELTKVKYVTEGMRKPAFLSGEQKKAIVDLLFKTNRKVTVKQLKEDYFKKIECFDSVEISGVEDRFNASLGTYHDLLKIIKDKDFLDNEENEDILEDIVLTLTLFEDREMIEERLKTYAHLFDDKVMKQLKRRRYTGWGRLSRKLINGIRDKQSGKTILDFLKSDGFANRNFMQLIHDDSLTFKEDIQKAQVSGQGDSLHEHIANLAGSPAIKKGILQTVKVVDELVKVMGRHKPENIVIEMARENQTTQKGQKNSRERMKRIEEGIKELGSQILKEHPVENTQLQNEKLYLYYLQNGRDMYVDQELDINRLSDYDVDHIVPQSFLKDDSIDNKVLTRSDKARGKSDNVPSEEVVKKMKNYWRQLLNAKLITQRKFDNLTKAERGGLSELDKAGFIKRQLVETRQITKHVAQILDSRMNTKYDENDKLIREVKVITLKSKLVSDFRKDFQFYKVREINNYHHAHDAYLNAVVGTALIKKYPKLESEFVYGDYKVYDVRKMIAKSEQEIGKATAKYFFYSNIMNFFKTEITLANGEIRKRPLIETNGETGEIVWDKGRDFATVRKVLSMPQVNIVKKTEVQTGGFSKESILPKRNSDKLIARKKDWDPKKYGGFDSPTVAYSVLVVAKVEKGKSKKLKSVKELLGITIMERSSFEKNPIDFLEAKGYKEVKKDLIIKLPKYSLFELENGRKRMLASAGELQKGNELALPSKYVNFLYLASHYEKLKGSPEDNEQKQLFVEQHKHYLDEIIEQISEFSKRVILADANLDKVLSAYNKHRDKPIREQAENIIHLFTLTNLGAPAAFKYFDTTIDRKRYTSTKEVLDATLIHQSITGLYETRIDLSQLGGDGGGSSGGGGGTLNLEDEYRLYETSAEPEVSPGSTWLSDFPQAWAETGGMGLAVRQAPLIIPLKATSTPVSIKQYPMSQEAKLGIKPHIQRLLDQGILVPCQSPWNTPLLPVKKPGTNDYRPVQDLREVNKRVEDIHPTVPNPYNLLSGLPPSHRWYTVLDLKDAFFCLRLHPTSQPLFAFEWRDPGMGISGQLTWTRLPQGFKNSPTLFNEALHRDLADFRIQHPDLILLQYVDDILLAATSELDCQQGTRALLLTLGNLGYRASAKKAQLCQKQVKYLGYLLKEGQRWLTEARKETVMGQPTPKTPRQLREFLGTAGFCRLWIPGFAEMAAPLYPLTKPGTLFNWGPDQQKAYQEIKQALLTAPALGLPDLTKPFELFVDEKQGYAKGVLTQKLGPWRRPVAYLSKKLDPVAAGWPPCLRMVAAIAVLRKDAGKLTMGQPLVILAPHAVEALVKQPPDRWLSNARMTHYQAMLLDTDRVQFGPVVALNPATLLPLPEEGAPHDCLEILAETHGTRPDLTDQPIPDADHTWYTDGSSFLQEGQRKAGAAVTTETEVIWARALPAGTSAQRAELIALTQALKMAEGKRLNVYTDSRYAFATAHIHGEIYRRRGWLTSEGREIKNKSEILALLKALFLPKRLSIIHCLGHQKGDSAEARGNRLADQAAREAAIKTPPDTSTLLAGKRTADGSEFEKRTADGSEFESPKKKAKVE

SEQ ID NO: 6678 - protein, 2091 aa, synthetic construct
MPAAKRVKLDGGDKKYSIGLDIGTNSVGWAVITDEYKVPSKKFKVLGNTDRHSIKKNLIGALLFDSGETAEATRLKRTARRRYTRRKNRICYLQEIFSNEMAKVDDSFFHRLEESFLVEEDKKHERHPIFGNIVDEVAYHEKYPTIYHLRKKLVDSTDKADLRLIYLALAHMIKFRGHFLIEGDLNPDNSDVDKLFIQLVQTYNQLFEENPINASGVDAKAILSARLSKSRRLENLIAQLPGEKKNGLFGNLIALSLGLTPNFKSNFDLAEDAKLQLSKDTYDDDLDNLLAQIGDQYADLFLAAKNLSDAILLSDILRVNTEITKAPLSASMIKRYDEHHQDLTLLKALVRQQLPEKYKEIFFDQSKNGYAGYIDGGASQEEFYKFIKPILEKMDGTEELLVKLNREDLLRKQRTFDNGSIPHQIHLGELHAILRRQEDFYPFLKDNREKIEKILTFRIPYYVGPLARGNSRFAWMTRKSEETITPWNFEEVVDKGASAQSFIERMTNFDKNLPNEKVLPKHSLLYEYFTVYNELTKVKYVTEGMRKPAFLSGEQKKAIVDLLFKTNRKVTVKQLKEDYFKKIECFDSVEISGVEDRFNASLGTYHDLLKIIKDKDFLDNEENEDILEDIVLTLTLFEDREMIEERLKTYAHLFDDKVMKQLKRRRYTGWGRLSRKLINGIRDKQSGKTILDFLKSDGFANRNFMQLIHDDSLTFKEDIQKAQVSGQGDSLHEHIANLAGSPAIKKGILQTVKVVDELVKVMGRHKPENIVIEMARENQTTQKGQKNSRERMKRIEEGIKELGSQILKEHPVENTQLQNEKLYLYYLQNGRDMYVDQELDINRLSDYDVDHIVPQSFLKDDSIDNKVLTRSDKARGKSDNVPSEEVVKKMKNYWRQLLNAKLITQRKFDNLTKAERGGLSELDKAGFIKRQLVETRQITKHVAQILDSRMNTKYDENDKLIREVKVITLKSKLVSDFRKDFQFYKVREINNYHHAHDAYLNAVVGTALIKKYPKLESEFVYGDYKVYDVRKMIAKSEQEIGKATAKYFFYSNIMNFFKTEITLANGEIRKRPLIETNGETGEIVWDKGRDFATVRKVLSMPQVNIVKKTEVQTGGFSKESILPKRNSDKLIARKKDWDPKKYGGFDSPTVAYSVLVVAKVEKGKSKKLKSVKELLGITIMERSSFEKNPIDFLEAKGYKEVKKDLIIKLPKYSLFELENGRKRMLASAGELQKGNELALPSKYVNFLYLASHYEKLKGSPEDNEQKQLFVEQHKHYLDEIIEQISEFSKRVILADANLDKVLSAYNKHRDKPIREQAENIIHLFTLTNLGAPAAFKYFDTTIDRKRYTSTKEVLDATLIHQSITGLYETRIDLSQLGGDGGGSSGGGGGTLGIEDEYRLHETSTEPDVSLGSTWLSDFPQAWAETGGMGLAVRQAPLIIPLKATSTPVSIQQYPMSHEARLGIKPHIQRLLDQGILVPCQSPWNTPLLPVKKPGTNDYRPVQDLREVNKRVEDIHPTVPNPYNLLSGLPPSHQWYTVLDLKDAFFCLRLHPTSQPLFAFEWRDPGMGISGQLTWTRLPQGFKNSPTLFDEALHRDLADFRIQHPDLILLQYVDDILLAATSELDCQQGTRALLQTLGDLGYRASAKKAQICQKQVKYLGYLLREGQRWLTEARKETVMGQPVPKTPRQLREFLGTAGFCRLWIPGFAEMAAPLYPLTKTGTLFSWGPDQQKAYQEIKQALLTAPALGLPDLTKPFELFVDEKQGYAKGVLTQKLGPWRRPVAYLSKKLDPVAAGWPPCLRMVAAIAVLTKDAGKLTMGQPLVILAPHAVEALVKQPPDRWLSNARMTHYQAMLLDTDRVQFGPVVALNPATLLPLPEEGAPHDCLEILAETHGTRPDLTDQPIPDADHTWYTDGSSFLQEGQRKAGAAVTTETEVIWAGALPAGTSAQRAELIALTQALKMAEGKRLNVYTDSRYAFATAHIHGEIYRRRGLLTSEGREIKNKSEILALLKALFLPKRLSIIHCLGHQKGDSAEARGNRLADQAAREAAIKTPPDTSTLLAGKRTADGSEFEKRTADGSEFESPKKKAKVE

SEQ ID NO: 6679 - protein, 2091 aa, synthetic construct
MPAAKRVKLDGGDKKYSIGLDIGTNSVGWAVITDEYKVPSKKFKVLGNTDRHSIKKNLIGALLFDSGETAEATRLKRTARRRYTRRKNRICYLQEIFSNEMAKVDDSFFHRLEESFLVEEDKKHERHPIFGNIVDEVAYHEKYPTIYHLRKKLVDSTDKADLRLIYLALAHMIKFRGHFLIEGDLNPDNSDVDKLFIQLVQTYNQLFEENPINASGVDAKAILSARLSKSRRLENLIAQLPGEKKNGLFGNLIALSLGLTPNFKSNFDLAEDAKLQLSKDTYDDDLDNLLAQIGDQYADLFLAAKNLSDAILLSDILRVNTEITKAPLSASMIKRYDEHHQDLTLLKALVRQQLPEKYKEIFFDQSKNGYAGYIDGGASQEEFYKFIKPILEKMDGTEELLVKLNREDLLRKQRTFDNGSIPHQIHLGELHAILRRQEDFYPFLKDNREKIEKILTFRIPYYVGPLARGNSRFAWMTRKSEETITPWNFEEVVDKGASAQSFIERMTNFDKNLPNEKVLPKHSLLYEYFTVYNELTKVKYVTEGMRKPAFLSGEQKKAIVDLLFKTNRKVTVKQLKEDYFKKIECFDSVEISGVEDRFNASLGTYHDLLKIIKDKDFLDNEENEDILEDIVLTLTLFEDREMIEERLKTYAHLFDDKVMKQLKRRRYTGWGRLSRKLINGIRDKQSGKTILDFLKSDGFANRNFMQLIHDDSLTFKEDIQKAQVSGQGDSLHEHIANLAGSPAIKKGILQTVKVVDELVKVMGRHKPENIVIEMARENQTTQKGQKNSRERMKRIEEGIKELGSQILKEHPVENTQLQNEKLYLYYLQNGRDMYVDQELDINRLSDYDVDHIVPQSFLKDDSIDNKVLTRSDKARGKSDNVPSEEVVKKMKNYWRQLLNAKLITQRKFDNLTKAERGGLSELDKAGFIKRQLVETRQITKHVAQILDSRMNTKYDENDKLIREVKVITLKSKLVSDFRKDFQFYKVREINNYHHAHDAYLNAVVGTALIKKYPKLESEFVYGDYKVYDVRKMIAKSEQEIGKATAKYFFYSNIMNFFKTEITLANGEIRKRPLIETNGETGEIVWDKGRDFATVRKVLSMPQVNIVKKTEVQTGGFSKESILPKRNSDKLIARKKDWDPKKYGGFDSPTVAYSVLVVAKVEKGKSKKLKSVKELLGITIMERSSFEKNPIDFLEAKGYKEVKKDLIIKLPKYSLFELENGRKRMLASAGELQKGNELALPSKYVNFLYLASHYEKLKGSPEDNEQKQLFVEQHKHYLDEIIEQISEFSKRVILADANLDKVLSAYNKHRDKPIREQAENIIHLFTLTNLGAPAAFKYFDTTIDRKRYTSTKEVLDATLIHQSITGLYETRIDLSQLGGDGGGSSGGGGGTLNIEDEYRLHETSKGPDVPLGSTWLSDFPQAWAETGGMGLAVRQAPLIIPLKATSTPVSIKQYPMSQEARLGIKPHIQRLLDQGILVPCQSPWNTPLLPVKKPGTNDYRPVQDLREVNKRVEDIHPTVPNPYNLLSGLPPSHQWYTVLDLKDAFFCLRLHPTSQSLFAFEWRDPEMGISGQLTWTRLPQGFKNSPTLFNEALHRDLADFRIQHPDLILLQYVDDLLLAATSELDCQQGTRALLQTLGDLGYRASAKKAQICQKQVKYLGYLLKEGQRWLTEARKETVMGQPTPKTPRQLREFLGTAGFCRLWIPGFAEMAAPLYPLTKPGTLFEWGPDQQKAYQEIKQALLTAPALGLPDLTKPFELFVDEKQGYAKGVLTQKLGPWRRPVAYLSKKLDPVAAGWPPCLRMVAAIAVLTKDAGKLTMGQPLVILAPHAVEALVKQPPDRWLSNARMTHYQALLLDTDRVQFGPIVALNPATLLPLPEEGLQHDCLDILAEAHGTRPDLTDQPLPDADHTWYTDGSSFLQEGQRKAGAAVTTETEVVWAKALPAGTSAQRAELIALTQALKMAEGKKLNVYTDSRYAFATAHIHGEIYRRRGWLTSEGKEIKNKDEILALLKALFLPKRLSIIHCPGHQKGNRAEARGNRMADQAAREVATRETPETSTLLAGKRTADGSEFEKRTADGSEFESPKKKAKVE

SEQ ID NO: 6680 - protein, 2085 aa, synthetic construct
MPAAKRVKLDGGDKKYSIGLDIGTNSVGWAVITDEYKVPSKKFKVLGNTDRHSIKKNLIGALLFDSGETAEATRLKRTARRRYTRRKNRICYLQEIFSNEMAKVDDSFFHRLEESFLVEEDKKHERHPIFGNIVDEVAYHEKYPTIYHLRKKLVDSTDKADLRLIYLALAHMIKFRGHFLIEGDLNPDNSDVDKLFIQLVQTYNQLFEENPINASGVDAKAILSARLSKSRRLENLIAQLPGEKKNGLFGNLIALSLGLTPNFKSNFDLAEDAKLQLSKDTYDDDLDNLLAQIGDQYADLFLAAKNLSDAILLSDILRVNTEITKAPLSASMIKRYDEHHQDLTLLKALVRQQLPEKYKEIFFDQSKNGYAGYIDGGASQEEFYKFIKPILEKMDGTEELLVKLNREDLLRKQRTFDNGSIPHQIHLGELHAILRRQEDFYPFLKDNREKIEKILTFRIPYYVGPLARGNSRFAWMTRKSEETITPWNFEEVVDKGASAQSFIERMTNFDKNLPNEKVLPKHSLLYEYFTVYNELTKVKYVTEGMRKPAFLSGEQKKAIVDLLFKTNRKVTVKQLKEDYFKKIECFDSVEISGVEDRFNASLGTYHDLLKIIKDKDFLDNEENEDILEDIVLTLTLFEDREMIEERLKTYAHLFDDKVMKQLKRRRYTGWGRLSRKLINGIRDKQSGKTILDFLKSDGFANRNFMQLIHDDSLTFKEDIQKAQVSGQGDSLHEHIANLAGSPAIKKGILQTVKVVDELVKVMGRHKPENIVIEMARENQTTQKGQKNSRERMKRIEEGIKELGSQILKEHPVENTQLQNEKLYLYYLQNGRDMYVDQELDINRLSDYDVDHIVPQSFLKDDSIDNKVLTRSDKARGKSDNVPSEEVVKKMKNYWRQLLNAKLITQRKFDNLTKAERGGLSELDKAGFIKRQLVETRQITKHVAQILDSRMNTKYDENDKLIREVKVITLKSKLVSDFRKDFQFYKVREINNYHHAHDAYLNAVVGTALIKKYPKLESEFVYGDYKVYDVRKMIAKSEQEIGKATAKYFFYSNIMNFFKTEITLANGEIRKRPLIETNGETGEIVWDKGRDFATVRKVLSMPQVNIVKKTEVQTGGFSKESILPKRNSDKLIARKKDWDPKKYGGFDSPTVAYSVLVVAKVEKGKSKKLKSVKELLGITIMERSSFEKNPIDFLEAKGYKEVKKDLIIKLPKYSLFELENGRKRMLASAGELQKGNELALPSKYVNFLYLASHYEKLKGSPEDNEQKQLFVEQHKHYLDEIIEQISEFSKRVILADANLDKVLSAYNKHRDKPIREQAENIIHLFTLTNLGAPAAFKYFDTTIDRKRYTSTKEVLDATLIHQSITGLYETRIDLSQLGGDGGGSSGGGGGTLQLDDEYRLYSPLVKPDQNIQFWLEQFPQAWAETAGMGLAKQVPPQVIQLKASATPVSVRQYPLSKEAQEGIRPHVQRLIQQGILVPVQSPWNTPLLPVRKPGTNDYRPVQDLREVNKRVQDIHPTVPNPYNLLCALPPQRSWYTVLDLKDAFFCLRLHPTSQPLFAFEWRDPGTGRTGQLTWTRLPQGFKNSPTIFDEALHRDLANFRIQHPQVTLLQYVDDLLLAGATKQDCLEGTKALLLELSDLGYRASAKKAQICRREVTYLGYSLRDGQRWLTEARKKTVVQIPAPTTAKQVREFLGTAGFCRLWIPGFATLAAPLYPLTKEKGEFSWAPEHQKAFDAIKKALLSAPALALPDVTKPFTLYVDERKGVARGVLTQTLGPWRRPVAYLSKKLDPVASGWPVCLKAIAAVAILVKDADKLTLGQNITVIAPHALENIVRQPPDRWMTNARMTHYQSLLLTERVTFAPPAALNPATLLPEETDEPVTHDCHQLLIEETGVRKDLTDIPLTGEVLTWFTDGSSYVVEGKRMAGAAVVDGTRTIWASSLPEGTSAQKAELMALTQALRLAEGKSINIYTDSRYAFATAHVHGAIYKQRGLLTSAGREIKNKEEILSLLEALHLPKRLAIIHCPGHQKAKDPISRGNQMADRVAKQAAQGVNLLAGKRTADGSEFEKRTADGSEFESPKKKAKVE

SEQ ID NO: 6681 - protein, 2171 aa, synthetic construct
MPAAKRVKLDGGDKKYSIGLDIGTNSVGWAVITDEYKVPSKKFKVLGNTDRHSIKKNLIGALLFDSGETAEATRLKRTARRRYTRRKNRICYLQEIFSNEMAKVDDSFFHRLEESFLVEEDKKHERHPIFGNIVDEVAYHEKYPTIYHLRKKLVDSTDKADLRLIYLALAHMIKFRGHFLIEGDLNPDNSDVDKLFIQLVQTYNQLFEENPINASGVDAKAILSARLSKSRRLENLIAQLPGEKKNGLFGNLIALSLGLTPNFKSNFDLAEDAKLQLSKDTYDDDLDNLLAQIGDQYADLFLAAKNLSDAILLSDILRVNTEITKAPLSASMIKRYDEHHQDLTLLKALVRQQLPEKYKEIFFDQSKNGYAGYIDGGASQEEFYKFIKPILEKMDGTEELLVKLNREDLLRKQRTFDNGSIPHQIHLGELHAILRRQEDFYPFLKDNREKIEKILTFRIPYYVGPLARGNSRFAWMTRKSEETITPWNFEEVVDKGASAQSFIERMTNFDKNLPNEKVLPKHSLLYEYFTVYNELTKVKYVTEGMRKPAFLSGEQKKAIVDLLFKTNRKVTVKQLKEDYFKKIECFDSVEISGVEDRFNASLGTYHDLLKIIKDKDFLDNEENEDILEDIVLTLTLFEDREMIEERLKTYAHLFDDKVMKQLKRRRYTGWGRLSRKLINGIRDKQSGKTILDFLKSDGFANRNFMQLIHDDSLTFKEDIQKAQVSGQGDSLHEHIANLAGSPAIKKGILQTVKVVDELVKVMGRHKPENIVIEMARENQTTQKGQKNSRERMKRIEEGIKELGSQILKEHPVENTQLQNEKLYLYYLQNGRDMYVDQELDINRLSDYDVDHIVPQSFLKDDSIDNKVLTRSDKARGKSDNVPSEEVVKKMKNYWRQLLNAKLITQRKFDNLTKAERGGLSELDKAGFIKRQLVETRQITKHVAQILDSRMNTKYDENDKLIREVKVITLKSKLVSDFRKDFQFYKVREINNYHHAHDAYLNAVVGTALIKKYPKLESEFVYGDYKVYDVRKMIAKSEQEIGKATAKYFFYSNIMNFFKTEITLANGEIRKRPLIETNGETGEIVWDKGRDFATVRKVLSMPQVNIVKKTEVQTGGFSKESILPKRNSDKLIARKKDWDPKKYGGFDSPTVAYSVLVVAKVEKGKSKKLKSVKELLGITIMERSSFEKNPIDFLEAKGYKEVKKDLIIKLPKYSLFELENGRKRMLASAGELQKGNELALPSKYVNFLYLASHYEKLKGSPEDNEQKQLFVEQHKHYLDEIIEQISEFSKRVILADANLDKVLSAYNKHRDKPIREQAENIIHLFTLTNLGAPAAFKYFDTTIDRKRYTSTKEVLDATLIHQSITGLYETRIDLSQLGGDGGGSSGGGGGMDPLQLLQPLEAEIKGTKLKAHWNSGATITCVPQAFLEEEVPIKNIWIKTIHGEKEQPVYYLTFKIQGRKVEAEVISSPYDYILVSPSDIPWLMKKPLQLTTLVPLQEYEERLLKQTMLTGSYKEKLQSLFLKYDALWQHWENQVGHRRIKPHHIATGTVNPRPQKQYPINPKAKASIQTVINDLLKQGVLIQQNSIMNTPVYPVPKPDGKWRMVLDYREVNKTIPLIAAQNQHSAGILSSIFRGKYKTTLDLSNGFWAHSITPESYWLTAFTWLGQQYCWTRLPQGFLNSPALFNADVVDLLKEVPNVQVYVDDIYISHDDPREHLEQLEKVFSLLLNAGYVVSLKKSEIAQHEVEFLGFNITKEGRGLTETFKQKLLNITPPRDLKQLQSILGKLNFARNFIPNFSELVKPLYNIIATAPGKYITWTTDNSQQLQNIISMLNSAENLEERNPEVRLIMKVNTSPSAGYIRFYNEFAKRPIMYLNYVYTKAEVKFTNTEKLLTTIHKGLIKALDLGMGQEILVYSPIVSMTKIQKTPLPERKALPIRWITWMSYLEDPRIQFHYDKTLPELQQVPTVTDDIIAKIKHPSEFSMVFYTDGSAIKHPNVNKSHNAGMGIAQVQFKPEFTVINTWSIPLGDHTAQLAEVAAVEFACKKALKIDGPVLIVTDSFYVAESVNKELPYWQSNGFFNNKKKPLKHVSKWKSIADCIQLKPDIIIIHEKGHQPTASTFHTEGNNLADKLATQGSYVVNAGKRTADGSEFEKRTADGSEFESPKKKAKVE

SEQ ID NO: 6682 - protein, 2089 aa, synthetic construct
MPAAKRVKLDGGDKKYSIGLDIGTNSVGWAVITDEYKVPSKKFKVLGNTDRHSIKKNLIGALLFDSGETAEATRLKRTARRRYTRRKNRICYLQEIFSNEMAKVDDSFFHRLEESFLVEEDKKHERHPIFGNIVDEVAYHEKYPTIYHLRKKLVDSTDKADLRLIYLALAHMIKFRGHFLIEGDLNPDNSDVDKLFIQLVQTYNQLFEENPINASGVDAKAILSARLSKSRRLENLIAQLPGEKKNGLFGNLIALSLGLTPNFKSNFDLAEDAKLQLSKDTYDDDLDNLLAQIGDQYADLFLAAKNLSDAILLSDILRVNTEITKAPLSASMIKRYDEHHQDLTLLKALVRQQLPEKYKEIFFDQSKNGYAGYIDGGASQEEFYKFIKPILEKMDGTEELLVKLNREDLLRKQRTFDNGSIPHQIHLGELHAILRRQEDFYPFLKDNREKIEKILTFRIPYYVGPLARGNSRFAWMTRKSEETITPWNFEEVVDKGASAQSFIERMTNFDKNLPNEKVLPKHSLLYEYFTVYNELTKVKYVTEGMRKPAFLSGEQKKAIVDLLFKTNRKVTVKQLKEDYFKKIECFDSVEISGVEDRFNASLGTYHDLLKIIKDKDFLDNEENEDILEDIVLTLTLFEDREMIEERLKTYAHLFDDKVMKQLKRRRYTGWGRLSRKLINGIRDKQSGKTILDFLKSDGFANRNFMQLIHDDSLTFKEDIQKAQVSGQGDSLHEHIANLAGSPAIKKGILQTVKVVDELVKVMGRHKPENIVIEMARENQTTQKGQKNSRERMKRIEEGIKELGSQILKEHPVENTQLQNEKLYLYYLQNGRDMYVDQELDINRLSDYDVDHIVPQSFLKDDSIDNKVLTRSDKARGKSDNVPSEEVVKKMKNYWRQLLNAKLITQRKFDNLTKAERGGLSELDKAGFIKRQLVETRQITKHVAQILDSRMNTKYDENDKLIREVKVITLKSKLVSDFRKDFQFYKVREINNYHHAHDAYLNAVVGTALIKKYPKLESEFVYGDYKVYDVRKMIAKSEQEIGKATAKYFFYSNIMNFFKTEITLANGEIRKRPLIETNGETGEIVWDKGRDFATVRKVLSMPQVNIVKKTEVQTGGFSKESILPKRNSDKLIARKKDWDPKKYGGFDSPTVAYSVLVVAKVEKGKSKKLKSVKELLGITIMERSSFEKNPIDFLEAKGYKEVKKDLIIKLPKYSLFELENGRKRMLASAGELQKGNELALPSKYVNFLYLASHYEKLKGSPEDNEQKQLFVEQHKHYLDEIIEQISEFSKRVILADANLDKVLSAYNKHRDKPIREQAENIIHLFTLTNLGAPAAFKYFDTTIDRKRYTSTKEVLDATLIHQSITGLYETRIDLSQLGGDGGGSSGGGGGVLNLEEEYRLHEKPVPSSIDPSWLQLFPTVWAERAGMGLANQVPPVVVELRSGASPVAVRQYPMSKEAREGIRPHIQRFLDLGVLVPCQSPWNTPLLPVKKPGTNDYRPVQDLREINKRVQDIHPTVPNPYNLLSSLPPSHTWYSVLDLKDAFFCLKLHPNSQPLFAFEWRDPEKGNTGQLTWTRLPQGFKNSPTLFDEALHRDLAPFRALNPQVVLLQYVDDLLVAAPTYRDCKEGTQKLLQELSKLGYRVSAKKAQLCQKEVTYLGYLLKEGKRWLTPARKATVMKIPPPTTPRQVREFLGTAGFCRLWIPGFASLAAPLYPLTKESIPFIWTEEHQKAFDRIKEALLSAPALALPDLTKPFTLYVDERAGVARGVLTQTLGPWRRPVAYLSKKLDPVASGWPTCLKAVAAVALLLKDADKLTLGQNVTVIASHSLESIVRQPPDRWMTNARMTHYQSLLLNERVSFAPPAVLNPATLLPVESEATPVHRCSEILAEETGTRRDLKDQPLPGVPAWYTDGSSFIAEGKRRAGAAIVDGKRTVWASSLPEGTSAQKAELVALTQALRLAEGKDINIYTDSRYAFATAHIHGAIYKQRGLLTSAGKDIKNKEEILALLEAIHLPKRVAIIHCPGHQKGNDPVATGNRRADEAAKQAALSTRVLAETTKPAGKRTADGSEFEKRTADGSEFESPKKKAKVE

SEQ ID NO: 6683 - protein, 2095 aa, synthetic construct
MPAAKRVKLDGGDKKYSIGLDIGTNSVGWAVITDEYKVPSKKFKVLGNTDRHSIKKNLIGALLFDSGETAEATRLKRTARRRYTRRKNRICYLQEIFSNEMAKVDDSFFHRLEESFLVEEDKKHERHPIFGNIVDEVAYHEKYPTIYHLRKKLVDSTDKADLRLIYLALAHMIKFRGHFLIEGDLNPDNSDVDKLFIQLVQTYNQLFEENPINASGVDAKAILSARLSKSRRLENLIAQLPGEKKNGLFGNLIALSLGLTPNFKSNFDLAEDAKLQLSKDTYDDDLDNLLAQIGDQYADLFLAAKNLSDAILLSDILRVNTEITKAPLSASMIKRYDEHHQDLTLLKALVRQQLPEKYKEIFFDQSKNGYAGYIDGGASQEEFYKFIKPILEKMDGTEELLVKLNREDLLRKQRTFDNGSIPHQIHLGELHAILRRQEDFYPFLKDNREKIEKILTFRIPYYVGPLARGNSRFAWMTRKSEETITPWNFEEVVDKGASAQSFIERMTNFDKNLPNEKVLPKHSLLYEYFTVYNELTKVKYVTEGMRKPAFLSGEQKKAIVDLLFKTNRKVTVKQLKEDYFKKIECFDSVEISGVEDRFNASLGTYHDLLKIIKDKDFLDNEENEDILEDIVLTLTLFEDREMIEERLKTYAHLFDDKVMKQLKRRRYTGWGRLSRKLINGIRDKQSGKTILDFLKSDGFANRNFMQLIHDDSLTFKEDIQKAQVSGQGDSLHEHIANLAGSPAIKKGILQTVKVVDELVKVMGRHKPENIVIEMARENQTTQKGQKNSRERMKRIEEGIKELGSQILKEHPVENTQLQNEKLYLYYLQNGRDMYVDQELDINRLSDYDVDHIVPQSFLKDDSIDNKVLTRSDKARGKSDNVPSEEVVKKMKNYWRQLLNAKLITQRKFDNLTKAERGGLSELDKAGFIKRQLVETRQITKHVAQILDSRMNTKYDENDKLIREVKVITLKSKLVSDFRKDFQFYKVREINNYHHAHDAYLNAVVGTALIKKYPKLESEFVYGDYKVYDVRKMIAKSEQEIGKATAKYFFYSNIMNFFKTEITLANGEIRKRPLIETNGETGEIVWDKGRDFATVRKVLSMPQVNIVKKTEVQTGGFSKESILPKRNSDKLIARKKDWDPKKYGGFDSPTVAYSVLVVAKVEKGKSKKLKSVKELLGITIMERSSFEKNPIDFLEAKGYKEVKKDLIIKLPKYSLFELENGRKRMLASAGELQKGNELALPSKYVNFLYLASHYEKLKGSPEDNEQKQLFVEQHKHYLDEIIEQISEFSKRVILADANLDKVLSAYNKHRDKPIREQAENIIHLFTLTNLGAPAAFKYFDTTIDRKRYTSTKEVLDATLIHQSITGLYETRIDLSQLGGDGGGGGEAAAKGGTAPLEEEYRLFLEAPIQNVTLLEQWKREIPKVWAEINPPGLASTQAPIHVQLLSTALPVRVRQYPITLEAKRSLRETIRKFRAAGILRPVHSPWNTPLLPVRKSGTSEYRMVQDLREVNKRVETIHPTVPNPYTLLSLLPPDRIWYSVLDLKDAFFCIPLAPESQLIFAFEWADAEEGESGQLTWTRLPQGFKNSPTLFNEALNRDLQGFRLDHPSVSLLQYVDDLLIAADTQAACLSATRDLLMTLAELGYRVSGKKAQLCQEEVTYLGFKIHKGSRSLSNSRTQAILQIPVPKTKRQVREFLGTIGYCRLWIPGFAELAQPLYAATRPGNDPLVWGEKEEEAFQSLKLALTQPPALALPSLDKPFQLFVEETSGAAKGVLTQALGPWKRPVAYLSKRLDPVAAGWPRCLRAIAAAALLTREASKLTFGQDIEITSSHNLESLLRSPPDKWLTNARITQYQVLLLDPPRVRFKQTAALNPATLLPETDDTLPIHHCLDTLDSLTSTRPDLTDQPLAQAEATLFTDGSSYIRDGKRYAGAAVVTLDSVIWAEPLPIGTSAQKAELIALTKALEWSKDKSVNIYTDSRYAFATLHVHGMIYRERGWLTAGGKAIKNAPEILALLTAVWLPKRVAVMHCKGHQKDDAPTSTGNRRADEVAREVAIRPLSTQATISAGKRTADGSEFEKRTADGSEFESPKKKAKVE

SEQ ID NO: 6684 - protein, 2099 aa, synthetic construct
MPAAKRVKLDGGDKKYSIGLDIGTNSVGWAVITDEYKVPSKKFKVLGNTDRHSIKKNLIGALLFDSGETAEATRLKRTARRRYTRRKNRICYLQEIFSNEMAKVDDSFFHRLEESFLVEEDKKHERHPIFGNIVDEVAYHEKYPTIYHLRKKLVDSTDKADLRLIYLALAHMIKFRGHFLIEGDLNPDNSDVDKLFIQLVQTYNQLFEENPINASGVDAKAILSARLSKSRRLENLIAQLPGEKKNGLFGNLIALSLGLTPNFKSNFDLAEDAKLQLSKDTYDDDLDNLLAQIGDQYADLFLAAKNLSDAILLSDILRVNTEITKAPLSASMIKRYDEHHQDLTLLKALVRQQLPEKYKEIFFDQSKNGYAGYIDGGASQEEFYKFIKPILEKMDGTEELLVKLNREDLLRKQRTFDNGSIPHQIHLGELHAILRRQEDFYPFLKDNREKIEKILTFRIPYYVGPLARGNSRFAWMTRKSEETITPWNFEEVVDKGASAQSFIERMTNFDKNLPNEKVLPKHSLLYEYFTVYNELTKVKYVTEGMRKPAFLSGEQKKAIVDLLFKTNRKVTVKQLKEDYFKKIECFDSVEISGVEDRFNASLGTYHDLLKIIKDKDFLDNEENEDILEDIVLTLTLFEDREMIEERLKTYAHLFDDKVMKQLKRRRYTGWGRLSRKLINGIRDKQSGKTILDFLKSDGFANRNFMQLIHDDSLTFKEDIQKAQVSGQGDSLHEHIANLAGSPAIKKGILQTVKVVDELVKVMGRHKPENIVIEMARENQTTQKGQKNSRERMKRIEEGIKELGSQILKEHPVENTQLQNEKLYLYYLQNGRDMYVDQELDINRLSDYDVDHIVPQSFLKDDSIDNKVLTRSDKARGKSDNVPSEEVVKKMKNYWRQLLNAKLITQRKFDNLTKAERGGLSELDKAGFIKRQLVETRQITKHVAQILDSRMNTKYDENDKLIREVKVITLKSKLVSDFRKDFQFYKVREINNYHHAHDAYLNAVVGTALIKKYPKLESEFVYGDYKVYDVRKMIAKSEQEIGKATAKYFFYSNIMNFFKTEITLANGEIRKRPLIETNGETGEIVWDKGRDFATVRKVLSMPQVNIVKKTEVQTGGFSKESILPKRNSDKLIARKKDWDPKKYGGFDSPTVAYSVLVVAKVEKGKSKKLKSVKELLGITIMERSSFEKNPIDFLEAKGYKEVKKDLIIKLPKYSLFELENGRKRMLASAGELQKGNELALPSKYVNFLYLASHYEKLKGSPEDNEQKQLFVEQHKHYLDEIIEQISEFSKRVILADANLDKVLSAYNKHRDKPIREQAENIIHLFTLTNLGAPAAFKYFDTTIDRKRYTSTKEVLDATLIHQSITGLYETRIDLSQLGGDGGGGGEAAAKGGTVSLQDEHRLFDIPVTTSLPDVWLQDFPQAWAETGGLGRAKCQAPIIIDLKPTAVPVSIKQYPMSLEAHMGIRQHIIKFLELGVLRPCRSPWNTPLLPVKKPGTQDYRPVQDLREINKRTVDIHPTVPNPYNLLSTLKPDYSWYTVLDLKDAFFCLPLAPQSQELFAFEWKDPERGISGQLTWTRLPQGFKNSPTLFDEALHRDLTDFRTQHPEVTLLQYVDDLLLAAPTKKACTQGTRHLLQELGEKGYRASAKKAQICQTKVTYLGYILSEGKRWLTPGRIETVARIPPPRNPREVREFLGTAGFCRLWIPGFAELAAPLYALTKESTPFTWQTEHQLAFEALKKALLSAPALGLPDTSKPFTLFLDERQGIAKGVLTQKLGPWKRPVAYLSKKLDPVAAGWPPCLRIMAATAMLVKDSAKLTLGQPLTVITPHTLEAIVRQPPDRWITNARLTHYQALLLDTDRVQFGPPVTLNPATLLPVPENQPSPHDCRQVLAETHGTREDLKDQELPDADHTWYTDGSSYLDSGTRRAGAAVVDGHNTIWAQSLPPGTSAQKAELIALTKALELSKGKKANIYTDSRYAFATAHTHGSIYERRGLLTSEGKEIKNKAEIIALLKALFLPQEVAIIHCPGHQKGQDPVAVGNRQADRVARQAAMAEVLTLATEPDNTSHITAGKRTADGSEFEKRTADGSEFESPKKKAKVE

SEQ ID NO: 6685 - protein, 2092 aa, synthetic construct
MPAAKRVKLDGGDKKYSIGLDIGTNSVGWAVITDEYKVPSKKFKVLGNTDRHSIKKNLIGALLFDSGETAEATRLKRTARRRYTRRKNRICYLQEIFSNEMAKVDDSFFHRLEESFLVEEDKKHERHPIFGNIVDEVAYHEKYPTIYHLRKKLVDSTDKADLRLIYLALAHMIKFRGHFLIEGDLNPDNSDVDKLFIQLVQTYNQLFEENPINASGVDAKAILSARLSKSRRLENLIAQLPGEKKNGLFGNLIALSLGLTPNFKSNFDLAEDAKLQLSKDTYDDDLDNLLAQIGDQYADLFLAAKNLSDAILLSDILRVNTEITKAPLSASMIKRYDEHHQDLTLLKALVRQQLPEKYKEIFFDQSKNGYAGYIDGGASQEEFYKFIKPILEKMDGTEELLVKLNREDLLRKQRTFDNGSIPHQIHLGELHAILRRQEDFYPFLKDNREKIEKILTFRIPYYVGPLARGNSRFAWMTRKSEETITPWNFEEVVDKGASAQSFIERMTNFDKNLPNEKVLPKHSLLYEYFTVYNELTKVKYVTEGMRKPAFLSGEQKKAIVDLLFKTNRKVTVKQLKEDYFKKIECFDSVEISGVEDRFNASLGTYHDLLKIIKDKDFLDNEENEDILEDIVLTLTLFEDREMIEERLKTYAHLFDDKVMKQLKRRRYTGWGRLSRKLINGIRDKQSGKTILDFLKSDGFANRNFMQLIHDDSLTFKEDIQKAQVSGQGDSLHEHIANLAGSPAIKKGILQTVKVVDELVKVMGRHKPENIVIEMARENQTTQKGQKNSRERMKRIEEGIKELGSQILKEHPVENTQLQNEKLYLYYLQNGRDMYVDQELDINRLSDYDVDHIVPQSFLKDDSIDNKVLTRSDKARGKSDNVPSEEVVKKMKNYWRQLLNAKLITQRKFDNLTKAERGGLSELDKAGFIKRQLVETRQITKHVAQILDSRMNTKYDENDKLIREVKVITLKSKLVSDFRKDFQFYKVREINNYHHAHDAYLNAVVGTALIKKYPKLESEFVYGDYKVYDVRKMIAKSEQEIGKATAKYFFYSNIMNFFKTEITLANGEIRKRPLIETNGETGEIVWDKGRDFATVRKVLSMPQVNIVKKTEVQTGGFSKESILPKRNSDKLIARKKDWDPKKYGGFDSPTVAYSVLVVAKVEKGKSKKLKSVKELLGITIMERSSFEKNPIDFLEAKGYKEVKKDLIIKLPKYSLFELENGRKRMLASAGELQKGNELALPSKYVNFLYLASHYEKLKGSPEDNEQKQLFVEQHKHYLDEIIEQISEFSKRVILADANLDKVLSAYNKHRDKPIREQAENIIHLFTLTNLGAPAAFKYFDTTIDRKRYTSTKEVLDATLIHQSITGLYETRIDLSQLGGDGGGGGEAAAKGGTLQLEEEYRLFEPESTQKQEMDIWLKNFPQAWAETGGMGTAHCQAPVLIQLKATATPISIRQYPMPHEAYQGIKPHIRRMLDQGILKPCQSPWNTPLLPVKKPGTEDYRPVQDLREVNKRVEDIHPTVPNPYNLLSTLPPSHPWYTVLDLKDAFFCLRLHSESQLLFAFEWRDPEIGLSGQLTWTRLPQGFKNSPTLFNEALHSDLADFRVRYPALVLLQYVDDLLLAAATRTECLEGTKALLETLGNKGYRASAKKAQICLQEVTYLGYSLKDGQRWLTKARKEAILSIPVPKNSRQVREFLGTAGYCRLWIPGFAELAAPLYPLTRPGTLFQWGTEQQLAFEDIKKALLSSPALGLPDITKPFELFIDENSGFAKGVLVQKLGPWKRPVAYLSKKLDTVASGWPPCLRMVAAIAILVKDAGKLTLGQPLTILTSHPVEALVRQPPNKWLSNARMTHYQAMLLDAERVHFGPTVSLNPATLLPLPSGGNHHDCLQILAETHGTRPDLTDQPLPDADLTWYTDGSSFIRNGEREAGAAVTTESEVIWAAPLPPGTSAQRAELIALTQALKMAEGKKLTVYTDSRYAFATTHVHGEIYRRRGWLTSEGKEIKNKNEILALLEALFLPKRLSIIHCPGHQKGDSPQAKGNRLADDTAKKAATETHSSLTVLPAGKRTADGSEFEKRTADGSEFESPKKKAKVE

SEQ ID NO: 6686 - protein, 2124 aa, synthetic construct
MPAAKRVKLDGGDKKYSIGLDIGTNSVGWAVITDEYKVPSKKFKVLGNTDRHSIKKNLIGALLFDSGETAEATRLKRTARRRYTRRKNRICYLQEIFSNEMAKVDDSFFHRLEESFLVEEDKKHERHPIFGNIVDEVAYHEKYPTIYHLRKKLVDSTDKADLRLIYLALAHMIKFRGHFLIEGDLNPDNSDVDKLFIQLVQTYNQLFEENPINASGVDAKAILSARLSKSRRLENLIAQLPGEKKNGLFGNLIALSLGLTPNFKSNFDLAEDAKLQLSKDTYDDDLDNLLAQIGDQYADLFLAAKNLSDAILLSDILRVNTEITKAPLSASMIKRYDEHHQDLTLLKALVRQQLPEKYKEIFFDQSKNGYAGYIDGGASQEEFYKFIKPILEKMDGTEELLVKLNREDLLRKQRTFDNGSIPHQIHLGELHAILRRQEDFYPFLKDNREKIEKILTFRIPYYVGPLARGNSRFAWMTRKSEETITPWNFEEVVDKGASAQSFIERMTNFDKNLPNEKVLPKHSLLYEYFTVYNELTKVKYVTEGMRKPAFLSGEQKKAIVDLLFKTNRKVTVKQLKEDYFKKIECFDSVEISGVEDRFNASLGTYHDLLKIIKDKDFLDNEENEDILEDIVLTLTLFEDREMIEERLKTYAHLFDDKVMKQLKRRRYTGWGRLSRKLINGIRDKQSGKTILDFLKSDGFANRNFMQLIHDDSLTFKEDIQKAQVSGQGDSLHEHIANLAGSPAIKKGILQTVKVVDELVKVMGRHKPENIVIEMARENQTTQKGQKNSRERMKRIEEGIKELGSQILKEHPVENTQLQNEKLYLYYLQNGRDMYVDQELDINRLSDYDVDHIVPQSFLKDDSIDNKVLTRSDKARGKSDNVPSEEVVKKMKNYWRQLLNAKLITQRKFDNLTKAERGGLSELDKAGFIKRQLVETRQITKHVAQILDSRMNTKYDENDKLIREVKVITLKSKLVSDFRKDFQFYKVREINNYHHAHDAYLNAVVGTALIKKYPKLESEFVYGDYKVYDVRKMIAKSEQEIGKATAKYFFYSNIMNFFKTEITLANGEIRKRPLIETNGETGEIVWDKGRDFATVRKVLSMPQVNIVKKTEVQTGGFSKESILPKRNSDKLIARKKDWDPKKYGGFDSPTVAYSVLVVAKVEKGKSKKLKSVKELLGITIMERSSFEKNPIDFLEAKGYKEVKKDLIIKLPKYSLFELENGRKRMLASAGELQKGNELALPSKYVNFLYLASHYEKLKGSPEDNEQKQLFVEQHKHYLDEIIEQISEFSKRVILADANLDKVLSAYNKHRDKPIREQAENIIHLFTLTNLGAPAAFKYFDTTIDRKRYTSTKEVLDATLIHQSITGLYETRIDLSQLGGDGGGGGEAAAKGGLLGRDLLTKLKAQIQFSTEGPQVTWEDRPAMCLVLNLEEEYRLHEKPVPPSIDPSWLQLFPMVWAEKAGMGLANQVPPVVVELKSDASPVAVRQYPMSKEAREGIRPHIQRFLDLGILVPCQSPWNTPLLPVKKPGTNDYRPVQDLREVNKRVQDIHPTVPNPYNLLSSLPPSHTWYSVLDLKDAFFCLKLHPNSQPLFAFEWRDPEKGNTGQLTWTRLPQGFKNSPTLFNEALHRDLASFRALNPQVVMLQYVDDLLVAAPTYRDCKEGTRRLLQELSKLGYRVSAKKAQLCREEVTYLGYLLKGGKRWLTPARKATVMKIPTPTTPRQVREFLGKAGFCRLFIPGFASLAAPLYPLTRPKVPFTWTEAHQEAFGRIKEALLSAPALALPDLTKPFALYVDEKEGVARGVLTQTLGPWRRPVAYLSKKLDPVASGWPTCLKAIAAVALLLKDADKLTLGQNVLVIAPHNLESIVRQPPDRWMTNARMTHYQSLLLNERVSFAPPAILNPATLLPVESDDTPIHICSEILAEETGTRPDLRDQPLPGVPAWYTDGSSFIMDGRRQAGAAIVDNKRTVWASNLPEGTSAQKAELIALTQALRLAEGKSINIYTDSRYAFATAHVHGAIYKQRGWLTSAGKDIKNKEEILALLEAIHLPKRVAIIHCPGHQRGTDPVATGNRKADEAAKQAAQSTRILTETTKNAGKRTADGSEFEKRTADGSEFESPKKKAKVE

SEQ ID NO: 6687 - protein, 2215 aa, synthetic construct
MPAAKRVKLDGGDKKYSIGLDIGTNSVGWAVITDEYKVPSKKFKVLGNTDRHSIKKNLIGALLFDSGETAEATRLKRTARRRYTRRKNRICYLQEIFSNEMAKVDDSFFHRLEESFLVEEDKKHERHPIFGNIVDEVAYHEKYPTIYHLRKKLVDSTDKADLRLIYLALAHMIKFRGHFLIEGDLNPDNSDVDKLFIQLVQTYNQLFEENPINASGVDAKAILSARLSKSRRLENLIAQLPGEKKNGLFGNLIALSLGLTPNFKSNFDLAEDAKLQLSKDTYDDDLDNLLAQIGDQYADLFLAAKNLSDAILLSDILRVNTEITKAPLSASMIKRYDEHHQDLTLLKALVRQQLPEKYKEIFFDQSKNGYAGYIDGGASQEEFYKFIKPILEKMDGTEELLVKLNREDLLRKQRTFDNGSIPHQIHLGELHAILRRQEDFYPFLKDNREKIEKILTFRIPYYVGPLARGNSRFAWMTRKSEETITPWNFEEVVDKGASAQSFIERMTNFDKNLPNEKVLPKHSLLYEYFTVYNELTKVKYVTEGMRKPAFLSGEQKKAIVDLLFKTNRKVTVKQLKEDYFKKIECFDSVEISGVEDRFNASLGTYHDLLKIIKDKDFLDNEENEDILEDIVLTLTLFEDREMIEERLKTYAHLFDDKVMKQLKRRRYTGWGRLSRKLINGIRDKQSGKTILDFLKSDGFANRNFMQLIHDDSLTFKEDIQKAQVSGQGDSLHEHIANLAGSPAIKKGILQTVKVVDELVKVMGRHKPENIVIEMARENQTTQKGQKNSRERMKRIEEGIKELGSQILKEHPVENTQLQNEKLYLYYLQNGRDMYVDQELDINRLSDYDVDHIVPQSFLKDDSIDNKVLTRSDKARGKSDNVPSEEVVKKMKNYWRQLLNAKLITQRKFDNLTKAERGGLSELDKAGFIKRQLVETRQITKHVAQILDSRMNTKYDENDKLIREVKVITLKSKLVSDFRKDFQFYKVREINNYHHAHDAYLNAVVGTALIKKYPKLESEFVYGDYKVYDVRKMIAKSEQEIGKATAKYFFYSNIMNFFKTEITLANGEIRKRPLIETNGETGEIVWDKGRDFATVRKVLSMPQVNIVKKTEVQTGGFSKESILPKRNSDKLIARKKDWDPKKYGGFDSPTVAYSVLVVAKVEKGKSKKLKSVKELLGITIMERSSFEKNPIDFLEAKGYKEVKKDLIIKLPKYSLFELENGRKRMLASAGELQKGNELALPSKYVNFLYLASHYEKLKGSPEDNEQKQLFVEQHKHYLDEIIEQISEFSKRVILADANLDKVLSAYNKHRDKPIREQAENIIHLFTLTNLGAPAAFKYFDTTIDRKRYTSTKEVLDATLIHQSITGLYETRIDLSQLGGDGGGGGEAAAKGGTLGDQGSRGSDPLPEPRVTLTVEGIPTEFLVNTGAEHSVLTKPMGKMGSKRTVVAGATGSKVYPWTTKRLLKIGQKQVTHSFLVIPECPAPLLGRDLLTKLKAQIQFSTEGPQVTWEDRPAMCLVLNLEEEYRLHEKPVPPSIDPSWLQLFPMVWAEKAGMGLANQVPPVVVELKSDASPVAVRQYPMSKEAREGIRPHIQRFLDLGILVPCQSPWNTPLLPVKKPGTNDYRPVQDLREVNKRVQDIHPTVPNPYNLLSSLPPSHTWYSVLDLKDAFFCLKLHPNSQPLFAFEWRDPEKGNTGQLTWTRLPQGFKNSPTLFNEALHRDLASFRALNPQVVMLQYVDDLLVAAPTYRDCKEGTRRLLQELSKLGYRVSAKKAQLCREEVTYLGYLLKGGKRWLTPARKATVMKIPTPTTPRQVREFLGTAGFCRLWIPGFASLAAPLYPLTRPKVPFTWTEAHQEAFGRIKEALLSAPALALPDLTKPFALYVDEKEGVARGVLTQTLGPWRRPVAYLSKKLDPVASGWPTCLKAIAAVALLLKDADKLTLGQNVLVIAPHNLESIVRQPPDRWMTNARMTHYQSLLLNERVSFAPPAILNPATLLPVESDDTPIHICSEILAEETGTRPDLRDQPLPGVPAWYTDGSSFIMDGRRQAGAAIVDNKRTVWASNLPEGTSAQKAELIALTQALRLAEGKSINIYTDSRYAFATAHVHGAIYKQRGWLTSAGKDIKNKEEILALLEAIHLPKRVAIIHCPGHQRGTDPVATGNRKADEAAKQAAQSTRILTETTKNAGKRTADGSEFEKRTADGSEFESPKKKAKVE

SEQ ID NO: 6688 - protein, 2215 aa, synthetic construct
MPAAKRVKLDGGDKKYSIGLDIGTNSVGWAVITDEYKVPSKKFKVLGNTDRHSIKKNLIGALLFDSGETAEATRLKRTARRRYTRRKNRICYLQEIFSNEMAKVDDSFFHRLEESFLVEEDKKHERHPIFGNIVDEVAYHEKYPTIYHLRKKLVDSTDKADLRLIYLALAHMIKFRGHFLIEGDLNPDNSDVDKLFIQLVQTYNQLFEENPINASGVDAKAILSARLSKSRRLENLIAQLPGEKKNGLFGNLIALSLGLTPNFKSNFDLAEDAKLQLSKDTYDDDLDNLLAQIGDQYADLFLAAKNLSDAILLSDILRVNTEITKAPLSASMIKRYDEHHQDLTLLKALVRQQLPEKYKEIFFDQSKNGYAGYIDGGASQEEFYKFIKPILEKMDGTEELLVKLNREDLLRKQRTFDNGSIPHQIHLGELHAILRRQEDFYPFLKDNREKIEKILTFRIPYYVGPLARGNSRFAWMTRKSEETITPWNFEEVVDKGASAQSFIERMTNFDKNLPNEKVLPKHSLLYEYFTVYNELTKVKYVTEGMRKPAFLSGEQKKAIVDLLFKTNRKVTVKQLKEDYFKKIECFDSVEISGVEDRFNASLGTYHDLLKIIKDKDFLDNEENEDILEDIVLTLTLFEDREMIEERLKTYAHLFDDKVMKQLKRRRYTGWGRLSRKLINGIRDKQSGKTILDFLKSDGFANRNFMQLIHDDSLTFKEDIQKAQVSGQGDSLHEHIANLAGSPAIKKGILQTVKVVDELVKVMGRHKPENIVIEMARENQTTQKGQKNSRERMKRIEEGIKELGSQILKEHPVENTQLQNEKLYLYYLQNGRDMYVDQELDINRLSDYDVDHIVPQSFLKDDSIDNKVLTRSDKARGKSDNVPSEEVVKKMKNYWRQLLNAKLITQRKFDNLTKAERGGLSELDKAGFIKRQLVETRQITKHVAQILDSRMNTKYDENDKLIREVKVITLKSKLVSDFRKDFQFYKVREINNYHHAHDAYLNAVVGTALIKKYPKLESEFVYGDYKVYDVRKMIAKSEQEIGKATAKYFFYSNIMNFFKTEITLANGEIRKRPLIETNGETGEIVWDKGRDFATVRKVLSMPQVNIVKKTEVQTGGFSKESILPKRNSDKLIARKKDWDPKKYGGFDSPTVAYSVLVVAKVEKGKSKKLKSVKELLGITIMERSSFEKNPIDFLEAKGYKEVKKDLIIKLPKYSLFELENGRKRMLASAGELQKGNELALPSKYVNFLYLASHYEKLKGSPEDNEQKQLFVEQHKHYLDEIIEQISEFSKRVILADANLDKVLSAYNKHRDKPIREQAENIIHLFTLTNLGAPAAFKYFDTTIDRKRYTSTKEVLDATLIHQSITGLYETRIDLSQLGGDGGGGGEAAAKGGTLGDQGSRGSDPLPEPRVTLTVEGIPTEFLVNTGAEHSVLTKPMGKMGSKRTVVAGATGSKVYPWTTKRLLKIGQKQVTHSFLVIPECPAPLLGRDLLTKLKAQIQFSTEGPQVTWEDRPAMCLVLNLEEEYRLHEKPVPPSIDPSWLQLFPMVWAEKAGMGLANQVPPVVVELKSDASPVAVRQYPMSKEAREGIRPHIQRFLDLGILVPCQSPWNTPLLPVKKPGTNDYRPVQDLREVNKRVQDIHPTVPNPYNLLSSLPPSHTWYSVLDLKDAFFCLKLHPNSQPLFAFEWRDPEKGNTGQLTWTRLPQGFKNSPTLFNEALHRDLASFRALNPQVVMLQYVDDLLVAAPTYRDCKEGTRRLLQELSKLGYRVSAKKAQLCREEVTYLGYLLKGGKRWLTPARKATVMKIPTPTTPRQVREFLGKAGFCRLFIPGFASLAAPLYPLTRPKVPFTWTEAHQEAFGRIKEALLSAPALALPDLTKPFALYVDEKEGVARGVLTQTLGPWRRPVAYLSKKLDPVASGWPTCLKAIAAVALLLKDADKLTLGQNVLVIAPHNLESIVRQPPDRWMTNARMTHYQSLLLNERVSFAPPAILNPATLLPVESDDTPIHICSEILAEETGTRPDLRDQPLPGVPAWYTDGSSFIMDGRRQAGAAIVDNKRTVWASNLPEGTSAQKAELIALTQALRLAEGKSINIYTDSRYAFATAHVHGAIYKQRGWLTSAGKDIKNKEEILALLEAIHLPKRVAIIHCPGHQRGTDPVATGNRKADEAAKQAAQSTRILTETTKNAGKRTADGSEFEKRTADGSEFESPKKKAKVE

SEQ ID NO: 6689 - protein, 2093 aa, synthetic construct
MPAAKRVKLDGGDKKYSIGLDIGTNSVGWAVITDEYKVPSKKFKVLGNTDRHSIKKNLIGALLFDSGETAEATRLKRTARRRYTRRKNRICYLQEIFSNEMAKVDDSFFHRLEESFLVEEDKKHERHPIFGNIVDEVAYHEKYPTIYHLRKKLVDSTDKADLRLIYLALAHMIKFRGHFLIEGDLNPDNSDVDKLFIQLVQTYNQLFEENPINASGVDAKAILSARLSKSRRLENLIAQLPGEKKNGLFGNLIALSLGLTPNFKSNFDLAEDAKLQLSKDTYDDDLDNLLAQIGDQYADLFLAAKNLSDAILLSDILRVNTEITKAPLSASMIKRYDEHHQDLTLLKALVRQQLPEKYKEIFFDQSKNGYAGYIDGGASQEEFYKFIKPILEKMDGTEELLVKLNREDLLRKQRTFDNGSIPHQIHLGELHAILRRQEDFYPFLKDNREKIEKILTFRIPYYVGPLARGNSRFAWMTRKSEETITPWNFEEVVDKGASAQSFIERMTNFDKNLPNEKVLPKHSLLYEYFTVYNELTKVKYVTEGMRKPAFLSGEQKKAIVDLLFKTNRKVTVKQLKEDYFKKIECFDSVEISGVEDRFNASLGTYHDLLKIIKDKDFLDNEENEDILEDIVLTLTLFEDREMIEERLKTYAHLFDDKVMKQLKRRRYTGWGRLSRKLINGIRDKQSGKTILDFLKSDGFANRNFMQLIHDDSLTFKEDIQKAQVSGQGDSLHEHIANLAGSPAIKKGILQTVKVVDELVKVMGRHKPENIVIEMARENQTTQKGQKNSRERMKRIEEGIKELGSQILKEHPVENTQLQNEKLYLYYLQNGRDMYVDQELDINRLSDYDVDHIVPQSFLKDDSIDNKVLTRSDKARGKSDNVPSEEVVKKMKNYWRQLLNAKLITQRKFDNLTKAERGGLSELDKAGFIKRQLVETRQITKHVAQILDSRMNTKYDENDKLIREVKVITLKSKLVSDFRKDFQFYKVREINNYHHAHDAYLNAVVGTALIKKYPKLESEFVYGDYKVYDVRKMIAKSEQEIGKATAKYFFYSNIMNFFKTEITLANGEIRKRPLIETNGETGEIVWDKGRDFATVRKVLSMPQVNIVKKTEVQTGGFSKESILPKRNSDKLIARKKDWDPKKYGGFDSPTVAYSVLVVAKVEKGKSKKLKSVKELLGITIMERSSFEKNPIDFLEAKGYKEVKKDLIIKLPKYSLFELENGRKRMLASAGELQKGNELALPSKYVNFLYLASHYEKLKGSPEDNEQKQLFVEQHKHYLDEIIEQISEFSKRVILADANLDKVLSAYNKHRDKPIREQAENIIHLFTLTNLGAPAAFKYFDTTIDRKRYTSTKEVLDATLIHQSITGLYETRIDLSQLGGDGGGGGEAAAKGGTLNLEDEYRLYETSAEPEVSPGSTWLSDFPQAWAETGGMGLAVRQAPLIIPLKATSTPVSIKQYPMSQEAKLGIKPHIQRLLDQGILVPCQSPWNTPLLPVKKPGTNDYRPVQDLREVNKRVEDIHPTVPNPYNLLSGLPPSHRWYTVLDLKDAFFCLRLHPTSQPLFAFEWRDPGMGISGQLTWTRLPQGFKNSPTLFNEALHRDLADFRIQHPDLILLQYVDDILLAATSELDCQQGTRALLLTLGNLGYRASAKKAQLCQKQVKYLGYLLKEGQRWLTEARKETVMGQPTPKTPRQLREFLGTAGFCRLWIPGFAEMAAPLYPLTKPGTLFNWGPDQQKAYQEIKQALLTAPALGLPDLTKPFELFVDEKQGYAKGVLTQKLGPWRRPVAYLSKKLDPVAAGWPPCLRMVAAIAVLRKDAGKLTMGQPLVILAPHAVEALVKQPPDRWLSNARMTHYQAMLLDTDRVQFGPVVALNPATLLPLPEEGAPHDCLEILAETHGTRPDLTDQPIPDADHTWYTDGSSFLQEGQRKAGAAVTTETEVIWARALPAGTSAQRAELIALTQALKMAEGKRLNVYTDSRYAFATAHIHGEIYRRRGWLTSEGREIKNKSEILALLKALFLPKRLSIIHCLGHQKGDSAEARGNRLADQAAREAAIKTPPDTSTLLAGKRTADGSEFEKRTADGSEFESPKKKAKVE

SEQ ID NO: 6690 - protein, 2093 aa, synthetic construct
MPAAKRVKLDGGDKKYSIGLDIGTNSVGWAVITDEYKVPSKKFKVLGNTDRHSIKKNLIGALLFDSGETAEATRLKRTARRRYTRRKNRICYLQEIFSNEMAKVDDSFFHRLEESFLVEEDKKHERHPIFGNIVDEVAYHEKYPTIYHLRKKLVDSTDKADLRLIYLALAHMIKFRGHFLIEGDLNPDNSDVDKLFIQLVQTYNQLFEENPINASGVDAKAILSARLSKSRRLENLIAQLPGEKKNGLFGNLIALSLGLTPNFKSNFDLAEDAKLQLSKDTYDDDLDNLLAQIGDQYADLFLAAKNLSDAILLSDILRVNTEITKAPLSASMIKRYDEHHQDLTLLKALVRQQLPEKYKEIFFDQSKNGYAGYIDGGASQEEFYKFIKPILEKMDGTEELLVKLNREDLLRKQRTFDNGSIPHQIHLGELHAILRRQEDFYPFLKDNREKIEKILTFRIPYYVGPLARGNSRFAWMTRKSEETITPWNFEEVVDKGASAQSFIERMTNFDKNLPNEKVLPKHSLLYEYFTVYNELTKVKYVTEGMRKPAFLSGEQKKAIVDLLFKTNRKVTVKQLKEDYFKKIECFDSVEISGVEDRFNASLGTYHDLLKIIKDKDFLDNEENEDILEDIVLTLTLFEDREMIEERLKTYAHLFDDKVMKQLKRRRYTGWGRLSRKLINGIRDKQSGKTILDFLKSDGFANRNFMQLIHDDSLTFKEDIQKAQVSGQGDSLHEHIANLAGSPAIKKGILQTVKVVDELVKVMGRHKPENIVIEMARENQTTQKGQKNSRERMKRIEEGIKELGSQILKEHPVENTQLQNEKLYLYYLQNGRDMYVDQELDINRLSDYDVDHIVPQSFLKDDSIDNKVLTRSDKARGKSDNVPSEEVVKKMKNYWRQLLNAKLITQRKFDNLTKAERGGLSELDKAGFIKRQLVETRQITKHVAQILDSRMNTKYDENDKLIREVKVITLKSKLVSDFRKDFQFYKVREINNYHHAHDAYLNAVVGTALIKKYPKLESEFVYGDYKVYDVRKMIAKSEQEIGKATAKYFFYSNIMNFFKTEITLANGEIRKRPLIETNGETGEIVWDKGRDFATVRKVLSMPQVNIVKKTEVQTGGFSKESILPKRNSDKLIARKKDWDPKKYGGFDSPTVAYSVLVVAKVEKGKSKKLKSVKELLGITIMERSSFEKNPIDFLEAKGYKEVKKDLIIKLPKYSLFELENGRKRMLASAGELQKGNELALPSKYVNFLYLASHYEKLKGSPEDNEQKQLFVEQHKHYLDEIIEQISEFSKRVILADANLDKVLSAYNKHRDKPIREQAENIIHLFTLTNLGAPAAFKYFDTTIDRKRYTSTKEVLDATLIHQSITGLYETRIDLSQLGGDGGGGGEAAAKGGTLNLEDEYRLYETSAEPEVSPGSTWLSDFPQAWAETGGMGLAVRQAPLIIPLKATSTPVSIKQYPMSQEAKLGIKPHIQRLLDQGILVPCQSPWNTPLLPVKKPGTNDYRPVQDLREVNKRVEDIHPTVPNPYNLLSGLPPSHRWYTVLDLKDAFFCLRLHPTSQPLFAFEWRDPGMGISGQLTWTRLPQGFKNSPTLFNEALHRDLADFRIQHPDLILLQYVDDILLAATSELDCQQGTRALLLTLGNLGYRASAKKAQLCQKQVKYLGYLLKEGQRWLTEARKETVMGQPTPKTPRQLREFLGKAGFCRLFIPGFAEMAAPLYPLTKPGTLFNWGPDQQKAYQEIKQALLTAPALGLPDLTKPFELFVDEKQGYAKGVLTQKLGPWRRPVAYLSKKLDPVAAGWPPCLRMVAAIAVLRKDAGKLTMGQPLVILAPHAVEALVKQPPDRWLSNARMTHYQAMLLDTDRVQFGPVVALNPATLLPLPEEGAPHDCLEILAETHGTRPDLTDQPIPDADHTWYTDGSSFLQEGQRKAGAAVTTETEVIWARALPAGTSAQRAELIALTQALKMAEGKRLNVYTDSRYAFATAHIHGEIYRRRGWLTSEGREIKNKSEILALLKALFLPKRLSIIHCLGHQKGDSAEARGNRLADQAAREAAIKTPPDTSTLLAGKRTADGSEFEKRTADGSEFESPKKKAKVE

SEQ ID NO: 6691 - protein, 2093 aa, synthetic construct
MPAAKRVKLDGGDKKYSIGLDIGTNSVGWAVITDEYKVPSKKFKVLGNTDRHSIKKNLIGALLFDSGETAEATRLKRTARRRYTRRKNRICYLQEIFSNEMAKVDDSFFHRLEESFLVEEDKKHERHPIFGNIVDEVAYHEKYPTIYHLRKKLVDSTDKADLRLIYLALAHMIKFRGHFLIEGDLNPDNSDVDKLFIQLVQTYNQLFEENPINASGVDAKAILSARLSKSRRLENLIAQLPGEKKNGLFGNLIALSLGLTPNFKSNFDLAEDAKLQLSKDTYDDDLDNLLAQIGDQYADLFLAAKNLSDAILLSDILRVNTEITKAPLSASMIKRYDEHHQDLTLLKALVRQQLPEKYKEIFFDQSKNGYAGYIDGGASQEEFYKFIKPILEKMDGTEELLVKLNREDLLRKQRTFDNGSIPHQIHLGELHAILRRQEDFYPFLKDNREKIEKILTFRIPYYVGPLARGNSRFAWMTRKSEETITPWNFEEVVDKGASAQSFIERMTNFDKNLPNEKVLPKHSLLYEYFTVYNELTKVKYVTEGMRKPAFLSGEQKKAIVDLLFKTNRKVTVKQLKEDYFKKIECFDSVEISGVEDRFNASLGTYHDLLKIIKDKDFLDNEENEDILEDIVLTLTLFEDREMIEERLKTYAHLFDDKVMKQLKRRRYTGWGRLSRKLINGIRDKQSGKTILDFLKSDGFANRNFMQLIHDDSLTFKEDIQKAQVSGQGDSLHEHIANLAGSPAIKKGILQTVKVVDELVKVMGRHKPENIVIEMARENQTTQKGQKNSRERMKRIEEGIKELGSQILKEHPVENTQLQNEKLYLYYLQNGRDMYVDQELDINRLSDYDVDHIVPQSFLKDDSIDNKVLTRSDKARGKSDNVPSEEVVKKMKNYWRQLLNAKLITQRKFDNLTKAERGGLSELDKAGFIKRQLVETRQITKHVAQILDSRMNTKYDENDKLIREVKVITLKSKLVSDFRKDFQFYKVREINNYHHAHDAYLNAVVGTALIKKYPKLESEFVYGDYKVYDVRKMIAKSEQEIGKATAKYFFYSNIMNFFKTEITLANGEIRKRPLIETNGETGEIVWDKGRDFATVRKVLSMPQVNIVKKTEVQTGGFSKESILPKRNSDKLIARKKDWDPKKYGGFDSPTVAYSVLVVAKVEKGKSKKLKSVKELLGITIMERSSFEKNPIDFLEAKGYKEVKKDLIIKLPKYSLFELENGRKRMLASAGELQKGNELALPSKYVNFLYLASHYEKLKGSPEDNEQKQLFVEQHKHYLDEIIEQISEFSKRVILADANLDKVLSAYNKHRDKPIREQAENIIHLFTLTNLGAPAAFKYFDTTIDRKRYTSTKEVLDATLIHQSITGLYETRIDLSQLGGDGGGGGEAAAKGGLGIEDEYRLHETSTEPDVSLGSTWLSDFPQAWAETGGMGLAVRQAPLIIPLKATSTPVSIQQYPMSHEARLGIKPHIQRLLDQGILVPCQSPWNTPLLPVKKPGTNDYRPVQDLREVNKRVEDIHPTVPNPYNLLSGLPPSHQWYTVLDLKDAFFCLRLHPTSQPLFAFEWRDPGMGISGQLTWTRLPQGFKNSPTLFNEALHRDLADFRIQHPDLILLQYVDDILLAATSELDCQQGTRALLQTLGDLGYRASAKKAQICQKQVKYLGYLLREGQRWLTEARKETVMGQPVPKTPRQLREFLGKAGFCRLFIPGFAEMAAPLYPLTKPGTLFSWGPDQQKAYQEIKQALLTAPALGLPDLTKPFELFVDEKQGYAKGVLTQKLGPWRRPVAYLSKKLDPVAAGWPPCLRMVAAIAVLTKDAGKLTMGQPLVILAPHAVEALVKQPPDRWLSNARMTHYQAMLLDTDRVQFGPVVALNPATLLPLPEEGAPHDCLEILAETHGTRPDLTDQPIPDADHTWYTDGSSFLQEGQRKAGAAVTTETEVIWAGALPAGTSAQRAELIALTQALKMAEGKRLNVYTDSRYAFATAHIHGEIYRRRGWLTSEGREIKNKSEILALLKALFLPKRLSIIHCLGHQKGDSAEARGNRLADQAAREAAIKTPPDTSTLLIAGKRTADGSEFEKRTADGSEFESPKKKAKVE

SEQ ID NO: 6692 - protein, 2093 aa, synthetic construct
MPAAKRVKLDGGDKKYSIGLDIGTNSVGWAVITDEYKVPSKKFKVLGNTDRHSIKKNLIGALLFDSGETAEATRLKRTARRRYTRRKNRICYLQEIFSNEMAKVDDSFFHRLEESFLVEEDKKHERHPIFGNIVDEVAYHEKYPTIYHLRKKLVDSTDKADLRLIYLALAHMIKFRGHFLIEGDLNPDNSDVDKLFIQLVQTYNQLFEENPINASGVDAKAILSARLSKSRRLENLIAQLPGEKKNGLFGNLIALSLGLTPNFKSNFDLAEDAKLQLSKDTYDDDLDNLLAQIGDQYADLFLAAKNLSDAILLSDILRVNTEITKAPLSASMIKRYDEHHQDLTLLKALVRQQLPEKYKEIFFDQSKNGYAGYIDGGASQEEFYKFIKPILEKMDGTEELLVKLNREDLLRKQRTFDNGSIPHQIHLGELHAILRRQEDFYPFLKDNREKIEKILTFRIPYYVGPLARGNSRFAWMTRKSEETITPWNFEEVVDKGASAQSFIERMTNFDKNLPNEKVLPKHSLLYEYFTVYNELTKVKYVTEGMRKPAFLSGEQKKAIVDLLFKTNRKVTVKQLKEDYFKKIECFDSVEISGVEDRFNASLGTYHDLLKIIKDKDFLDNEENEDILEDIVLTLTLFEDREMIEERLKTYAHLFDDKVMKQLKRRRYTGWGRLSRKLINGIRDKQSGKTILDFLKSDGFANRNFMQLIHDDSLTFKEDIQKAQVSGQGDSLHEHIANLAGSPAIKKGILQTVKVVDELVKVMGRHKPENIVIEMARENQTTQKGQKNSRERMKRIEEGIKELGSQILKEHPVENTQLQNEKLYLYYLQNGRDMYVDQELDINRLSDYDVDHIVPQSFLKDDSIDNKVLTRSDKARGKSDNVPSEEVVKKMKNYWRQLLNAKLITQRKFDNLTKAERGGLSELDKAGFIKRQLVETRQITKHVAQILDSRMNTKYDENDKLIREVKVITLKSKLVSDFRKDFQFYKVREINNYHHAHDAYLNAVVGTALIKKYPKLESEFVYGDYKVYDVRKMIAKSEQEIGKATAKYFFYSNIMNFFKTEITLANGEIRKRPLIETNGETGEIVWDKGRDFATVRKVLSMPQVNIVKKTEVQTGGFSKESILPKRNSDKLIARKKDWDPKKYGGFDSPTVAYSVLVVAKVEKGKSKKLKSVKELLGITIMERSSFEKNPIDFLEAKGYKEVKKDLIIKLPKYSLFELENGRKRMLASAGELQKGNELALPSKYVNFLYLASHYEKLKGSPEDNEQKQLFVEQHKHYLDEIIEQISEFSKRVILADANLDKVLSAYNKHRDKPIREQAENIIHLFTLTNLGAPAAFKYFDTTIDRKRYTSTKEVLDATLIHQSITGLYETRIDLSQLGGDGGGGGEAAAKGGTLNIEDEYRLHETSKGPDVPLGSTWLSDFPQAWAETGGMGLAVRQAPLIIPLKATSTPVSIKQYPMSQEARLGIKPHIQRLLDQGILVPCQSPWNTPLLPVKKPGTNDYRPVQDLREVNKRVEDIHPTVPNPYNLLSGLPPSHQWYTVLDLKDAFFCLRLHPTSQSLFAFEWRDPEMGISGQLTWTRLPQGFKNSPTLFNEALHRDLADFRIQHPDLILLQYVDDLLLAATSELDCQQGTRALLQTLGDLGYRASAKKAQICQKQVKYLGYLLKEGQRWLTEARKETVMGQPTPKTPRQLREFLGTAGFCRLWIPGFAEMAAPLYPLTKPGTLFEWGPDQQKAYQEIKQALLTAPALGLPDLTKPFELFVDEKQGYAKGVLTQKLGPWRRPVAYLSKKLDPVAAGWPPCLRMVAAIAVLTKDAGKLTMGQPLVILAPHAVEALVKQPPDRWLSNARMTHYQALLLDTDRVQFGPIVALNPATLLPLPEEGLQHDCLDILAEAHGTRPDLTDQPLPDADHTWYTDGSSFLQEGQRKAGAAVTTETEVVWAKALPAGTSAQRAELIALTQALKMAEGKKLNVYTDSRYAFATAHIHGEIYRRRGWLTSEGKEIKNKDEILALLKALFLPKRLSIIHCPGHQKGNRAEARGNRMADQAAREVATRETPETSTLLAGKRTADGSEFEKRTADGSEFESPKKKAKVE

SEQ ID NO: 6693 - protein, 2087 aa, synthetic construct
MPAAKRVKLDGGDKKYSIGLDIGTNSVGWAVITDEYKVPSKKFKVLGNTDRHSIKKNLIGALLFDSGETAEATRLKRTARRRYTRRKNRICYLQEIFSNEMAKVDDSFFHRLEESFLVEEDKKHERHPIFGNIVDEVAYHEKYPTIYHLRKKLVDSTDKADLRLIYLALAHMIKFRGHFLIEGDLNPDNSDVDKLFIQLVQTYNQLFEENPINASGVDAKAILSARLSKSRRLENLIAQLPGEKKNGLFGNLIALSLGLTPNFKSNFDLAEDAKLQLSKDTYDDDLDNLLAQIGDQYADLFLAAKNLSDAILLSDILRVNTEITKAPLSASMIKRYDEHHQDLTLLKALVRQQLPEKYKEIFFDQSKNGYAGYIDGGASQEEFYKFIKPILEKMDGTEELLVKLNREDLLRKQRTFDNGSIPHQIHLGELHAILRRQEDFYPFLKDNREKIEKILTFRIPYYVGPLARGNSRFAWMTRKSEETITPWNFEEVVDKGASAQSFIERMTNFDKNLPNEKVLPKHSLLYEYFTVYNELTKVKYVTEGMRKPAFLSGEQKKAIVDLLFKTNRKVTVKQLKEDYFKKIECFDSVEISGVEDRFNASLGTYHDLLKIIKDKDFLDNEENEDILEDIVLTLTLFEDREMIEERLKTYAHLFDDKVMKQLKRRRYTGWGRLSRKLINGIRDKQSGKTILDFLKSDGFANRNFMQLIHDDSLTFKEDIQKAQVSGQGDSLHEHIANLAGSPAIKKGILQTVKVVDELVKVMGRHKPENIVIEMARENQTTQKGQKNSRERMKRIEEGIKELGSQILKEHPVENTQLQNEKLYLYYLQNGRDMYVDQELDINRLSDYDVDHIVPQSFLKDDSIDNKVLTRSDKARGKSDNVPSEEVVKKMKNYWRQLLNAKLITQRKFDNLTKAERGGLSELDKAGFIKRQLVETRQITKHVAQILDSRMNTKYDENDKLIREVKVITLKSKLVSDFRKDFQFYKVREINNYHHAHDAYLNAVVGTALIKKYPKLESEFVYGDYKVYDVRKMIAKSEQEIGKATAKYFFYSNIMNFFKTEITLANGEIRKRPLIETNGETGEIVWDKGRDFATVRKVLSMPQVNIVKKTEVQTGGFSKESILPKRNSDKLIARKKDWDPKKYGGFDSPTVAYSVLVVAKVEKGKSKKLKSVKELLGITIMERSSFEKNPIDFLEAKGYKEVKKDLIIKLPKYSLFELENGRKRMLASAGELQKGNELALPSKYVNFLYLASHYEKLKGSPEDNEQKQLFVEQHKHYLDEIIEQISEFSKRVILADANLDKVLSAYNKHRDKPIREQAENIIHLFTLTNLGAPAAFKYFDTTIDRKRYTSTKEVLDATLIHQSITGLYETRIDLSQLGGDGGGGGEAAAKGGTLQLDDEYRLYSPLVKPDQNIQFWLEQFPQAWAETAGMGLAKQVPPQVIQLKASATPVSVRQYPLSKEAQEGIRPHVQRLIQQGILVPVQSPWNTPLLPVRKPGTNDYRPVQDLREVNKRVQDIHPTVPNPYNLLCALPPQRSWYTVLDLKDAFFCLRLHPTSQPLFAFEWRDPGTGRTGQLTWTRLPQGFKNSPTIFDEALHRDLANFRIQHPQVTLLQYVDDLLLAGATKQDCLEGTKALLLELSDLGYRASAKKAQICRREVTYLGYSLRDGQRWLTEARKKTVVQIPAPTTAKQVREFLGTAGFCRLWIPGFATLAAPLYPLTKEKGEFSWAPEHQKAFDAIKKALLSAPALALPDVTKPFTLYVDERKGVARGVLTQTLGPWRRPVAYLSKKLDPVASGWPVCLKAIAAVAILVKDADKLTLGQNITVIAPHALENIVRQPPDRWMTNARMTHYQSLLLTERVTFAPPAALNPATLLPEETDEPVTHDCHQLLIEETGVRKDLTDIPLTGEVLTWFTDGSSYVVEGKRMAGAAVVDGTRTIWASSLPEGTSAQKAELMALTQALRLAEGKSINIYTDSRYAFATAHVHGAIYKQRGLLTSAGREIKNKEEILSLLEALHLPKRLAIIHCPGHQKAKDPISRGNQMADRVAKQAAQGVNLLAGKRTADGSEFEKRTADGSEFESPKKKAKVE

SEQ ID NO: 6694 - protein, 2173 aa, synthetic construct
MPAAKRVKLDGGDKKYSIGLDIGTNSVGWAVITDEYKVPSKKFKVLGNTDRHSIKKNLIGALLFDSGETAEATRLKRTARRRYTRRKNRICYLQEIFSNEMAKVDDSFFHRLEESFLVEEDKKHERHPIFGNIVDEVAYHEKYPTIYHLRKKLVDSTDKADLRLIYLALAHMIKFRGHFLIEGDLNPDNSDVDKLFIQLVQTYNQLFEENPINASGVDAKAILSARLSKSRRLENLIAQLPGEKKNGLFGNLIALSLGLTPNFKSNFDLAEDAKLQLSKDTYDDDLDNLLAQIGDQYADLFLAAKNLSDAILLSDILRVNTEITKAPLSASMIKRYDEHHQDLTLLKALVRQQLPEKYKEIFFDQSKNGYAGYIDGGASQEEFYKFIKPILEKMDGTEELLVKLNREDLLRKQRTFDNGSIPHQIHLGELHAILRRQEDFYPFLKDNREKIEKILTFRIPYYVGPLARGNSRFAWMTRKSEETITPWNFEEVVDKGASAQSFIERMTNFDKNLPNEKVLPKHSLLYEYFTVYNELTKVKYVTEGMRKPAFLSGEQKKAIVDLLFKTNRKVTVKQLKEDYFKKIECFDSVEISGVEDRFNASLGTYHDLLKIIKDKDFLDNEENEDILEDIVLTLTLFEDREMIEERLKTYAHLFDDKVMKQLKRRRYTGWGRLSRKLINGIRDKQSGKTILDFLKSDGFANRNFMQLIHDDSLTFKEDIQKAQVSGQGDSLHEHIANLAGSPAIKKGILQTVKVVDELVKVMGRHKPENIVIEMARENQTTQKGQKNSRERMKRIEEGIKELGSQILKEHPVENTQLQNEKLYLYYLQNGRDMYVDQELDINRLSDYDVDHIVPQSFLKDDSIDNKVLTRSDKARGKSDNVPSEEVVKKMKNYWRQLLNAKLITQRKFDNLTKAERGGLSELDKAGFIKRQLVETRQITKHVAQILDSRMNTKYDENDKLIREVKVITLKSKLVSDFRKDFQFYKVREINNYHHAHDAYLNAVVGTALIKKYPKLESEFVYGDYKVYDVRKMIAKSEQEIGKATAKYFFYSNIMNFFKTEITLANGEIRKRPLIETNGETGEIVWDKGRDFATVRKVLSMPQVNIVKKTEVQTGGFSKESILPKRNSDKLIARKKDWDPKKYGGFDSPTVAYSVLVVAKVEKGKSKKLKSVKELLGITIMERSSFEKNPIDFLEAKGYKEVKKDLIIKLPKYSLFELENGRKRMLASAGELQKGNELALPSKYVNFLYLASHYEKLKGSPEDNEQKQLFVEQHKHYLDEIIEQISEFSKRVILADANLDKVLSAYNKHRDKPIREQAENIIHLFTLTNLGAPAAFKYFDTTIDRKRYTSTKEVLDATLIHQSITGLYETRIDLSQLGGDGGGGGEAAAKGGMDPLQLLQPLEAEIKGTKLKAHWNSGATITCVPQAFLEEEVPIKNIWIKTIHGEKEQPVYYLTFKIQGRKVEAEVISSPYDYILVSPSDIPWLMKKPLQLTTLVPLQEYEERLLKQTMLTGSYKEKLQSLFLKYDALWQHWENQVGHRRIKPHHIATGTVNPRPQKQYPINPKAKASIQTVINDLLKQGVLIQQNSIMNTPVYPVPKPDGKWRMVLDYREVNKTIPLIAAQNQHSAGILSSIFRGKYKTTLDLSNGFWAHSITPESYWLTAFTWLGQQYCWTRLPQGFLNSPALFNADVVDLLKEVPNVQVYVDDIYISHDDPREHLEQLEKVFSLLLNAGYVVSLKKSEIAQHEVEFLGFNITKEGRGLTETFKQKLLNITPPRDLKQLQSILGKLNFARNFIPNFSELVKPLYNIIATAPGKYITWTTDNSQQLQNIISMLNSAENLEERNPEVRLIMKVNTSPSAGYIRFYNEFAKRPIMYLNYVYTKAEVKFTNTEKLLTTIHKGLIKALDLGMGQEILVYSPIVSMTKIQKTPLPERKALPIRWITWMSYLEDPRIQFHYDKTLPELQQVPTVTDDIIAKIKHPSEFSMVFYTDGSAIKHPNVNKSHNAGMGIAQVQFKPEFTVINTWSIPLGDHTAQLAEVAAVEFACKKALKIDGPVLIVTDSFYVAESVNKELPYWQSNGFFNNKKKPLKHVSKWKSIADCIQLKPDIIIIHEKGHQPTASTFHTEGNNLADKLATQGSYVVNAGKRTADGSEFEKRTADGSEFESPKKKAKVE

SEQ ID NO: 6695 - protein, 2093 aa, synthetic construct
MPAAKRVKLDGGDKKYSIGLDIGTNSVGWAVITDEYKVPSKKFKVLGNTDRHSIKKNLIGALLFDSGETAEATRLKRTARRRYTRRKNRICYLQEIFSNEMAKVDDSFFHRLEESFLVEEDKKHERHPIFGNIVDEVAYHEKYPTIYHLRKKLVDSTDKADLRLIYLALAHMIKFRGHFLIEGDLNPDNSDVDKLFIQLVQTYNQLFEENPINASGVDAKAILSARLSKSRRLENLIAQLPGEKKNGLFGNLIALSLGLTPNFKSNFDLAEDAKLQLSKDTYDDDLDNLLAQIGDQYADLFLAAKNLSDAILLSDILRVNTEITKAPLSASMIKRYDEHHQDLTLLKALVRQQLPEKYKEIFFDQSKNGYAGYIDGGASQEEFYKFIKPILEKMDGTEELLVKLNREDLLRKQRTFDNGSIPHQIHLGELHAILRRQEDFYPFLKDNREKIEKILTFRIPYYVGPLARGNSRFAWMTRKSEETITPWNFEEVVDKGASAQSFIERMTNFDKNLPNEKVLPKHSLLYEYFTVYNELTKVKYVTEGMRKPAFLSGEQKKAIVDLLFKTNRKVTVKQLKEDYFKKIECFDSVEISGVEDRFNASLGTYHDLLKIIKDKDFLDNEENEDILEDIVLTLTLFEDREMIEERLKTYAHLFDDKVMKQLKRRRYTGWGRLSRKLINGIRDKQSGKTILDFLKSDGFANRNFMQLIHDDSLTFKEDIQKAQVSGQGDSLHEHIANLAGSPAIKKGILQTVKVVDELVKVMGRHKPENIVIEMARENQTTQKGQKNSRERMKRIEEGIKELGSQILKEHPVENTQLQNEKLYLYYLQNGRDMYVDQELDINRLSDYDVDHIVPQSFLKDDSIDNKVLTRSDKARGKSDNVPSEEVVKKMKNYWRQLLNAKLITQRKFDNLTKAERGGLSELDKAGFIKRQLVETRQITKHVAQILDSRMNTKYDENDKLIREVKVITLKSKLVSDFRKDFQFYKVREINNYHHAHDAYLNAVVGTALIKKYPKLESEFVYGDYKVYDVRKMIAKSEQEIGKATAKYFFYSNIMNFFKTEITLANGEIRKRPLIETNGETGEIVWDKGRDFATVRKVLSMPQVNIVKKTEVQTGGFSKESILPKRNSDKLIARKKDWDPKKYGGFDSPTVAYSVLVVAKVEKGKSKKLKSVKELLGITIMERSSFEKNPIDFLEAKGYKEVKKDLIIKLPKYSLFELENGRKRMLASAGELQKGNELALPSKYVNFLYLASHYEKLKGSPEDNEQKQLFVEQHKHYLDEIIEQISEFSKRVILADANLDKVLSAYNKHRDKPIREQAENIIHLFTLTNLGAPAAFKYFDTTIDRKRYTSTKEVLDATLIHQSITGLYETRIDLSQLGGDGGGGGEAAAKGGTLNIEDEYRLHETSKEPDVPLGSTWLSDFPQAWAETGGMGLAVRQAPLIIPLKATSTPVSIKQYPMSQEARLGIKPHIQRLLDQGILVPCQSPWNTPLLPVKKPGTNDYRPVQDLREVNKRVEDIHPTVPNPYNLLSGLPPSHQWYTVLDLKDAFFCLRLHPTSQPLFAFEWRDPEMGISGQLTWTRLPQGFKNSPTLFNEALHRDLADFRIQHPDLILLQYVDDLLLAATSEQDCQRGTRALLQTLGNLGYRASAKKAQICQKQVKYLGYLLKEGQRWLTEARKETVMGQPTPKTPRQLREFLGTAGFCRLWIPGFAEMAAPLYPLTKPGTLFNWGPDQQKAYQEIKQALLTAPALGLPDLTKPFELFVDEKQGYAKGVLTQKLGPWRRPVAYLSKKLDPVAAGWPPCLRMVAAIAVLTKDAGKLTMGQPLVILAPHAVEALVKQPPDRWLSNARMTHYQAMLLDTDRVQFGPVVALNPATLLPLPEKEAPHDCLEILAETHGTRPDLTDQPIPDADYTWYTDGSSFLQEGQRRAGAAVTTETEVIWARALPAGTSAQRAELIALTQALKMAEGKKLNVYTDSRYAFATAHVHGEIYRRRGWLTSEGREIKNKNEILALLKALFLPKRLSIIHCPGHQKGNSAEARGNRMADQAAREAAMKAVLETSTLLAGKRTADGSEFEKRTADGSEFESPKKKAKVE

SEQ ID NO: 6696 - protein, 2091 aa, synthetic construct
MPAAKRVKLDGGDKKYSIGLDIGTNSVGWAVITDEYKVPSKKFKVLGNTDRHSIKKNLIGALLFDSGETAEATRLKRTARRRYTRRKNRICYLQEIFSNEMAKVDDSFFHRLEESFLVEEDKKHERHPIFGNIVDEVAYHEKYPTIYHLRKKLVDSTDKADLRLIYLALAHMIKFRGHFLIEGDLNPDNSDVDKLFIQLVQTYNQLFEENPINASGVDAKAILSARLSKSRRLENLIAQLPGEKKNGLFGNLIALSLGLTPNFKSNFDLAEDAKLQLSKDTYDDDLDNLLAQIGDQYADLFLAAKNLSDAILLSDILRVNTEITKAPLSASMIKRYDEHHQDLTLLKALVRQQLPEKYKEIFFDQSKNGYAGYIDGGASQEEFYKFIKPILEKMDGTEELLVKLNREDLLRKQRTFDNGSIPHQIHLGELHAILRRQEDFYPFLKDNREKIEKILTFRIPYYVGPLARGNSRFAWMTRKSEETITPWNFEEVVDKGASAQSFIERMTNFDKNLPNEKVLPKHSLLYEYFTVYNELTKVKYVTEGMRKPAFLSGEQKKAIVDLLFKTNRKVTVKQLKEDYFKKIECFDSVEISGVEDRFNASLGTYHDLLKIIKDKDFLDNEENEDILEDIVLTLTLFEDREMIEERLKTYAHLFDDKVMKQLKRRRYTGWGRLSRKLINGIRDKQSGKTILDFLKSDGFANRNFMQLIHDDSLTFKEDIQKAQVSGQGDSLHEHIANLAGSPAIKKGILQTVKVVDELVKVMGRHKPENIVIEMARENQTTQKGQKNSRERMKRIEEGIKELGSQILKEHPVENTQLQNEKLYLYYLQNGRDMYVDQELDINRLSDYDVDHIVPQSFLKDDSIDNKVLTRSDKARGKSDNVPSEEVVKKMKNYWRQLLNAKLITQRKFDNLTKAERGGLSELDKAGFIKRQLVETRQITKHVAQILDSRMNTKYDENDKLIREVKVITLKSKLVSDFRKDFQFYKVREINNYHHAHDAYLNAVVGTALIKKYPKLESEFVYGDYKVYDVRKMIAKSEQEIGKATAKYFFYSNIMNFFKTEITLANGEIRKRPLIETNGETGEIVWDKGRDFATVRKVLSMPQVNIVKKTEVQTGGFSKESILPKRNSDKLIARKKDWDPKKYGGFDSPTVAYSVLVVAKVEKGKSKKLKSVKELLGITIMERSSFEKNPIDFLEAKGYKEVKKDLIIKLPKYSLFELENGRKRMLASAGELQKGNELALPSKYVNFLYLASHYEKLKGSPEDNEQKQLFVEQHKHYLDEIIEQISEFSKRVILADANLDKVLSAYNKHRDKPIREQAENIIHLFTLTNLGAPAAFKYFDTTIDRKRYTSTKEVLDATLIHQSITGLYETRIDLSQLGGDGGEAAAKGGGGGVLNLEEEYRLHEKPVPSSIDPSWLQLFPTVWAERAGMGLANQVPPVVVELRSGASPVAVRQYPMSKEAREGIRPHIQKFLDLGVLVPCRSPWNTPLLPVKKPGTNDYRPVQDLREINKRVQDIHPTVPNPYNLLSSLPPSYTWYSVLDLKDAFFCLRLHPNSQPLFAFEWKDPEKGNTGQLTWTRLPQGFKNSPTLFNEALHRDLAPFRALNPQVVLLQYVDDLLVAAPTYEDCKKGTQKLLQELSKLGYRVSAKKAQLCQREVTYLGYLLKEGKRWLTPARKATVMKIPVPTTPRQVREFLGTAGFCRLWIPGFASLAAPLYPLTKPSIPFIWTEEHQQAFDHIKKALLSAPALALPDLTKPFTLYIDERAGVARGVLTQTLGPWRRPVAYLSKKLDPVASGWPTCLKAVAAVALLLKDADKLTLGQNVTVIASHSLESIVRQPPDRWMTNARMTHYQSLLLNERVSFAPPAVLNPATLLPVESEATPVHRCSEILAEETGTRRDLEDQPLPGVPTWYTDGSSFITEGKRRAGAPIVDGKRTVWASSLPEGTSAQKAELVALTQALRLAEGKNINIYTDSRYAFATAHIHGAIYKQRGWLTSAGKDIKNKEEILALLEAIHLPRRVAIIHCPGHQRGSNPVATGNRRADEAAKQAALSTRVLAGTTKPAGKRTADGSEFEKRTADGSEFESPKKKAKVE

SEQ ID NO: 6697 - protein, 2091 aa, synthetic construct
MPAAKRVKLDGGDKKYSIGLDIGTNSVGWAVITDEYKVPSKKFKVLGNTDRHSIKKNLIGALLFDSGETAEATRLKRTARRRYTRRKNRICYLQEIFSNEMAKVDDSFFHRLEESFLVEEDKKHERHPIFGNIVDEVAYHEKYPTIYHLRKKLVDSTDKADLRLIYLALAHMIKFRGHFLIEGDLNPDNSDVDKLFIQLVQTYNQLFEENPINASGVDAKAILSARLSKSRRLENLIAQLPGEKKNGLFGNLIALSLGLTPNFKSNFDLAEDAKLQLSKDTYDDDLDNLLAQIGDQYADLFLAAKNLSDAILLSDILRVNTEITKAPLSASMIKRYDEHHQDLTLLKALVRQQLPEKYKEIFFDQSKNGYAGYIDGGASQEEFYKFIKPILEKMDGTEELLVKLNREDLLRKQRTFDNGSIPHQIHLGELHAILRRQEDFYPFLKDNREKIEKILTFRIPYYVGPLARGNSRFAWMTRKSEETITPWNFEEVVDKGASAQSFIERMTNFDKNLPNEKVLPKHSLLYEYFTVYNELTKVKYVTEGMRKPAFLSGEQKKAIVDLLFKTNRKVTVKQLKEDYFKKIECFDSVEISGVEDRFNASLGTYHDLLKIIKDKDFLDNEENEDILEDIVLTLTLFEDREMIEERLKTYAHLFDDKVMKQLKRRRYTGWGRLSRKLINGIRDKQSGKTILDFLKSDGFANRNFMQLIHDDSLTFKEDIQKAQVSGQGDSLHEHIANLAGSPAIKKGILQTVKVVDELVKVMGRHKPENIVIEMARENQTTQKGQKNSRERMKRIEEGIKELGSQILKEHPVENTQLQNEKLYLYYLQNGRDMYVDQELDINRLSDYDVDHIVPQSFLKDDSIDNKVLTRSDKARGKSDNVPSEEVVKKMKNYWRQLLNAKLITQRKFDNLTKAERGGLSELDKAGFIKRQLVETRQITKHVAQILDSRMNTKYDENDKLIREVKVITLKSKLVSDFRKDFQFYKVREINNYHHAHDAYLNAVVGTALIKKYPKLESEFVYGDYKVYDVRKMIAKSEQEIGKATAKYFFYSNIMNFFKTEITLANGEIRKRPLIETNGETGEIVWDKGRDFATVRKVLSMPQVNIVKKTEVQTGGFSKESILPKRNSDKLIARKKDWDPKKYGGFDSPTVAYSVLVVAKVEKGKSKKLKSVKELLGITIMERSSFEKNPIDFLEAKGYKEVKKDLIIKLPKYSLFELENGRKRMLASAGELQKGNELALPSKYVNFLYLASHYEKLKGSPEDNEQKQLFVEQHKHYLDEIIEQISEFSKRVILADANLDKVLSAYNKHRDKPIREQAENIIHLFTLTNLGAPAAFKYFDTTIDRKRYTSTKEVLDATLIHQSITGLYETRIDLSQLGGDGGEAAAKGGGGGVLNLEEEYRLHEKPVPSSIDPSWLQLFPTVWAERAGMGLANQVPPVVVELRSGASPVAVRQYPMSKEAREGIRPHIQKFLDLGVLVPCRSPWNTPLLPVKKPGTNDYRPVQDLREINKRVQDIHPTVPNPYNLLSSLPPSYTWYSVLDLKDAFFCLRLHPNSQPLFAFEWKDPEKGNTGQLTWTRLPQGFKNSPTLFNEALHRDLAPFRALNPQVVLLQYVDDLLVAAPTYEDCKKGTQKLLQELSKLGYRVSAKKAQLCQREVTYLGYLLKEGKRWLTPARKATVMKIPVPTTPRQVREFLGKAGFCRLFIPGFASLAAPLYPLTKPSIPFIWTEEHQQAFDHIKKALLSAPALALPDLTKPFTLYIDERAGVARGVLTQTLGPWRRPVAYLSKKLDPVASGWPTCLKAVAAVALLLKDADKLTLGQNVTVIASHSLESIVRQPPDRWMTNARMTHYQSLLLNERVSFAPPAVLNPATLLPVESEATPVHRCSEILAEETGTRRDLEDQPLPGVPTWYTDGSSFITEGKRRAGAPIVDGKRTVWASSLPEGTSAQKAELVALTQALRLAEGKNINIYTDSRYAFATAHIHGAIYKQRGWLTSAGKDIKNKEEILALLEAIHLPRRVAIIHCPGHQRGSNPVATGNRRADEAAKQAALSTRVLAGTTKPAGKRTADGSEFEKRTADGSEFESPKKKAKVE

SEQ ID NO: 6698 - protein, 2124 aa, synthetic construct
MPAAKRVKLDGGDKKYSIGLDIGTNSVGWAVITDEYKVPSKKFKVLGNTDRHSIKKNLIGALLFDSGETAEATRLKRTARRRYTRRKNRICYLQEIFSNEMAKVDDSFFHRLEESFLVEEDKKHERHPIFGNIVDEVAYHEKYPTIYHLRKKLVDSTDKADLRLIYLALAHMIKFRGHFLIEGDLNPDNSDVDKLFIQLVQTYNQLFEENPINASGVDAKAILSARLSKSRRLENLIAQLPGEKKNGLFGNLIALSLGLTPNFKSNFDLAEDAKLQLSKDTYDDDLDNLLAQIGDQYADLFLAAKNLSDAILLSDILRVNTEITKAPLSASMIKRYDEHHQDLTLLKALVRQQLPEKYKEIFFDQSKNGYAGYIDGGASQEEFYKFIKPILEKMDGTEELLVKLNREDLLRKQRTFDNGSIPHQIHLGELHAILRRQEDFYPFLKDNREKIEKILTFRIPYYVGPLARGNSRFAWMTRKSEETITPWNFEEVVDKGASAQSFIERMTNFDKNLPNEKVLPKHSLLYEYFTVYNELTKVKYVTEGMRKPAFLSGEQKKAIVDLLFKTNRKVTVKQLKEDYFKKIECFDSVEISGVEDRFNASLGTYHDLLKIIKDKDFLDNEENEDILEDIVLTLTLFEDREMIEERLKTYAHLFDDKVMKQLKRRRYTGWGRLSRKLINGIRDKQSGKTILDFLKSDGFANRNFMQLIHDDSLTFKEDIQKAQVSGQGDSLHEHIANLAGSPAIKKGILQTVKVVDELVKVMGRHKPENIVIEMARENQTTQKGQKNSRERMKRIEEGIKELGSQILKEHPVENTQLQNEKLYLYYLQNGRDMYVDQELDINRLSDYDVDHIVPQSFLKDDSIDNKVLTRSDKARGKSDNVPSEEVVKKMKNYWRQLLNAKLITQRKFDNLTKAERGGLSELDKAGFIKRQLVETRQITKHVAQILDSRMNTKYDENDKLIREVKVITLKSKLVSDFRKDFQFYKVREINNYHHAHDAYLNAVVGTALIKKYPKLESEFVYGDYKVYDVRKMIAKSEQEIGKATAKYFFYSNIMNFFKTEITLANGEIRKRPLIETNGETGEIVWDKGRDFATVRKVLSMPQVNIVKKTEVQTGGFSKESILPKRNSDKLIARKKDWDPKKYGGFDSPTVAYSVLVVAKVEKGKSKKLKSVKELLGITIMERSSFEKNPIDFLEAKGYKEVKKDLIIKLPKYSLFELENGRKRMLASAGELQKGNELALPSKYVNFLYLASHYEKLKGSPEDNEQKQLFVEQHKHYLDEIIEQISEFSKRVILADANLDKVLSAYNKHRDKPIREQAENIIHLFTLTNLGAPAAFKYFDTTIDRKRYTSTKEVLDATLIHQSITGLYETRIDLSQLGGDGGEAAAKGGGGGLLGRDLLTKLKAQIQFSTEGPQVTWEDRPAMCLVLNLEEEYRLHEKPVPPSIDPSWLQLFPMVWAEKAGMGLANQVPPVVVELKSDASPVAVRQYPMSKEAREGIRPHIQRFLDLGILVPCQSPWNTPLLPVKKPGTNDYRPVQDLREVNKRVQDIHPTVPNPYNLLSSLPPSHTWYSVLDLKDAFFCLKLHPNSQPLFAFEWRDPEKGNTGQLTWTRLPQGFKNSPTLFNEALHRDLASFRALNPQVVMLQYVDDLLVAAPTYRDCKEGTRRLLQELSKLGYRVSAKKAQLCREEVTYLGYLLKGGKRWLTPARKATVMKIPTPTTPRQVREFLGTAGFCRLWIPGFASLAAPLYPLTRPKVPFTWTEAHQEAFGRIKEALLSAPALALPDLTKPFALYVDEKEGVARGVLTQTLGPWRRPVAYLSKKLDPVASGWPTCLKAIAAVALLLKDADKLTLGQNVLVIAPHNLESIVRQPPDRWMTNARMTHYQSLLLNERVSFAPPAILNPATLLPVESDDTPIHICSEILAEETGTRPDLRDQPLPGVPAWYTDGSSFIMDGRRQAGAAIVDNKRTVWASNLPEGTSAQKAELIALTQALRLAEGKSINIYTDSRYAFATAHVHGAIYKQRGWLTSAGKDIKNKEEILALLEAIHLPKRVAIIHCPGHQRGTDPVATGNRKADEAAKQAAQSTRILTETTKNAGKRTADGSEFEKRTADGSEFESPKKKAKVE

SEQ ID NO: 6699 - protein, 2093 aa, synthetic construct
MPAAKRVKLDGGDKKYSIGLDIGTNSVGWAVITDEYKVPSKKFKVLGNTDRHSIKKNLIGALLFDSGETAEATRLKRTARRRYTRRKNRICYLQEIFSNEMAKVDDSFFHRLEESFLVEEDKKHERHPIFGNIVDEVAYHEKYPTIYHLRKKLVDSTDKADLRLIYLALAHMIKFRGHFLIEGDLNPDNSDVDKLFIQLVQTYNQLFEENPINASGVDAKAILSARLSKSRRLENLIAQLPGEKKNGLFGNLIALSLGLTPNFKSNFDLAEDAKLQLSKDTYDDDLDNLLAQIGDQYADLFLAAKNLSDAILLSDILRVNTEITKAPLSASMIKRYDEHHQDLTLLKALVRQQLPEKYKEIFFDQSKNGYAGYIDGGASQEEFYKFIKPILEKMDGTEELLVKLNREDLLRKQRTFDNGSIPHQIHLGELHAILRRQEDFYPFLKDNREKIEKILTFRIPYYVGPLARGNSRFAWMTRKSEETITPWNFEEVVDKGASAQSFIERMTNFDKNLPNEKVLPKHSLLYEYFTVYNELTKVKYVTEGMRKPAFLSGEQKKAIVDLLFKTNRKVTVKQLKEDYFKKIECFDSVEISGVEDRFNASLGTYHDLLKIIKDKDFLDNEENEDILEDIVLTLTLFEDREMIEERLKTYAHLFDDKVMKQLKRRRYTGWGRLSRKLINGIRDKQSGKTILDFLKSDGFANRNFMQLIHDDSLTFKEDIQKAQVSGQGDSLHEHIANLAGSPAIKKGILQTVKVVDELVKVMGRHKPENIVIEMARENQTTQKGQKNSRERMKRIEEGIKELGSQILKEHPVENTQLQNEKLYLYYLQNGRDMYVDQELDINRLSDYDVDHIVPQSFLKDDSIDNKVLTRSDKARGKSDNVPSEEVVKKMKNYWRQLLNAKLITQRKFDNLTKAERGGLSELDKAGFIKRQLVETRQITKHVAQILDSRMNTKYDENDKLIREVKVITLKSKLVSDFRKDFQFYKVREINNYHHAHDAYLNAVVGTALIKKYPKLESEFVYGDYKVYDVRKMIAKSEQEIGKATAKYFFYSNIMNFFKTEITLANGEIRKRPLIETNGETGEIVWDKGRDFATVRKVLSMPQVNIVKKTEVQTGGFSKESILPKRNSDKLIARKKDWDPKKYGGFDSPTVAYSVLVVAKVEKGKSKKLKSVKELLGITIMERSSFEKNPIDFLEAKGYKEVKKDLIIKLPKYSLFELENGRKRMLASAGELQKGNELALPSKYVNFLYLASHYEKLKGSPEDNEQKQLFVEQHKHYLDEIIEQISEFSKRVILADANLDKVLSAYNKHRDKPIREQAENIIHLFTLTNLGAPAAFKYFDTTIDRKRYTSTKEVLDATLIHQSITGLYETRIDLSQLGGDGGEAAAKGGGGGTLNIEDEHRLHETSKEPDVSLGSTWLSDFPQAWAETGGMGLAVRQAPLIIPLKATSTPVSIKQYPMSQEARLGIKPHIQRLLDQGILVPCQSPWNTPLLPVKKPGTNDYRPVQDLREVNKRVEDIHPTVPNPYNLLSGLPPSHQWYTVLDLKDAFFCLRLHPTSQPLFAFEWRDPEMGISGQLTWTRLPQGFKNSPTLFDEALHRDLADFRIQHPDLILLQYVDDLLLAATSELDCQQGTRALLQTLGNLGYRASAKKAQICQKQVKYLGYLLKEGQRWLTEARKETVMGQPTPKTPRQLREFLGTAGFCRLWIPGFAEMAAPLYPLTKTGTLFNWGPDQQKAYQEIKQALLTAPALGLPDLTKPFELFVDEKQGYAKGVLTQKLGPWRRPVAYLSKKLDPVAAGWPPCLRMVAAIAVLTKDAGKLTMGQPLVILAPHAVEALVKQPPDRWLSNARMTHYQALLLDTDRVQFGPVVALNPATLLPLPEEGLQHNCLDILAEAHGTRPDLTDQPLPDADHTWYTDGSSLLQEGQRKAGAAVTTETEVIWAKALPAGTSAQRAELIALTQALKMAEGKKLNVYTDSRYAFATAHIHGEIYRRRGLLTSEGKEIKNKDEILALLKALFLPKRLSIIHCPGHQKGHSAEARGNRMADQAARKAAITETPDTSTLLAGKRTADGSEFEKRTADGSEFESPKKKAKVE

SEQ ID NO: 6700 - protein, 2084 aa, synthetic construct
MPAAKRVKLDGGDKKYSIGLDIGTNSVGWAVITDEYKVPSKKFKVLGNTDRHSIKKNLIGALLFDSGETAEATRLKRTARRRYTRRKNRICYLQEIFSNEMAKVDDSFFHRLEESFLVEEDKKHERHPIFGNIVDEVAYHEKYPTIYHLRKKLVDSTDKADLRLIYLALAHMIKFRGHFLIEGDLNPDNSDVDKLFIQLVQTYNQLFEENPINASGVDAKAILSARLSKSRRLENLIAQLPGEKKNGLFGNLIALSLGLTPNFKSNFDLAEDAKLQLSKDTYDDDLDNLLAQIGDQYADLFLAAKNLSDAILLSDILRVNTEITKAPLSASMIKRYDEHHQDLTLLKALVRQQLPEKYKEIFFDQSKNGYAGYIDGGASQEEFYKFIKPILEKMDGTEELLVKLNREDLLRKQRTFDNGSIPHQIHLGELHAILRRQEDFYPFLKDNREKIEKILTFRIPYYVGPLARGNSRFAWMTRKSEETITPWNFEEVVDKGASAQSFIERMTNFDKNLPNEKVLPKHSLLYEYFTVYNELTKVKYVTEGMRKPAFLSGEQKKAIVDLLFKTNRKVTVKQLKEDYFKKIECFDSVEISGVEDRFNASLGTYHDLLKIIKDKDFLDNEENEDILEDIVLTLTLFEDREMIEERLKTYAHLFDDKVMKQLKRRRYTGWGRLSRKLINGIRDKQSGKTILDFLKSDGFANRNFMQLIHDDSLTFKEDIQKAQVSGQGDSLHEHIANLAGSPAIKKGILQTVKVVDELVKVMGRHKPENIVIEMARENQTTQKGQKNSRERMKRIEEGIKELGSQILKEHPVENTQLQNEKLYLYYLQNGRDMYVDQELDINRLSDYDVDHIVPQSFLKDDSIDNKVLTRSDKARGKSDNVPSEEVVKKMKNYWRQLLNAKLITQRKFDNLTKAERGGLSELDKAGFIKRQLVETRQITKHVAQILDSRMNTKYDENDKLIREVKVITLKSKLVSDFRKDFQFYKVREINNYHHAHDAYLNAVVGTALIKKYPKLESEFVYGDYKVYDVRKMIAKSEQEIGKATAKYFFYSNIMNFFKTEITLANGEIRKRPLIETNGETGEIVWDKGRDFATVRKVLSMPQVNIVKKTEVQTGGFSKESILPKRNSDKLIARKKDWDPKKYGGFDSPTVAYSVLVVAKVEKGKSKKLKSVKELLGITIMERSSFEKNPIDFLEAKGYKEVKKDLIIKLPKYSLFELENGRKRMLASAGELQKGNELALPSKYVNFLYLASHYEKLKGSPEDNEQKQLFVEQHKHYLDEIIEQISEFSKRVILADANLDKVLSAYNKHRDKPIREQAENIIHLFTLTNLGAPAAFKYFDTTIDRKRYTSTKEVLDATLIHQSITGLYETRIDLSQLGGDGGEAAAKGGGGGVPWLMKKPLQLTVLVPLHEYQERLLQQTALPKEQKELLQKLFLKYDALWQHWENQVGHRRIKPHNIATGTLAPRPQKQYPINPKAKPSIQIVIDDLLKQGVLIQQNSTMNTPVYPVPKPDGKWRMVLDYREVNKTIPLIAAQNQHSAGILSSIYRGKYKTTLDLTNGFWAHPITPESYWLTAFTWQGKQYCWTRLPQGFLNSPALFTADVVDLLKEIPNVQAYVDDIYISHDDPQEHLEQLEKIFSILLNAGYVVSLKKSEIAQREVEFLGFNITKEGRGLTDTFKQKLLNITPPKDLKQLQSILGLLNFARNFIPNYSELVKPLYTIVANANGKFISWTEDNSNQLQHIISVLNQADNLEERNPETRLIIKVNSSPSAGYIRYYNEGSKRPIMYVNYIFSKAEAKFTQTEKLLTTMHKGLIKAMDLAMGQEILVYSPIVSMTKIQRTPLPERKALPVRWITWMTYLEDPRIQFHYDKSLPELQQIPNVTEDVIAKTKHPSEFAMVFYTDGSAIKHPDVNKSHSAGMGIAQVQFIPEYKIVHQWSIPLGDHTAQLAEIAAVEFACKKALKISGPVLIVTDSFYVAESANKELPYWKSNGFLNNKKKPLRHVSKWKSIAECLQLKPDIIIMHEKGHQQPMTTLHTEGNNLADKLATQGSYVVHAGKRTADGSEFEKRTADGSEFESPKKKAKVE

SEQ ID NO: 6701 - protein, 2173 aa, synthetic construct
MPAAKRVKLDGGDKKYSIGLDIGTNSVGWAVITDEYKVPSKKFKVLGNTDRHSIKKNLIGALLFDSGETAEATRLKRTARRRYTRRKNRICYLQEIFSNEMAKVDDSFFHRLEESFLVEEDKKHERHPIFGNIVDEVAYHEKYPTIYHLRKKLVDSTDKADLRLIYLALAHMIKFRGHFLIEGDLNPDNSDVDKLFIQLVQTYNQLFEENPINASGVDAKAILSARLSKSRRLENLIAQLPGEKKNGLFGNLIALSLGLTPNFKSNFDLAEDAKLQLSKDTYDDDLDNLLAQIGDQYADLFLAAKNLSDAILLSDILRVNTEITKAPLSASMIKRYDEHHQDLTLLKALVRQQLPEKYKEIFFDQSKNGYAGYIDGGASQEEFYKFIKPILEKMDGTEELLVKLNREDLLRKQRTFDNGSIPHQIHLGELHAILRRQEDFYPFLKDNREKIEKILTFRIPYYVGPLARGNSRFAWMTRKSEETITPWNFEEVVDKGASAQSFIERMTNFDKNLPNEKVLPKHSLLYEYFTVYNELTKVKYVTEGMRKPAFLSGEQKKAIVDLLFKTNRKVTVKQLKEDYFKKIECFDSVEISGVEDRFNASLGTYHDLLKIIKDKDFLDNEENEDILEDIVLTLTLFEDREMIEERLKTYAHLFDDKVMKQLKRRRYTGWGRLSRKLINGIRDKQSGKTILDFLKSDGFANRNFMQLIHDDSLTFKEDIQKAQVSGQGDSLHEHIANLAGSPAIKKGILQTVKVVDELVKVMGRHKPENIVIEMARENQTTQKGQKNSRERMKRIEEGIKELGSQILKEHPVENTQLQNEKLYLYYLQNGRDMYVDQELDINRLSDYDVDHIVPQSFLKDDSIDNKVLTRSDKARGKSDNVPSEEVVKKMKNYWRQLLNAKLITQRKFDNLTKAERGGLSELDKAGFIKRQLVETRQITKHVAQILDSRMNTKYDENDKLIREVKVITLKSKLVSDFRKDFQFYKVREINNYHHAHDAYLNAVVGTALIKKYPKLESEFVYGDYKVYDVRKMIAKSEQEIGKATAKYFFYSNIMNFFKTEITLANGEIRKRPLIETNGETGEIVWDKGRDFATVRKVLSMPQVNIVKKTEVQTGGFSKESILPKRNSDKLIARKKDWDPKKYGGFDSPTVAYSVLVVAKVEKGKSKKLKSVKELLGITIMERSSFEKNPIDFLEAKGYKEVKKDLIIKLPKYSLFELENGRKRMLASAGELQKGNELALPSKYVNFLYLASHYEKLKGSPEDNEQKQLFVEQHKHYLDEIIEQISEFSKRVILADANLDKVLSAYNKHRDKPIREQAENIIHLFTLTNLGAPAAFKYFDTTIDRKRYTSTKEVLDATLIHQSITGLYETRIDLSQLGGDGGEAAAKGGGGGMDPLQLLQPLEAEIKGTKLKAHWNSGATITCVPQAFLEEEVPIKNIWIKTIHGEKEQPVYYLTFKIQGRKVEAEVISSPYDYILVSPSDIPWLMKKPLQLTTLVPLQEYEERLLKQTMLTGSYKEKLQSLFLKYDALWQHWENQVGHRRIKPHHIATGTVNPRPQKQYPINPKAKASIQTVINDLLKQGVLIQQNSIMNTPVYPVPKPDGKWRMVLDYREVNKTIPLIAAQNQHSAGILSSIFRGKYKTTLDLSNGFWAHSITPESYWLTAFTWLGQQYCWTRLPQGFLNSPALFNADVVDLLKEVPNVQVYVDDIYISHDDPREHLEQLEKVFSLLLNAGYVVSLKKSEIAQHEVEFLGFNITKEGRGLTETFKQKLLNITPPRDLKQLQSILGKLNFARNFIPNFSELVKPLYNIIATAPGKYITWTTDNSQQLQNIISMLNSAENLEERNPEVRLIMKVNTSPSAGYIRFYNEFAKRPIMYLNYVYTKAEVKFTNTEKLLTTIHKGLIKALDLGMGQEILVYSPIVSMTKIQKTPLPERKALPIRWITWMSYLEDPRIQFHYDKTLPELQQVPTVTDDIIAKIKHPSEFSMVFYTDGSAIKHPNVNKSHNAGMGIAQVQFKPEFTVINTWSIPLGDHTAQLAEVAAVEFACKKALKIDGPVLIVTDSFYVAESVNKELPYWQSNGFFNNKKKPLKHVSKWKSIADCIQLKPDIIIIHEKGHQPTASTFHTEGNNLADKLATQGSYVVNAGKRTADGSEFEKRTADGSEFESPKKKAKVE

SEQ ID NO: 6702 - protein, 2091 aa, synthetic construct
MPAAKRVKLDGGDKKYSIGLDIGTNSVGWAVITDEYKVPSKKFKVLGNTDRHSIKKNLIGALLFDSGETAEATRLKRTARRRYTRRKNRICYLQEIFSNEMAKVDDSFFHRLEESFLVEEDKKHERHPIFGNIVDEVAYHEKYPTIYHLRKKLVDSTDKADLRLIYLALAHMIKFRGHFLIEGDLNPDNSDVDKLFIQLVQTYNQLFEENPINASGVDAKAILSARLSKSRRLENLIAQLPGEKKNGLFGNLIALSLGLTPNFKSNFDLAEDAKLQLSKDTYDDDLDNLLAQIGDQYADLFLAAKNLSDAILLSDILRVNTEITKAPLSASMIKRYDEHHQDLTLLKALVRQQLPEKYKEIFFDQSKNGYAGYIDGGASQEEFYKFIKPILEKMDGTEELLVKLNREDLLRKQRTFDNGSIPHQIHLGELHAILRRQEDFYPFLKDNREKIEKILTFRIPYYVGPLARGNSRFAWMTRKSEETITPWNFEEVVDKGASAQSFIERMTNFDKNLPNEKVLPKHSLLYEYFTVYNELTKVKYVTEGMRKPAFLSGEQKKAIVDLLFKTNRKVTVKQLKEDYFKKIECFDSVEISGVEDRFNASLGTYHDLLKIIKDKDFLDNEENEDILEDIVLTLTLFEDREMIEERLKTYAHLFDDKVMKQLKRRRYTGWGRLSRKLINGIRDKQSGKTILDFLKSDGFANRNFMQLIHDDSLTFKEDIQKAQVSGQGDSLHEHIANLAGSPAIKKGILQTVKVVDELVKVMGRHKPENIVIEMARENQTTQKGQKNSRERMKRIEEGIKELGSQILKEHPVENTQLQNEKLYLYYLQNGRDMYVDQELDINRLSDYDVDHIVPQSFLKDDSIDNKVLTRSDKARGKSDNVPSEEVVKKMKNYWRQLLNAKLITQRKFDNLTKAERGGLSELDKAGFIKRQLVETRQITKHVAQILDSRMNTKYDENDKLIREVKVITLKSKLVSDFRKDFQFYKVREINNYHHAHDAYLNAVVGTALIKKYPKLESEFVYGDYKVYDVRKMIAKSEQEIGKATAKYFFYSNIMNFFKTEITLANGEIRKRPLIETNGETGEIVWDKGRDFATVRKVLSMPQVNIVKKTEVQTGGFSKESILPKRNSDKLIARKKDWDPKKYGGFDSPTVAYSVLVVAKVEKGKSKKLKSVKELLGITIMERSSFEKNPIDFLEAKGYKEVKKDLIIKLPKYSLFELENGRKRMLASAGELQKGNELALPSKYVNFLYLASHYEKLKGSPEDNEQKQLFVEQHKHYLDEIIEQISEFSKRVILADANLDKVLSAYNKHRDKPIREQAENIIHLFTLTNLGAPAAFKYFDTTIDRKRYTSTKEVLDATLIHQSITGLYETRIDLSQLGGDGGEAAAKGGGGGVLNLEEEYRLHEKPVPSSIDPSWLQLFPTVWAERAGMGLANQVPPVVVELRSGASPVAVRQYPMSKEAREGIRPHIQRFLDLGVLVPCQSPWNTPLLPVKKPGTNDYRPVQDLREINKRVQDIHPTVPNPYNLLSSLPPSHTWYSVLDLKDAFFCLKLHPNSQPLFAFEWRDPEKGNTGQLTWTRLPQGFKNSPTLFDEALHRDLAPFRALNPQVVLLQYVDDLLVAAPTYRDCKEGTQKLLQELSKLGYRVSAKKAQLCQKEVTYLGYLLKEGKRWLTPARKATVMKIPPPTTPRQVREFLGTAGFCRLWIPGFASLAAPLYPLTKESIPFIWTEEHQKAFDRIKEALLSAPALALPDLTKPFTLYVDERAGVARGVLTQTLGPWRRPVAYLSKKLDPVASGWPTCLKAVAAVALLLKDADKLTLGQNVTVIASHSLESIVRQPPDRWMTNARMTHYQSLLLNERVSFAPPAVLNPATLLPVESEATPVHRCSEILAEETGTRRDLKDQPLPGVPAWYTDGSSFIAEGKRRAGAAIVDGKRTVWASSLPEGTSAQKAELVALTQALRLAEGKDINIYTDSRYAFATAHIHGAIYKQRGLLTSAGKDIKNKEEILALLEAIHLPKRVAIIHCPGHQKGNDPVATGNRRADEAAKQAALSTRVLAETTKPAGKRTADGSEFEKRTADGSEFESPKKKAKVE

SEQ ID NO: 6703 - protein, 2093 aa, synthetic construct
MPAAKRVKLDGGDKKYSIGLDIGTNSVGWAVITDEYKVPSKKFKVLGNTDRHSIKKNLIGALLFDSGETAEATRLKRTARRRYTRRKNRICYLQEIFSNEMAKVDDSFFHRLEESFLVEEDKKHERHPIFGNIVDEVAYHEKYPTIYHLRKKLVDSTDKADLRLIYLALAHMIKFRGHFLIEGDLNPDNSDVDKLFIQLVQTYNQLFEENPINASGVDAKAILSARLSKSRRLENLIAQLPGEKKNGLFGNLIALSLGLTPNFKSNFDLAEDAKLQLSKDTYDDDLDNLLAQIGDQYADLFLAAKNLSDAILLSDILRVNTEITKAPLSASMIKRYDEHHQDLTLLKALVRQQLPEKYKEIFFDQSKNGYAGYIDGGASQEEFYKFIKPILEKMDGTEELLVKLNREDLLRKQRTFDNGSIPHQIHLGELHAILRRQEDFYPFLKDNREKIEKILTFRIPYYVGPLARGNSRFAWMTRKSEETITPWNFEEVVDKGASAQSFIERMTNFDKNLPNEKVLPKHSLLYEYFTVYNELTKVKYVTEGMRKPAFLSGEQKKAIVDLLFKTNRKVTVKQLKEDYFKKIECFDSVEISGVEDRFNASLGTYHDLLKIIKDKDFLDNEENEDILEDIVLTLTLFEDREMIEERLKTYAHLFDDKVMKQLKRRRYTGWGRLSRKLINGIRDKQSGKTILDFLKSDGFANRNFMQLIHDDSLTFKEDIQKAQVSGQGDSLHEHIANLAGSPAIKKGILQTVKVVDELVKVMGRHKPENIVIEMARENQTTQKGQKNSRERMKRIEEGIKELGSQILKEHPVENTQLQNEKLYLYYLQNGRDMYVDQELDINRLSDYDVDHIVPQSFLKDDSIDNKVLTRSDKARGKSDNVPSEEVVKKMKNYWRQLLNAKLITQRKFDNLTKAERGGLSELDKAGFIKRQLVETRQITKHVAQILDSRMNTKYDENDKLIREVKVITLKSKLVSDFRKDFQFYKVREINNYHHAHDAYLNAVVGTALIKKYPKLESEFVYGDYKVYDVRKMIAKSEQEIGKATAKYFFYSNIMNFFKTEITLANGEIRKRPLIETNGETGEIVWDKGRDFATVRKVLSMPQVNIVKKTEVQTGGFSKESILPKRNSDKLIARKKDWDPKKYGGFDSPTVAYSVLVVAKVEKGKSKKLKSVKELLGITIMERSSFEKNPIDFLEAKGYKEVKKDLIIKLPKYSLFELENGRKRMLASAGELQKGNELALPSKYVNFLYLASHYEKLKGSPEDNEQKQLFVEQHKHYLDEIIEQISEFSKRVILADANLDKVLSAYNKHRDKPIREQAENIIHLFTLTNLGAPAAFKYFDTTIDRKRYTSTKEVLDATLIHQSITGLYETRIDLSQLGGDGGGGGPAPGGTAPLEEEYRLFLEAPIQNVTLLEQWKREIPKVWAEINPPGLASTQAPIHVQLLSTALPVRVRQYPITLEAKRSLRETIRKFRAAGILRPVHSPWNTPLLPVRKSGTSEYRMVQDLREVNKRVETIHPTVPNPYTLLSLLPPDRIWYSVLDLKDAFFCIPLAPESQLIFAFEWADAEEGESGQLTWTRLPQGFKNSPTLFNEALNRDLQGFRLDHPSVSLLQYVDDLLIAADTQAACLSATRDLLMTLAELGYRVSGKKAQLCQEEVTYLGFKIHKGSRSLSNSRTQAILQIPVPKTKRQVREFLGTIGYCRLWIPGFAELAQPLYAATRPGNDPLVWGEKEEEAFQSLKLALTQPPALALPSLDKPFQLFVEETSGAAKGVLTQALGPWKRPVAYLSKRLDPVAAGWPRCLRAIAAAALLTREASKLTFGQDIEITSSHNLESLLRSPPDKWLTNARITQYQVLLLDPPRVRFKQTAALNPATLLPETDDTLPIHHCLDTLDSLTSTRPDLTDQPLAQAEATLFTDGSSYIRDGKRYAGAAVVTLDSVIWAEPLPIGTSAQKAELIALTKALEWSKDKSVNIYTDSRYAFATLHVHGMIYRERGWLTAGGKAIKNAPEILALLTAVWLPKRVAVMHCKGHQKDDAPTSTGNRRADEVAREVAIRPLSTQATISAGKRTADGSEFEKRTADGSEFESPKKKAKVE

SEQ ID NO: 6704 - protein, 2082 aa, synthetic construct
MPAAKRVKLDGGDKKYSIGLDIGTNSVGWAVITDEYKVPSKKFKVLGNTDRHSIKKNLIGALLFDSGETAEATRLKRTARRRYTRRKNRICYLQEIFSNEMAKVDDSFFHRLEESFLVEEDKKHERHPIFGNIVDEVAYHEKYPTIYHLRKKLVDSTDKADLRLIYLALAHMIKFRGHFLIEGDLNPDNSDVDKLFIQLVQTYNQLFEENPINASGVDAKAILSARLSKSRRLENLIAQLPGEKKNGLFGNLIALSLGLTPNFKSNFDLAEDAKLQLSKDTYDDDLDNLLAQIGDQYADLFLAAKNLSDAILLSDILRVNTEITKAPLSASMIKRYDEHHQDLTLLKALVRQQLPEKYKEIFFDQSKNGYAGYIDGGASQEEFYKFIKPILEKMDGTEELLVKLNREDLLRKQRTFDNGSIPHQIHLGELHAILRRQEDFYPFLKDNREKIEKILTFRIPYYVGPLARGNSRFAWMTRKSEETITPWNFEEVVDKGASAQSFIERMTNFDKNLPNEKVLPKHSLLYEYFTVYNELTKVKYVTEGMRKPAFLSGEQKKAIVDLLFKTNRKVTVKQLKEDYFKKIECFDSVEISGVEDRFNASLGTYHDLLKIIKDKDFLDNEENEDILEDIVLTLTLFEDREMIEERLKTYAHLFDDKVMKQLKRRRYTGWGRLSRKLINGIRDKQSGKTILDFLKSDGFANRNFMQLIHDDSLTFKEDIQKAQVSGQGDSLHEHIANLAGSPAIKKGILQTVKVVDELVKVMGRHKPENIVIEMARENQTTQKGQKNSRERMKRIEEGIKELGSQILKEHPVENTQLQNEKLYLYYLQNGRDMYVDQELDINRLSDYDVDHIVPQSFLKDDSIDNKVLTRSDKARGKSDNVPSEEVVKKMKNYWRQLLNAKLITQRKFDNLTKAERGGLSELDKAGFIKRQLVETRQITKHVAQILDSRMNTKYDENDKLIREVKVITLKSKLVSDFRKDFQFYKVREINNYHHAHDAYLNAVVGTALIKKYPKLESEFVYGDYKVYDVRKMIAKSEQEIGKATAKYFFYSNIMNFFKTEITLANGEIRKRPLIETNGETGEIVWDKGRDFATVRKVLSMPQVNIVKKTEVQTGGFSKESILPKRNSDKLIARKKDWDPKKYGGFDSPTVAYSVLVVAKVEKGKSKKLKSVKELLGITIMERSSFEKNPIDFLEAKGYKEVKKDLIIKLPKYSLFELENGRKRMLASAGELQKGNELALPSKYVNFLYLASHYEKLKGSPEDNEQKQLFVEQHKHYLDEIIEQISEFSKRVILADANLDKVLSAYNKHRDKPIREQAENIIHLFTLTNLGAPAAFKYFDTTIDRKRYTSTKEVLDATLIHQSITGLYETRIDLSQLGGDGGGGGPAPGGVPWILKKPLELTIKLDLEEQQGTLLNNSILSKKGKEELKQLFEKYSALWQSWENQVGHRRIRPHKIATGTVKPTPQKQYHINPKAKPDIQIVINDLLKQGVLIQKESTMNTPVYPVPKPNGRWRMVLDYRAVNKVTPLIAVQNQHSYGILGSLFKGRYKTTIDLSNGFWAHPIVPEDYWITAFTWQGKQYCWTVLPQGFLNSPGLFTGDVVDLLQGIPNVEVYVDDVYISHDSEKEHLEYLDILFNRLKEAGYIISLKKSNIANSIVDFLGFQITNEGRGLTDTFKEKLENITAPTTLKQLQSILGLLNFARNFIPDFTELIAPLYALIPKSTKNYVPWQIEHSTTLETLITKLNGAEYLQGRKGDKTLIMKVNASYTTGYIRYYNEGEKKPISYVSIVFSKTELKFTELEKLLTTVHKGLLKALDLSMGQNIHVYSPIVSMQNIQKTPQTAKKALASRWLSWLSYLEDPRIRFFYDPQMPALKDLPAVDTGKDNKKHPSNFQHIFYTDGSAITSPTKEGHLNAGMGIVYFINKDGNLQKQQEWSISLGNHTAQFAEIAAFEFALKKCLPLGGNILVVTDSNYVAKAYNEELDVWASNGFVNNRKKPLKHISKWKSVADLKRLRPDVVVTHEPGHQKLDSSPHAYGNNLADQLATQASFKVHAGKRTADGSEFEKRTADGSEFESPKKKAKVE

SEQ ID NO: 6705 - protein, 2213 aa, synthetic construct
MPAAKRVKLDGGDKKYSIGLDIGTNSVGWAVITDEYKVPSKKFKVLGNTDRHSIKKNLIGALLFDSGETAEATRLKRTARRRYTRRKNRICYLQEIFSNEMAKVDDSFFHRLEESFLVEEDKKHERHPIFGNIVDEVAYHEKYPTIYHLRKKLVDSTDKADLRLIYLALAHMIKFRGHFLIEGDLNPDNSDVDKLFIQLVQTYNQLFEENPINASGVDAKAILSARLSKSRRLENLIAQLPGEKKNGLFGNLIALSLGLTPNFKSNFDLAEDAKLQLSKDTYDDDLDNLLAQIGDQYADLFLAAKNLSDAILLSDILRVNTEITKAPLSASMIKRYDEHHQDLTLLKALVRQQLPEKYKEIFFDQSKNGYAGYIDGGASQEEFYKFIKPILEKMDGTEELLVKLNREDLLRKQRTFDNGSIPHQIHLGELHAILRRQEDFYPFLKDNREKIEKILTFRIPYYVGPLARGNSRFAWMTRKSEETITPWNFEEVVDKGASAQSFIERMTNFDKNLPNEKVLPKHSLLYEYFTVYNELTKVKYVTEGMRKPAFLSGEQKKAIVDLLFKTNRKVTVKQLKEDYFKKIECFDSVEISGVEDRFNASLGTYHDLLKIIKDKDFLDNEENEDILEDIVLTLTLFEDREMIEERLKTYAHLFDDKVMKQLKRRRYTGWGRLSRKLINGIRDKQSGKTILDFLKSDGFANRNFMQLIHDDSLTFKEDIQKAQVSGQGDSLHEHIANLAGSPAIKKGILQTVKVVDELVKVMGRHKPENIVIEMARENQTTQKGQKNSRERMKRIEEGIKELGSQILKEHPVENTQLQNEKLYLYYLQNGRDMYVDQELDINRLSDYDVDHIVPQSFLKDDSIDNKVLTRSDKARGKSDNVPSEEVVKKMKNYWRQLLNAKLITQRKFDNLTKAERGGLSELDKAGFIKRQLVETRQITKHVAQILDSRMNTKYDENDKLIREVKVITLKSKLVSDFRKDFQFYKVREINNYHHAHDAYLNAVVGTALIKKYPKLESEFVYGDYKVYDVRKMIAKSEQEIGKATAKYFFYSNIMNFFKTEITLANGEIRKRPLIETNGETGEIVWDKGRDFATVRKVLSMPQVNIVKKTEVQTGGFSKESILPKRNSDKLIARKKDWDPKKYGGFDSPTVAYSVLVVAKVEKGKSKKLKSVKELLGITIMERSSFEKNPIDFLEAKGYKEVKKDLIIKLPKYSLFELENGRKRMLASAGELQKGNELALPSKYVNFLYLASHYEKLKGSPEDNEQKQLFVEQHKHYLDEIIEQISEFSKRVILADANLDKVLSAYNKHRDKPIREQAENIIHLFTLTNLGAPAAFKYFDTTIDRKRYTSTKEVLDATLIHQSITGLYETRIDLSQLGGDGGGGGPAPGGTLGDQGSRGSDPLPEPRVTLTVEGIPTEFLVNTGAEHSVLTKPMGKMGSKRTVVAGATGSKVYPWTTKRLLKIGQKQVTHSFLVIPECPAPLLGRDLLTKLKAQIQFSTEGPQVTWEDRPAMCLVLNLEEEYRLHEKPVPPSIDPSWLQLFPMVWAEKAGMGLANQVPPVVVELKSDASPVAVRQYPMSKEAREGIRPHIQRFLDLGILVPCQSPWNTPLLPVKKPGTNDYRPVQDLREVNKRVQDIHPTVPNPYNLLSSLPPSHTWYSVLDLKDAFFCLKLHPNSQPLFAFEWRDPEKGNTGQLTWTRLPQGFKNSPTLFNEALHRDLASFRALNPQVVMLQYVDDLLVAAPTYRDCKEGTRRLLQELSKLGYRVSAKKAQLCREEVTYLGYLLKGGKRWLTPARKATVMKIPTPTTPRQVREFLGTAGFCRLWIPGFASLAAPLYPLTRPKVPFTWTEAHQEAFGRIKEALLSAPALALPDLTKPFALYVDEKEGVARGVLTQTLGPWRRPVAYLSKKLDPVASGWPTCLKAIAAVALLLKDADKLTLGQNVLVIAPHNLESIVRQPPDRWMTNARMTHYQSLLLNERVSFAPPAILNPATLLPVESDDTPIHICSEILAEETGTRPDLRDQPLPGVPAWYTDGSSFIMDGRRQAGAAIVDNKRTVWASNLPEGTSAQKAELIALTQALRLAEGKSINIYTDSRYAFATAHVHGAIYKQRGWLTSAGKDIKNKEEILALLEAIHLPKRVAIIHCPGHQRGTDPVATGNRKADEAAKQAAQSTRILTETTKNAGKRTADGSEFEKRTADGSEFESPKKKAKVE

SEQ ID NO: 6706 - protein, 2091 aa, synthetic construct
MPAAKRVKLDGGDKKYSIGLDIGTNSVGWAVITDEYKVPSKKFKVLGNTDRHSIKKNLIGALLFDSGETAEATRLKRTARRRYTRRKNRICYLQEIFSNEMAKVDDSFFHRLEESFLVEEDKKHERHPIFGNIVDEVAYHEKYPTIYHLRKKLVDSTDKADLRLIYLALAHMIKFRGHFLIEGDLNPDNSDVDKLFIQLVQTYNQLFEENPINASGVDAKAILSARLSKSRRLENLIAQLPGEKKNGLFGNLIALSLGLTPNFKSNFDLAEDAKLQLSKDTYDDDLDNLLAQIGDQYADLFLAAKNLSDAILLSDILRVNTEITKAPLSASMIKRYDEHHQDLTLLKALVRQQLPEKYKEIFFDQSKNGYAGYIDGGASQEEFYKFIKPILEKMDGTEELLVKLNREDLLRKQRTFDNGSIPHQIHLGELHAILRRQEDFYPFLKDNREKIEKILTFRIPYYVGPLARGNSRFAWMTRKSEETITPWNFEEVVDKGASAQSFIERMTNFDKNLPNEKVLPKHSLLYEYFTVYNELTKVKYVTEGMRKPAFLSGEQKKAIVDLLFKTNRKVTVKQLKEDYFKKIECFDSVEISGVEDRFNASLGTYHDLLKIIKDKDFLDNEENEDILEDIVLTLTLFEDREMIEERLKTYAHLFDDKVMKQLKRRRYTGWGRLSRKLINGIRDKQSGKTILDFLKSDGFANRNFMQLIHDDSLTFKEDIQKAQVSGQGDSLHEHIANLAGSPAIKKGILQTVKVVDELVKVMGRHKPENIVIEMARENQTTQKGQKNSRERMKRIEEGIKELGSQILKEHPVENTQLQNEKLYLYYLQNGRDMYVDQELDINRLSDYDVDHIVPQSFLKDDSIDNKVLTRSDKARGKSDNVPSEEVVKKMKNYWRQLLNAKLITQRKFDNLTKAERGGLSELDKAGFIKRQLVETRQITKHVAQILDSRMNTKYDENDKLIREVKVITLKSKLVSDFRKDFQFYKVREINNYHHAHDAYLNAVVGTALIKKYPKLESEFVYGDYKVYDVRKMIAKSEQEIGKATAKYFFYSNIMNFFKTEITLANGEIRKRPLIETNGETGEIVWDKGRDFATVRKVLSMPQVNIVKKTEVQTGGFSKESILPKRNSDKLIARKKDWDPKKYGGFDSPTVAYSVLVVAKVEKGKSKKLKSVKELLGITIMERSSFEKNPIDFLEAKGYKEVKKDLIIKLPKYSLFELENGRKRMLASAGELQKGNELALPSKYVNFLYLASHYEKLKGSPEDNEQKQLFVEQHKHYLDEIIEQISEFSKRVILADANLDKVLSAYNKHRDKPIREQAENIIHLFTLTNLGAPAAFKYFDTTIDRKRYTSTKEVLDATLIHQSITGLYETRIDLSQLGGDGGGGGPAPGGTLNLEDEYRLYETSAEPEVSPGSTWLSDFPQAWAETGGMGLAVRQAPLIIPLKATSTPVSIKQYPMSQEAKLGIKPHIQRLLDQGILVPCQSPWNTPLLPVKKPGTNDYRPVQDLREVNKRVEDIHPTVPNPYNLLSGLPPSHRWYTVLDLKDAFFCLRLHPTSQPLFAFEWRDPGMGISGQLTWTRLPQGFKNSPTLFNEALHRDLADFRIQHPDLILLQYVDDILLAATSELDCQQGTRALLLTLGNLGYRASAKKAQLCQKQVKYLGYLLKEGQRWLTEARKETVMGQPTPKTPRQLREFLGKAGFCRLFIPGFAEMAAPLYPLTKPGTLFNWGPDQQKAYQEIKQALLTAPALGLPDLTKPFELFVDEKQGYAKGVLTQKLGPWRRPVAYLSKKLDPVAAGWPPCLRMVAAIAVLRKDAGKLTMGQPLVILAPHAVEALVKQPPDRWLSNARMTHYQAMLLDTDRVQFGPVVALNPATLLPLPEEGAPHDCLEILAETHGTRPDLTDQPIPDADHTWYTDGSSFLQEGQRKAGAAVTTETEVIWARALPAGTSAQRAELIALTQALKMAEGKRLNVYTDSRYAFATAHIHGEIYRRRGWLTSEGREIKNKSEILALLKALFLPKRLSIIHCLGHQKGDSAEARGNRLADQAAREAAIKTPPDTSTLLAGKRTADGSEFEKRTADGSEFESPKKKAKVE

SEQ ID NO: 6707 - protein, 2091 aa, synthetic construct
MPAAKRVKLDGGDKKYSIGLDIGTNSVGWAVITDEYKVPSKKFKVLGNTDRHSIKKNLIGALLFDSGETAEATRLKRTARRRYTRRKNRICYLQEIFSNEMAKVDDSFFHRLEESFLVEEDKKHERHPIFGNIVDEVAYHEKYPTIYHLRKKLVDSTDKADLRLIYLALAHMIKFRGHFLIEGDLNPDNSDVDKLFIQLVQTYNQLFEENPINASGVDAKAILSARLSKSRRLENLIAQLPGEKKNGLFGNLIALSLGLTPNFKSNFDLAEDAKLQLSKDTYDDDLDNLLAQIGDQYADLFLAAKNLSDAILLSDILRVNTEITKAPLSASMIKRYDEHHQDLTLLKALVRQQLPEKYKEIFFDQSKNGYAGYIDGGASQEEFYKFIKPILEKMDGTEELLVKLNREDLLRKQRTFDNGSIPHQIHLGELHAILRRQEDFYPFLKDNREKIEKILTFRIPYYVGPLARGNSRFAWMTRKSEETITPWNFEEVVDKGASAQSFIERMTNFDKNLPNEKVLPKHSLLYEYFTVYNELTKVKYVTEGMRKPAFLSGEQKKAIVDLLFKTNRKVTVKQLKEDYFKKIECFDSVEISGVEDRFNASLGTYHDLLKIIKDKDFLDNEENEDILEDIVLTLTLFEDREMIEERLKTYAHLFDDKVMKQLKRRRYTGWGRLSRKLINGIRDKQSGKTILDFLKSDGFANRNFMQLIHDDSLTFKEDIQKAQVSGQGDSLHEHIANLAGSPAIKKGILQTVKVVDELVKVMGRHKPENIVIEMARENQTTQKGQKNSRERMKRIEEGIKELGSQILKEHPVENTQLQNEKLYLYYLQNGRDMYVDQELDINRLSDYDVDHIVPQSFLKDDSIDNKVLTRSDKARGKSDNVPSEEVVKKMKNYWRQLLNAKLITQRKFDNLTKAERGGLSELDKAGFIKRQLVETRQITKHVAQILDSRMNTKYDENDKLIREVKVITLKSKLVSDFRKDFQFYKVREINNYHHAHDAYLNAVVGTALIKKYPKLESEFVYGDYKVYDVRKMIAKSEQEIGKATAKYFFYSNIMNFFKTEITLANGEIRKRPLIETNGETGEIVWDKGRDFATVRKVLSMPQVNIVKKTEVQTGGFSKESILPKRNSDKLIARKKDWDPKKYGGFDSPTVAYSVLVVAKVEKGKSKKLKSVKELLGITIMERSSFEKNPIDFLEAKGYKEVKKDLIIKLPKYSLFELENGRKRMLASAGELQKGNELALPSKYVNFLYLASHYEKLKGSPEDNEQKQLFVEQHKHYLDEIIEQISEFSKRVILADANLDKVLSAYNKHRDKPIREQAENIIHLFTLTNLGAPAAFKYFDTTIDRKRYTSTKEVLDATLIHQSITGLYETRIDLSQLGGDGGGGGPAPGGTLGIEDEYRLHETSTEPDVSLGSTWLSDFPQAWAETGGMGLAVRQAPLIIPLKATSTPVSIQQYPMSHEARLGIKPHIQRLLDQGILVPCQSPWNTPLLPVKKPGTNDYRPVQDLREVNKRVEDIHPTVPNPYNLLSGLPPSHQWYTVLDLKDAFFCLRLHPTSQPLFAFEWRDPGMGISGQLTWTRLPQGFKNSPTLFNEALHRDLADFRIQHPDLILLQYVDDILLAATSELDCQQGTRALLQTLGDLGYRASAKKAQICQKQVKYLGYLLREGQRWLTEARKETVMGQPVPKTPRQLREFLGTAGFCRLWIPGFAEMAAPLYPLTKPGTLFSWGPDQQKAYQEIKQALLTAPALGLPDLTKPFELFVDEKQGYAKGVLTQKLGPWRRPVAYLSKKLDPVAAGWPPCLRMVAAIAVLTKDAGKLTMGQPLVILAPHAVEALVKQPPDRWLSNARMTHYQAMLLDTDRVQFGPVVALNPATLLPLPEEGAPHDCLEILAETHGTRPDLTDQPIPDADHTWYTDGSSFLQEGQRKAGAAVTTETEVIWAGALPAGTSAQRAELIALTQALKMAEGKRLNVYTDSRYAFATAHIHGEIYRRRGWLTSEGREIKNKSEILALLKALFLPKRLSIIHCLGHQKGDSAEARGNRLADQAAREAAIKTPPDTSTLLAGKRTADGSEFEKRTADGSEFESPKKKAKVE

SEQ ID NO: 6708 - protein, 2091 aa, synthetic construct
MPAAKRVKLDGGDKKYSIGLDIGTNSVGWAVITDEYKVPSKKFKVLGNTDRHSIKKNLIGALLFDSGETAEATRLKRTARRRYTRRKNRICYLQEIFSNEMAKVDDSFFHRLEESFLVEEDKKHERHPIFGNIVDEVAYHEKYPTIYHLRKKLVDSTDKADLRLIYLALAHMIKFRGHFLIEGDLNPDNSDVDKLFIQLVQTYNQLFEENPINASGVDAKAILSARLSKSRRLENLIAQLPGEKKNGLFGNLIALSLGLTPNFKSNFDLAEDAKLQLSKDTYDDDLDNLLAQIGDQYADLFLAAKNLSDAILLSDILRVNTEITKAPLSASMIKRYDEHHQDLTLLKALVRQQLPEKYKEIFFDQSKNGYAGYIDGGASQEEFYKFIKPILEKMDGTEELLVKLNREDLLRKQRTFDNGSIPHQIHLGELHAILRRQEDFYPFLKDNREKIEKILTFRIPYYVGPLARGNSRFAWMTRKSEETITPWNFEEVVDKGASAQSFIERMTNFDKNLPNEKVLPKHSLLYEYFTVYNELTKVKYVTEGMRKPAFLSGEQKKAIVDLLFKTNRKVTVKQLKEDYFKKIECFDSVEISGVEDRFNASLGTYHDLLKIIKDKDFLDNEENEDILEDIVLTLTLFEDREMIEERLKTYAHLFDDKVMKQLKRRRYTGWGRLSRKLINGIRDKQSGKTILDFLKSDGFANRNFMQLIHDDSLTFKEDIQKAQVSGQGDSLHEHIANLAGSPAIKKGILQTVKVVDELVKVMGRHKPENIVIEMARENQTTQKGQKNSRERMKRIEEGIKELGSQILKEHPVENTQLQNEKLYLYYLQNGRDMYVDQELDINRLSDYDVDHIVPQSFLKDDSIDNKVLTRSDKARGKSDNVPSEEVVKKMKNYWRQLLNAKLITQRKFDNLTKAERGGLSELDKAGFIKRQLVETRQITKHVAQILDSRMNTKYDENDKLIREVKVITLKSKLVSDFRKDFQFYKVREINNYHHAHDAYLNAVVGTALIKKYPKLESEFVYGDYKVYDVRKMIAKSEQEIGKATAKYFFYSNIMNFFKTEITLANGEIRKRPLIETNGETGEIVWDKGRDFATVRKVLSMPQVNIVKKTEVQTGGFSKESILPKRNSDKLIARKKDWDPKKYGGFDSPTVAYSVLVVAKVEKGKSKKLKSVKELLGITIMERSSFEKNPIDFLEAKGYKEVKKDLIIKLPKYSLFELENGRKRMLASAGELQKGNELALPSKYVNFLYLASHYEKLKGSPEDNEQKQLFVEQHKHYLDEIIEQISEFSKRVILADANLDKVLSAYNKHRDKPIREQAENIIHLFTLTNLGAPAAFKYFDTTIDRKRYTSTKEVLDATLIHQSITGLYETRIDLSQLGGDGGGGGPAPGGTLNIEDEHRLHETSKEPDVSLGSTWLSDFPQAWAETGGMGLAVRQAPLIIPLKATSTPVSIKQYPMSQEARLGIKPHIQRLLDQGILVPCQSPWNTPLLPVKKPGTNDYRPVQDLREVNKRVEDIHPTVPNPYNLLSGLPPSHQWYTVLDLKDAFFCLRLHPTSQPLFAFEWRDPEMGISGQLTWTRLPQGFKNSPTLFNEALHRDLADFRIQHPDLILLQYVDDLLLAATSELDCQQGTRALLQTLGNLGYRASAKKAQICQKQVKYLGYLLKEGQRWLTEARKETVMGQPTPKTPRQLREFLGTAGFCRLWIPGFAEMAAPLYPLTKPGTLFNWGPDQQKAYQEIKQALLTAPALGLPDLTKPFELFVDEKQGYAKGVLTQKLGPWRRPVAYLSKKLDPVAAGWPPCLRMVAAIAVLTKDAGKLTMGQPLVILAPHAVEALVKQPPDRWLSNARMTHYQALLLDTDRVQFGPVVALNPATLLPLPEEGLQHNCLDILAEAHGTRPDLTDQPLPDADHTWYTDGSSLLQEGQRKAGAAVTTETEVIWAKALPAGTSAQRAELIALTQALKMAEGKKLNVYTDSRYAFATAHIHGEIYRRRGWLTSEGKEIKNKDEILALLKALFLPKRLSIIHCPGHQKGHSAEARGNRMADQAARKAAITETPDTSTLLAGKRTADGSEFEKRTADGSEFESPKKKAKVE

SEQ ID NO: 6709 - protein, 2091 aa, synthetic construct; identical to SEQ ID NO: 6708

SEQ ID NO: 6710 - protein, 2085 aa, synthetic construct
MPAAKRVKLDGGDKKYSIGLDIGTNSVGWAVITDEYKVPSKKFKVLGNTDRHSIKKNLIGALLFDSGETAEATRLKRTARRRYTRRKNRICYLQEIFSNEMAKVDDSFFHRLEESFLVEEDKKHERHPIFGNIVDEVAYHEKYPTIYHLRKKLVDSTDKADLRLIYLALAHMIKFRGHFLIEGDLNPDNSDVDKLFIQLVQTYNQLFEENPINASGVDAKAILSARLSKSRRLENLIAQLPGEKKNGLFGNLIALSLGLTPNFKSNFDLAEDAKLQLSKDTYDDDLDNLLAQIGDQYADLFLAAKNLSDAILLSDILRVNTEITKAPLSASMIKRYDEHHQDLTLLKALVRQQLPEKYKEIFFDQSKNGYAGYIDGGASQEEFYKFIKPILEKMDGTEELLVKLNREDLLRKQRTFDNGSIPHQIHLGELHAILRRQEDFYPFLKDNREKIEKILTFRIPYYVGPLARGNSRFAWMTRKSEETITPWNFEEVVDKGASAQSFIERMTNFDKNLPNEKVLPKHSLLYEYFTVYNELTKVKYVTEGMRKPAFLSGEQKKAIVDLLFKTNRKVTVKQLKEDYFKKIECFDSVEISGVEDRFNASLGTYHDLLKIIKDKDFLDNEENEDILEDIVLTLTLFEDREMIEERLKTYAHLFDDKVMKQLKRRRYTGWGRLSRKLINGIRDKQSGKTILDFLKSDGFANRNFMQLIHDDSLTFKEDIQKAQVSGQGDSLHEHIANLAGSPAIKKGILQTVKVVDELVKVMGRHKPENIVIEMARENQTTQKGQKNSRERMKRIEEGIKELGSQILKEHPVENTQLQNEKLYLYYLQNGRDMYVDQELDINRLSDYDVDHIVPQSFLKDDSIDNKVLTRSDKARGKSDNVPSEEVVKKMKNYWRQLLNAKLITQRKFDNLTKAERGGLSELDKAGFIKRQLVETRQITKHVAQILDSRMNTKYDENDKLIREVKVITLKSKLVSDFRKDFQFYKVREINNYHHAHDAYLNAVVGTALIKKYPKLESEFVYGDYKVYDVRKMIAKSEQEIGKATAKYFFYSNIMNFFKTEITLANGEIRKRPLIETNGETGEIVWDKGRDFATVRKVLSMPQVNIVKKTEVQTGGFSKESILPKRNSDKLIARKKDWDPKKYGGFDSPTVAYSVLVVAKVEKGKSKKLKSVKELLGITIMERSSFEKNPIDFLEAKGYKEVKKDLIIKLPKYSLFELENGRKRMLASAGELQKGNELALPSKYVNFLYLASHYEKLKGSPEDNEQKQLFVEQHKHYLDEIIEQISEFSKRVILADANLDKVLSAYNKHRDKPIREQAENIIHLFTLTNLGAPAAFKYFDTTIDRKRYTSTKEVLDATLIHQSITGLYETRIDLSQLGGDGGGGGPAPGGTLQLDDEYRLYSPLVKPDQNIQFWLEQFPQAWAETAGMGLAKQVPPQVIQLKASATPVSVRQYPLSKEAQEGIRPHVQRLIQQGILVPVQSPWNTPLLPVRKPGTNDYRPVQDLREVNKRVQDIHPTVPNPYNLLCALPPQRSWYTVLDLKDAFFCLRLHPTSQPLFAFEWRDPGTGRTGQLTWTRLPQGFKNSPTIFDEALHRDLANFRIQHPQVTLLQYVDDLLLAGATKQDCLEGTKALLLELSDLGYRASAKKAQICRREVTYLGYSLRDGQRWLTEARKKTVVQIPAPTTAKQVREFLGTAGFCRLWIPGFATLAAPLYPLTKEKGEFSWAPEHQKAFDAIKKALLSAPALALPDVTKPFTLYVDERKGVARGVLTQTLGPWRRPVAYLSKKLDPVASGWPVCLKAIAAVAILVKDADKLTLGQNITVIAPHALENIVRQPPDRWMTNARMTHYQSLLLTERVTFAPPAALNPATLLPEETDEPVTHDCHQLLIEETGVRKDLTDIPLTGEVLTWFTDGSSYVVEGKRMAGAAVVDGTRTIWASSLPEGTSAQKAELMALTQALRLAEGKSINIYTDSRYAFATAHVHGAIYKQRGLLTSAGREIKNKEEILSLLEALHLPKRLAIIHCPGHQKAKDPISRGNQMADRVAKQAAQGVNLLAGKRTADGSEFEKRTADGSEFESPKKKAKVE

SEQ ID NO: 6711 - protein, 2085 aa, synthetic construct; identical to SEQ ID NO: 6710

SEQ ID NO: 6712 - protein, 2171 aa, synthetic construct
MPAAKRVKLDGGDKKYSIGLDIGTNSVGWAVITDEYKVPSKKFKVLGNTDRHSIKKNLIGALLFDSGETAEATRLKRTARRRYTRRKNRICYLQEIFSNEMAKVDDSFFHRLEESFLVEEDKKHERHPIFGNIVDEVAYHEKYPTIYHLRKKLVDSTDKADLRLIYLALAHMIKFRGHFLIEGDLNPDNSDVDKLFIQLVQTYNQLFEENPINASGVDAKAILSARLSKSRRLENLIAQLPGEKKNGLFGNLIALSLGLTPNFKSNFDLAEDAKLQLSKDTYDDDLDNLLAQIGDQYADLFLAAKNLSDAILLSDILRVNTEITKAPLSASMIKRYDEHHQDLTLLKALVRQQLPEKYKEIFFDQSKNGYAGYIDGGASQEEFYKFIKPILEKMDGTEELLVKLNREDLLRKQRTFDNGSIPHQIHLGELHAILRRQEDFYPFLKDNREKIEKILTFRIPYYVGPLARGNSRFAWMTRKSEETITPWNFEEVVDKGASAQSFIERMTNFDKNLPNEKVLPKHSLLYEYFTVYNELTKVKYVTEGMRKPAFLSGEQKKAIVDLLFKTNRKVTVKQLKEDYFKKIECFDSVEISGVEDRFNASLGTYHDLLKIIKDKDFLDNEENEDILEDIVLTLTLFEDREMIEERLKTYAHLFDDKVMKQLKRRRYTGWGRLSRKLINGIRDKQSGKTILDFLKSDGFANRNFMQLIHDDSLTFKEDIQKAQVSGQGDSLHEHIANLAGSPAIKKGILQTVKVVDELVKVMGRHKPENIVIEMARENQTTQKGQKNSRERMKRIEEGIKELGSQILKEHPVENTQLQNEKLYLYYLQNGRDMYVDQELDINRLSDYDVDHIVPQSFLKDDSIDNKVLTRSDKARGKSDNVPSEEVVKKMKNYWRQLLNAKLITQRKFDNLTKAERGGLSELDKAGFIKRQLVETRQITKHVAQILDSRMNTKYDENDKLIREVKVITLKSKLVSDFRKDFQFYKVREINNYHHAHDAYLNAVVGTALIKKYPKLESEFVYGDYKVYDVRKMIAKSEQEIGKATAKYFFYSNIMNFFKTEITLANGEIRKRPLIETNGETGEIVWDKGRDFATVRKVLSMPQVNIVKKTEVQTGGFSKESILPKRNSDKLIARKKDWDPKKYGGFDSPTVAYSVLVVAKVEKGKSKKLKSVKELLGITIMERSSFEKNPIDFLEAKGYKEVKKDLIIKLPKYSLFELENGRKRMLASAGELQKGNELALPSKYVNFLYLASHYEKLKGSPEDNEQKQLFVEQHKHYLDEIIEQISEFSKRVILADANLDKVLSAYNKHRDKPIREQAENIIHLFTLTNLGAPAAFKYFDTTIDRKRYTSTKEVLDATLIHQSITGLYETRIDLSQLGGDGGGGGPAPGGMDPLQLLQPLEAEIKGTKLKAHWNSGATITCVPEAFLEDERPIQTMLIKTIHGEKQQDVYYLTFKVQGRKVEAEVLASPYDYILLNPSDVPWLMKKPLQLTVLVPLHEYQERLLQQTALPKEQKELLQKLFLKYDALWQHWENQVGHRRIKPHNIATGTLAPRPQKQYPINPKAKPSIQIVIDDLLKQGVLIQQNSTMNTPVYPVPKPDGKWRMVLDYREVNKTIPLIAAQNQHSAGILSSIYRGKYKTTLDLTNGFWAHPITPESYWLTAFTWQGKQYCWTRLPQGFLNSPALFNADVVDLLKEIPNVQAYVDDIYISHDDPQEHLEQLEKIFSILLNAGYVVSLKKSEIAQREVEFLGFNITKEGRGLTDTFKQKLLNITPPKDLKQLQSILGKLNFARNFIPNYSELVKPLYTIVAPANGKFISWTEDNSNQLQHIISVLNQADNLEERNPETRLIIKVNSSPSAGYIRYYNEGSKRPIMYVNYIFSKAEAKFTQTEKLLTTMHKGLIKAMDLAMGQEILVYSPIVSMTKIQRTPLPERKALPVRWITWMTYLEDPRIQFHYDKSLPELQQIPNVTEDVIAKTKHPSEFAMVFYTDGSAIKHPDVNKSHSAGMGIAQVQFIPEYKIVHQWSIPLGDHTAQLAEIAAVEFACKKALKISGPVLIVTDSFYVAESANKELPYWKSNGFLNNKKKPLRHVSKWKSIAECLQLKPDIIIMHEKGHQQPMTTLHTEGNNLADKLATQGSYVVHAGKRTADGSEFEKRTADGSEFESPKKKAKVE

SEQ ID NO: 6713 - protein, 2082 aa, synthetic construct
MPAAKRVKLDGGDKKYSIGLDIGTNSVGWAVITDEYKVPSKKFKVLGNTDRHSIKKNLIGALLFDSGETAEATRLKRTARRRYTRRKNRICYLQEIFSNEMAKVDDSFFHRLEESFLVEEDKKHERHPIFGNIVDEVAYHEKYPTIYHLRKKLVDSTDKADLRLIYLALAHMIKFRGHFLIEGDLNPDNSDVDKLFIQLVQTYNQLFEENPINASGVDAKAILSARLSKSRRLENLIAQLPGEKKNGLFGNLIALSLGLTPNFKSNFDLAEDAKLQLSKDTYDDDLDNLLAQIGDQYADLFLAAKNLSDAILLSDILRVNTEITKAPLSASMIKRYDEHHQDLTLLKALVRQQLPEKYKEIFFDQSKNGYAGYIDGGASQEEFYKFIKPILEKMDGTEELLVKLNREDLLRKQRTFDNGSIPHQIHLGELHAILRRQEDFYPFLKDNREKIEKILTFRIPYYVGPLARGNSRFAWMTRKSEETITPWNFEEVVDKGASAQSFIERMTNFDKNLPNEKVLPKHSLLYEYFTVYNELTKVKYVTEGMRKPAFLSGEQKKAIVDLLFKTNRKVTVKQLKEDYFKKIECFDSVEISGVEDRFNASLGTYHDLLKIIKDKDFLDNEENEDILEDIVLTLTLFEDREMIEERLKTYAHLFDDKVMKQLKRRRYTGWGRLSRKLINGIRDKQSGKTILDFLKSDGFANRNFMQLIHDDSLTFKEDIQKAQVSGQGDSLHEHIANLAGSPAIKKGILQTVKVVDELVKVMGRHKPENIVIEMARENQTTQKGQKNSRERMKRIEEGIKELGSQILKEHPVENTQLQNEKLYLYYLQNGRDMYVDQELDINRLSDYDVDHIVPQSFLKDDSIDNKVLTRSDKARGKSDNVPSEEVVKKMKNYWRQLLNAKLITQRKFDNLTKAERGGLSELDKAGFIKRQLVETRQITKHVAQILDSRMNTKYDENDKLIREVKVITLKSKLVSDFRKDFQFYKVREINNYHHAHDAYLNAVVGTALIKKYPKLESEFVYGDYKVYDVRKMIAKSEQEIGKATAKYFFYSNIMNFFKTEITLANGEIRKRPLIETNGETGEIVWDKGRDFATVRKVLSMPQVNIVKKTEVQTGGFSKESILPKRNSDKLIARKKDWDPKKYGGFDSPTVAYSVLVVAKVEKGKSKKLKSVKELLGITIMERSSFEKNPIDFLEAKGYKEVKKDLIIKLPKYSLFELENGRKRMLASAGELQKGNELALPSKYVNFLYLASHYEKLKGSPEDNEQKQLFVEQHKHYLDEIIEQISEFSKRVILADANLDKVLSAYNKHRDKPIREQAENIIHLFTLTNLGAPAAFKYFDTTIDRKRYTSTKEVLDATLIHQSITGLYETRIDLSQLGGDGGGGGPAPGGIPWLMKKPLQLTTLVPLQEYEERLLKQTMLTGSYKEKLQSLFLKYDALWQHWENQVGHRRIKPHHIATGTVNPRPQKQYPINPKAKASIQTVINDLLKQGVLIQQNSIMNTPVYPVPKPDGKWRMVLDYREVNKTIPLIAAQNQHSAGILSSIFRGKYKTTLDLSNGFWAHSITPESYWLTAFTWLGQQYCWTRLPQGFLNSPALFNADVVDLLKEVPNVQVYVDDIYISHDDPREHLEQLEKVFSLLLNAGYVVSLKKSEIAQHEVEFLGFNITKEGRGLTETFKQKLLNITPPRDLKQLQSILGLLNFARNFIPNFSELVKPLYNIIATAPGKYITWTTDNSQQLQNIISMLNSAENLEERNPEVRLIMKVNTSPSAGYIRFYNEFAKRPIMYLNYVYTKAEVKFTNTEKLLTTIHKGLIKALDLGMGQEILVYSPIVSMTKIQKTPLPERKALPIRWITWMSYLEDPRIQFHYDKTLPELQQVPTVTDDIIAKIKHPSEFSMVFYTDGSAIKHPNVNKSHNAGMGIAQVQFKPEFTVINTWSIPLGDHTAQLAEVAAVEFACKKALKIDGPVLIVTDSFYVAESVNKELPYWQSNGFFNNKKKPLKHVSKWKSIADCIQLKPDIIIIHEKGHQPTASTFHTEGNNLADKLATQGSYVVNAGKRTADGSEFEKRTADGSEFESPKKKAKVE

SEQ ID NO: 6714 - protein, 2171 aa, synthetic construct
MPAAKRVKLDGGDKKYSIGLDIGTNSVGWAVITDEYKVPSKKFKVLGNTDRHSIKKNLIGALLFDSGETAEATRLKRTARRRYTRRKNRICYLQEIFSNEMAKVDDSFFHRLEESFLVEEDKKHERHPIFGNIVDEVAYHEKYPTIYHLRKKLVDSTDKADLRLIYLALAHMIKFRGHFLIEGDLNPDNSDVDKLFIQLVQTYNQLFEENPINASGVDAKAILSARLSKSRRLENLIAQLPGEKKNGLFGNLIALSLGLTPNFKSNFDLAEDAKLQLSKDTYDDDLDNLLAQIGDQYADLFLAAKNLSDAILLSDILRVNTEITKAPLSASMIKRYDEHHQDLTLLKALVRQQLPEKYKEIFFDQSKNGYAGYIDGGASQEEFYKFIKPILEKMDGTEELLVKLNREDLLRKQRTFDNGSIPHQIHLGELHAILRRQEDFYPFLKDNREKIEKILTFRIPYYVGPLARGNSRFAWMTRKSEETITPWNFEEVVDKGASAQSFIERMTNFDKNLPNEKVLPKHSLLYEYFTVYNELTKVKYVTEGMRKPAFLSGEQKKAIVDLLFKTNRKVTVKQLKEDYFKKIECFDSVEISGVEDRFNASLGTYHDLLKIIKDKDFLDNEENEDILEDIVLTLTLFEDREMIEERLKTYAHLFDDKVMKQLKRRRYTGWGRLSRKLINGIRDKQSGKTILDFLKSDGFANRNFMQLIHDDSLTFKEDIQKAQVSGQGDSLHEHIANLAGSPAIKKGILQTVKVVDELVKVMGRHKPENIVIEMARENQTTQKGQKNSRERMKRIEEGIKELGSQILKEHPVENTQLQNEKLYLYYLQNGRDMYVDQELDINRLSDYDVDHIVPQSFLKDDSIDNKVLTRSDKARGKSDNVPSEEVVKKMKNYWRQLLNAKLITQRKFDNLTKAERGGLSELDKAGFIKRQLVETRQITKHVAQILDSRMNTKYDENDKLIREVKVITLKSKLVSDFRKDFQFYKVREINNYHHAHDAYLNAVVGTALIKKYPKLESEFVYGDYKVYDVRKMIAKSEQEIGKATAKYFFYSNIMNFFKTEITLANGEIRKRPLIETNGETGEIVWDKGRDFATVRKVLSMPQVNIVKKTEVQTGGFSKESILPKRNSDKLIARKKDWDPKKYGGFDSPTVAYSVLVVAKVEKGKSKKLKSVKELLGITIMERSSFEKNPIDFLEAKGYKEVKKDLIIKLPKYSLFELENGRKRMLASAGELQKGNELALPSKYVNFLYLASHYEKLKGSPEDNEQKQLFVEQHKHYLDEIIEQISEFSKRVILADANLDKVLSAYNKHRDKPIREQAENIIHLFTLTNLGAPAAFKYFDTTIDRKRYTSTKEVLDATLIHQSITGLYETRIDLSQLGGDGGGGGPAPGGMNPLQLLQPLPAEVKGTKLLAHWNSGATITCIPESFLEDEQPIKQTLIKTIHGEKQQNVYYLTFKVKGRKVEAEVIASPYEYILLSPTDVPWLTQQPLQLTILVPLQEYQDRILNKTALPEEQKQQLKALFTKYDNLWQHWENQVGHRKIRPHNIATGDYPPRPQKQYPINPKAKPSIQIVIDDLLKQGVLTPQNSTMNTPVYPVPKPDGRWRMVLDYREVNKTIPLTAAQNQHSAGILATIVRQKYKTTLDLANGFWAHPITPDSYWLTAFTWQGKQYCWTRLPQGFLNSPALFTADAVDLLKEVPNVQVYVDDIYLSHDNPHEHIQQLEKVFQILLQAGYVVSLKKSEIGQRTVEFLGFNITKEGRGLTDTFKTKLLNVTPPKDLKQLQSILGLLNFARNFIPNFAELVQTLYNLIASSKGKYIEWTEDNTKQLNKVIEALNTASNLEERLPDQRLVIKVNTSPSAGYVRYYNESGKKPIMYLNYVFSKAELKFSMLEKLLTTMHKALIKAMDLAMGQEILVYSPIVSMTKIQKTPLPERKALPIRWITWMTYLEDPRIQFHYDKTLPELKHIPDVYTSSIPPLKHPSQYEGVFCTDGSAIKSPDPTKSNNAGMGIVHAIYNPEYKILNQWSIPLGHHTAQMAEIAAVEFACKKALKVPGPVLVITDSFYVAESANKELPYWKSNGFVNNKKEPLKHISKWKSIAECLSIKPDITIQHEKGHQPINTSIHTEGNALADKLATQGSYVVNAGKRTADGSEFEKRTADGSEFESPKKKAKVE

SEQ ID NO: 6715 - protein, 2089 aa, synthetic construct
MPAAKRVKLDGGDKKYSIGLDIGTNSVGWAVITDEYKVPSKKFKVLGNTDRHSIKKNLIGALLFDSGETAEATRLKRTARRRYTRRKNRICYLQEIFSNEMAKVDDSFFHRLEESFLVEEDKKHERHPIFGNIVDEVAYHEKYPTIYHLRKKLVDSTDKADLRLIYLALAHMIKFRGHFLIEGDLNPDNSDVDKLFIQLVQTYNQLFEENPINASGVDAKAILSARLSKSRRLENLIAQLPGEKKNGLFGNLIALSLGLTPNFKSNFDLAEDAKLQLSKDTYDDDLDNLLAQIGDQYADLFLAAKNLSDAILLSDILRVNTEITKAPLSASMIKRYDEHHQDLTLLKALVRQQLPEKYKEIFFDQSKNGYAGYIDGGASQEEFYKFIKPILEKMDGTEELLVKLNREDLLRKQRTFDNGSIPHQIHLGELHAILRRQEDFYPFLKDNREKIEKILTFRIPYYVGPLARGNSRFAWMTRKSEETITPWNFEEVVDKGASAQSFIERMTNFDKNLPNEKVLPKHSLLYEYFTVYNELTKVKYVTEGMRKPAFLSGEQKKAIVDLLFKTNRKVTVKQLKEDYFKKIECFDSVEISGVEDRFNASLGTYHDLLKIIKDKDFLDNEENEDILEDIVLTLTLFEDREMIEERLKTYAHLFDDKVMKQLKRRRYTGWGRLSRKLINGIRDKQSGKTILDFLKSDGFANRNFMQLIHDDSLTFKEDIQKAQVSGQGDSLHEHIANLAGSPAIKKGILQTVKVVDELVKVMGRHKPENIVIEMARENQTTQKGQKNSRERMKRIEEGIKELGSQILKEHPVENTQLQNEKLYLYYLQNGRDMYVDQELDINRLSDYDVDHIVPQSFLKDDSIDNKVLTRSDKARGKSDNVPSEEVVKKMKNYWRQLLNAKLITQRKFDNLTKAERGGLSELDKAGFIKRQLVETRQITKHVAQILDSRMNTKYDENDKLIREVKVITLKSKLVSDFRKDFQFYKVREINNYHHAHDAYLNAVVGTALIKKYPKLESEFVYGDYKVYDVRKMIAKSEQEIGKATAKYFFYSNIMNFFKTEITLANGEIRKRPLIETNGETGEIVWDKGRDFATVRKVLSMPQVNIVKKTEVQTGGFSKESILPKRNSDKLIARKKDWDPKKYGGFDSPTVAYSVLVVAKVEKGKSKKLKSVKELLGITIMERSSFEKNPIDFLEAKGYKEVKKDLIIKLPKYSLFELENGRKRMLASAGELQKGNELALPSKYVNFLYLASHYEKLKGSPEDNEQKQLFVEQHKHYLDEIIEQISEFSKRVILADANLDKVLSAYNKHRDKPIREQAENIIHLFTLTNLGAPAAFKYFDTTIDRKRYTSTKEVLDATLIHQSITGLYETRIDLSQLGGDGGGGGPAPGGVLNLEEEYRLHEKPVPSSIDPSWLQLFPTVWAERAGMGLANQVPPVVVELRSGASPVAVRQYPMSKEAREGIRPHIQRFLDLGVLVPCQSPWNTPLLPVKKPGTNDYRPVQDLREINKRVQDIHPTVPNPYNLLSSLPPSHTWYSVLDLKDAFFCLKLHPNSQPLFAFEWRDPEKGNTGQLTWTRLPQGFKNSPTLFNEALHRDLAPFRALNPQVVLLQYVDDLLVAAPTYRDCKEGTQKLLQELSKLGYRVSAKKAQLCQKEVTYLGYLLKEGKRWLTPARKATVMKIPPPTTPRQVREFLGTAGFCRLWIPGFASLAAPLYPLTKPSIPFIWTEEHQKAFDRIKEALLSAPALALPDLTKPFTLYVDERAGVARGVLTQTLGPWRRPVAYLSKKLDPVASGWPTCLKAVAAVALLLKDADKLTLGQNVTVIASHSLESIVRQPPDRWMTNARMTHYQSLLLNERVSFAPPAVLNPATLLPVESEATPVHRCSEILAEETGTRRDLKDQPLPGVPAWYTDGSSFIAEGKRRAGAAIVDGKRTVWASSLPEGTSAQKAELVALTQALRLAEGKDINIYTDSRYAFATAHIHGAIYKQRGWLTSAGKDIKNKEEILALLEAIHLPKRVAIIHCPGHQKGNDPVATGNRRADEAAKQAALSTRVLAETTKPAGKRTADGSEFEKRTADGSEFESPKKKAKVE

SEQ ID NO: 6716 - protein, 2091 aa, synthetic construct
MPAAKRVKLDGGDKKYSIGLDIGTNSVGWAVITDEYKVPSKKFKVLGNTDRHSIKKNLIGALLFDSGETAEATRLKRTARRRYTRRKNRICYLQEIFSNEMAKVDDSFFHRLEESFLVEEDKKHERHPIFGNIVDEVAYHEKYPTIYHLRKKLVDSTDKADLRLIYLALAHMIKFRGHFLIEGDLNPDNSDVDKLFIQLVQTYNQLFEENPINASGVDAKAILSARLSKSRRLENLIAQLPGEKKNGLFGNLIALSLGLTPNFKSNFDLAEDAKLQLSKDTYDDDLDNLLAQIGDQYADLFLAAKNLSDAILLSDILRVNTEITKAPLSASMIKRYDEHHQDLTLLKALVRQQLPEKYKEIFFDQSKNGYAGYIDGGASQEEFYKFIKPILEKMDGTEELLVKLNREDLLRKQRTFDNGSIPHQIHLGELHAILRRQEDFYPFLKDNREKIEKILTFRIPYYVGPLARGNSRFAWMTRKSEETITPWNFEEVVDKGASAQSFIERMTNFDKNLPNEKVLPKHSLLYEYFTVYNELTKVKYVTEGMRKPAFLSGEQKKAIVDLLFKTNRKVTVKQLKEDYFKKIECFDSVEISGVEDRFNASLGTYHDLLKIIKDKDFLDNEENEDILEDIVLTLTLFEDREMIEERLKTYAHLFDDKVMKQLKRRRYTGWGRLSRKLINGIRDKQSGKTILDFLKSDGFANRNFMQLIHDDSLTFKEDIQKAQVSGQGDSLHEHIANLAGSPAIKKGILQTVKVVDELVKVMGRHKPENIVIEMARENQTTQKGQKNSRERMKRIEEGIKELGSQILKEHPVENTQLQNEKLYLYYLQNGRDMYVDQELDINRLSDYDVDHIVPQSFLKDDSIDNKVLTRSDKARGKSDNVPSEEVVKKMKNYWRQLLNAKLITQRKFDNLTKAERGGLSELDKAGFIKRQLVETRQITKHVAQILDSRMNTKYDENDKLIREVKVITLKSKLVSDFRKDFQFYKVREINNYHHAHDAYLNAVVGTALIKKYPKLESEFVYGDYKVYDVRKMIAKSEQEIGKATAKYFFYSNIMNFFKTEITLANGEIRKRPLIETNGETGEIVWDKGRDFATVRKVLSMPQVNIVKKTEVQTGGFSKESILPKRNSDKLIARKKDWDPKKYGGFDSPTVAYSVLVVAKVEKGKSKKLKSVKELLGITIMERSSFEKNPIDFLEAKGYKEVKKDLIIKLPKYSLFELENGRKRMLASAGELQKGNELALPSKYVNFLYLASHYEKLKGSPEDNEQKQLFVEQHKHYLDEIIEQISEFSKRVILADANLDKVLSAYNKHRDKPIREQAENIIHLFTLTNLGAPAAFKYFDTTIDRKRYTSTKEVLDATLIHQSITGLYETRIDLSQLGGDGGGGGPAPGGTLNIEDEYRLHETSKEPDVPLGSTWLSDFPQAWAETGGMGLAVRQAPLIIPLKATSTPVSIKQYPMSQEARLGIKPHIQRLLDQGILVPCQSPWNTPLLPVKKPGTNDYRPVQDLREVNKRVEDIHPTVPNPYNLLSGLPPSHQWYTVLDLKDAFFCLRLHPTSQPLFAFEWRDPEMGISGQLTWTRLPQGFKNSPTLFNEALHRDLADFRIQHPDLILLQYVDDLLLAATSEQDCQRGTRALLQTLGNLGYRASAKKAQICQKQVKYLGYLLKEGQRWLTEARKETVMGQPTPKTPRQLREFLGTAGFCRLWIPGFAEMAAPLYPLTKPGTLFNWGPDQQKAYQEIKQALLTAPALGLPDLTKPFELFVDEKQGYAKGVLTQKLGPWRRPVAYLSKKLDPVAAGWPPCLRMVAAIAVLTKDAGKLTMGQPLVILAPHAVEALVKQPPDRWLSNARMTHYQAMLLDTDRVQFGPVVALNPATLLPLPEKEAPHDCLEILAETHGTRPDLTDQPIPDADYTWYTDGSSFLQEGQRRAGAAVTTETEVIWARALPAGTSAQRAELIALTQALKMAEGKKLNVYTDSRYAFATAHVHGEIYRRRGWLTSEGREIKNKNEILALLKALFLPKRLSIIHCPGHQKGNSAEARGNRMADQAAREAAMKAVLETSTLLAGKRTADGSEFEKRTADGSEFESPKKKAKVE

SEQ ID NO: 6717 - protein, 2091 aa, synthetic construct
MPAAKRVKLDGGDKKYSIGLDIGTNSVGWAVITDEYKVPSKKFKVLGNTDRHSIKKNLIGALLFDSGETAEATRLKRTARRRYTRRKNRICYLQEIFSNEMAKVDDSFFHRLEESFLVEEDKKHERHPIFGNIVDEVAYHEKYPTIYHLRKKLVDSTDKADLRLIYLALAHMIKFRGHFLIEGDLNPDNSDVDKLFIQLVQTYNQLFEENPINASGVDAKAILSARLSKSRRLENLIAQLPGEKKNGLFGNLIALSLGLTPNFKSNFDLAEDAKLQLSKDTYDDDLDNLLAQIGDQYADLFLAAKNLSDAILLSDILRVNTEITKAPLSASMIKRYDEHHQDLTLLKALVRQQLPEKYKEIFFDQSKNGYAGYIDGGASQEEFYKFIKPILEKMDGTEELLVKLNREDLLRKQRTFDNGSIPHQIHLGELHAILRRQEDFYPFLKDNREKIEKILTFRIPYYVGPLARGNSRFAWMTRKSEETITPWNFEEVVDKGASAQSFIERMTNFDKNLPNEKVLPKHSLLYEYFTVYNELTKVKYVTEGMRKPAFLSGEQKKAIVDLLFKTNRKVTVKQLKEDYFKKIECFDSVEISGVEDRFNASLGTYHDLLKIIKDKDFLDNEENEDILEDIVLTLTLFEDREMIEERLKTYAHLFDDKVMKQLKRRRYTGWGRLSRKLINGIRDKQSGKTILDFLKSDGFANRNFMQLIHDDSLTFKEDIQKAQVSGQGDSLHEHIANLAGSPAIKKGILQTVKVVDELVKVMGRHKPENIVIEMARENQTTQKGQKNSRERMKRIEEGIKELGSQILKEHPVENTQLQNEKLYLYYLQNGRDMYVDQELDINRLSDYDVDHIVPQSFLKDDSIDNKVLTRSDKARGKSDNVPSEEVVKKMKNYWRQLLNAKLITQRKFDNLTKAERGGLSELDKAGFIKRQLVETRQITKHVAQILDSRMNTKYDENDKLIREVKVITLKSKLVSDFRKDFQFYKVREINNYHHAHDAYLNAVVGTALIKKYPKLESEFVYGDYKVYDVRKMIAKSEQEIGKATAKYFFYSNIMNFFKTEITLANGEIRKRPLIETNGETGEIVWDKGRDFATVRKVLSMPQVNIVKKTEVQTGGFSKESILPKRNSDKLIARKKDWDPKKYGGFDSPTVAYSVLVVAKVEKGKSKKLKSVKELLGITIMERSSFEKNPIDFLEAKGYKEVKKDLIIKLPKYSLFELENGRKRMLASAGELQKGNELALPSKYVNFLYLASHYEKLKGSPEDNEQKQLFVEQHKHYLDEIIEQISEFSKRVILADANLDKVLSAYNKHRDKPIREQAENIIHLFTLTNLGAPAAFKYFDTTIDRKRYTSTKEVLDATLIHQSITGLYETRIDLSQLGGDGGGGGPAPGGTLNIEDEYRLHETSKEPDVPLGSTWLSDFPQAWAETGGMGLAVRQAPLIIPLKATSTPVSIKQYPMSQEARLGIKPHIQRLLDQGILVPCQSPWNTPLLPVKKPGTNDYRPVQDLREVNKRVEDIHPTVPNPYNLLSGLPPSHQWYTVLDLKDAFFCLRLHPTSQPLFAFEWRDPEMGISGQLTWTRLPQGFKNSPTLFNEALHRDLADFRIQHPDLILLQYVDDLLLAATSEQDCQRGTRALLQTLGNLGYRASAKKAQICQKQVKYLGYLLKEGQRWLTEARKETVMGQPTPKTPRQLREFLGKAGFCRLFIPGFAEMAAPLYPLTKPGTLFNWGPDQQKAYQEIKQALLTAPALGLPDLTKPFELFVDEKQGYAKGVLTQKLGPWRRPVAYLSKKLDPVAAGWPPCLRMVAAIAVLTKDAGKLTMGQPLVILAPHAVEALVKQPPDRWLSNARMTHYQAMLLDTDRVQFGPVVALNPATLLPLPEKEAPHDCLEILAETHGTRPDLTDQPIPDADYTWYTDGSSFLQEGQRRAGAAVTTETEVIWARALPAGTSAQRAELIALTQALKMAEGKKLNVYTDSRYAFATAHVHGEIYRRRGWLTSEGREIKNKNEILALLKALFLPKRLSIIHCPGHQKGNSAEARGNRMADQAAREAAMKAVLETSTLLAGKRTADGSEFEKRTADGSEFESPKKKAKVE

SEQ ID NO: 6718 - protein, 2122 aa, synthetic construct
MPAAKRVKLDGGDKKYSIGLDIGTNSVGWAVITDEYKVPSKKFKVLGNTDRHSIKKNLIGALLFDSGETAEATRLKRTARRRYTRRKNRICYLQEIFSNEMAKVDDSFFHRLEESFLVEEDKKHERHPIFGNIVDEVAYHEKYPTIYHLRKKLVDSTDKADLRLIYLALAHMIKFRGHFLIEGDLNPDNSDVDKLFIQLVQTYNQLFEENPINASGVDAKAILSARLSKSRRLENLIAQLPGEKKNGLFGNLIALSLGLTPNFKSNFDLAEDAKLQLSKDTYDDDLDNLLAQIGDQYADLFLAAKNLSDAILLSDILRVNTEITKAPLSASMIKRYDEHHQDLTLLKALVRQQLPEKYKEIFFDQSKNGYAGYIDGGASQEEFYKFIKPILEKMDGTEELLVKLNREDLLRKQRTFDNGSIPHQIHLGELHAILRRQEDFYPFLKDNREKIEKILTFRIPYYVGPLARGNSRFAWMTRKSEETITPWNFEEVVDKGASAQSFIERMTNFDKNLPNEKVLPKHSLLYEYFTVYNELTKVKYVTEGMRKPAFLSGEQKKAIVDLLFKTNRKVTVKQLKEDYFKKIECFDSVEISGVEDRFNASLGTYHDLLKIIKDKDFLDNEENEDILEDIVLTLTLFEDREMIEERLKTYAHLFDDKVMKQLKRRRYTGWGRLSRKLINGIRDKQSGKTILDFLKSDGFANRNFMQLIHDDSLTFKEDIQKAQVSGQGDSLHEHIANLAGSPAIKKGILQTVKVVDELVKVMGRHKPENIVIEMARENQTTQKGQKNSRERMKRIEEGIKELGSQILKEHPVENTQLQNEKLYLYYLQNGRDMYVDQELDINRLSDYDVDHIVPQSFLKDDSIDNKVLTRSDKARGKSDNVPSEEVVKKMKNYWRQLLNAKLITQRKFDNLTKAERGGLSELDKAGFIKRQLVETRQITKHVAQILDSRMNTKYDENDKLIREVKVITLKSKLVSDFRKDFQFYKVREINNYHHAHDAYLNAVVGTALIKKYPKLESEFVYGDYKVYDVRKMIAKSEQEIGKATAKYFFYSNIMNFFKTEITLANGEIRKRPLIETNGETGEIVWDKGRDFATVRKVLSMPQVNIVKKTEVQTGGFSKESILPKRNSDKLIARKKDWDPKKYGGFDSPTVAYSVLVVAKVEKGKSKKLKSVKELLGITIMERSSFEKNPIDFLEAKGYKEVKKDLIIKLPKYSLFELENGRKRMLASAGELQKGNELALPSKYVNFLYLASHYEKLKGSPEDNEQKQLFVEQHKHYLDEIIEQISEFSKRVILADANLDKVLSAYNKHRDKPIREQAENIIHLFTLTNLGAPAAFKYFDTTIDRKRYTSTKEVLDATLIHQSITGLYETRIDLSQLGGDGGPAPGGGGGLLGRDLLTKLKAQIQFSTEGPQVTWEDRPAMCLVLNLEEEYRLHEKPVPPSIDPSWLQLFPMVWAEKAGMGLANQVPPVVVELKSDASPVAVRQYPMSKEAREGIRPHIQRFLDLGILVPCQSPWNTPLLPVKKPGTNDYRPVQDLREVNKRVQDIHPTVPNPYNLLSSLPPSHTWYSVLDLKDAFFCLKLHPNSQPLFAFEWRDPEKGNTGQLTWTRLPQGFKNSPTLFNEALHRDLASFRALNPQVVMLQYVDDLLVAAPTYRDCKEGTRRLLQELSKLGYRVSAKKAQLCREEVTYLGYLLKGGKRWLTPARKATVMKIPTPTTPRQVREFLGTAGFCRLWIPGFASLAAPLYPLTRPKVPFTWTEAHQEAFGRIKEALLSAPALALPDLTKPFALYVDEKEGVARGVLTQTLGPWRRPVAYLSKKLDPVASGWPTCLKAIAAVALLLKDADKLTLGQNVLVIAPHNLESIVRQPPDRWMTNARMTHYQSLLLNERVSFAPPAILNPATLLPVESDDTPIHICSEILAEETGTRPDLRDQPLPGVPAWYTDGSSFIMDGRRQAGAAIVDNKRTVWASNLPEGTSAQKAELIALTQALRLAEGKSINIYTDSRYAFATAHVHGAIYKQRGWLTSAGKDIKNKEEILALLEAIHLPKRVAIIHCPGHQRGTDPVATGNRKADEAAKQAAQSTRILTETTKNAGKRTADGSEFEKRTADGSEFESPKKKAKVE

SEQ ID NO: 6719 - protein, 2122 aa, synthetic construct
MPAAKRVKLDGGDKKYSIGLDIGTNSVGWAVITDEYKVPSKKFKVLGNTDRHSIKKNLIGALLFDSGETAEATRLKRTARRRYTRRKNRICYLQEIFSNEMAKVDDSFFHRLEESFLVEEDKKHERHPIFGNIVDEVAYHEKYPTIYHLRKKLVDSTDKADLRLIYLALAHMIKFRGHFLIEGDLNPDNSDVDKLFIQLVQTYNQLFEENPINASGVDAKAILSARLSKSRRLENLIAQLPGEKKNGLFGNLIALSLGLTPNFKSNFDLAEDAKLQLSKDTYDDDLDNLLAQIGDQYADLFLAAKNLSDAILLSDILRVNTEITKAPLSASMIKRYDEHHQDLTLLKALVRQQLPEKYKEIFFDQSKNGYAGYIDGGASQEEFYKFIKPILEKMDGTEELLVKLNREDLLRKQRTFDNGSIPHQIHLGELHAILRRQEDFYPFLKDNREKIEKILTFRIPYYVGPLARGNSRFAWMTRKSEETITPWNFEEVVDKGASAQSFIERMTNFDKNLPNEKVLPKHSLLYEYFTVYNELTKVKYVTEGMRKPAFLSGEQKKAIVDLLFKTNRKVTVKQLKEDYFKKIECFDSVEISGVEDRFNASLGTYHDLLKIIKDKDFLDNEENEDILEDIVLTLTLFEDREMIEERLKTYAHLFDDKVMKQLKRRRYTGWGRLSRKLINGIRDKQSGKTILDFLKSDGFANRNFMQLIHDDSLTFKEDIQKAQVSGQGDSLHEHIANLAGSPAIKKGILQTVKVVDELVKVMGRHKPENIVIEMARENQTTQKGQKNSRERMKRIEEGIKELGSQILKEHPVENTQLQNEKLYLYYLQNGRDMYVDQELDINRLSDYDVDHIVPQSFLKDDSIDNKVLTRSDKARGKSDNVPSEEVVKKMKNYWRQLLNAKLITQRKFDNLTKAERGGLSELDKAGFIKRQLVETRQITKHVAQILDSRMNTKYDENDKLIREVKVITLKSKLVSDFRKDFQFYKVREINNYHHAHDAYLNAVVGTALIKKYPKLESEFVYGDYKVYDVRKMIAKSEQEIGKATAKYFFYSNIMNFFKTEITLANGEIRKRPLIETNGETGEIVWDKGRDFATVRKVLSMPQVNIVKKTEVQTGGFSKESILPKRNSDKLIARKKDWDPKKYGGFDSPTVAYSVLVVAKVEKGKSKKLKSVKELLGITIMERSSFEKNPIDFLEAKGYKEVKKDLIIKLPKYSLFELENGRKRMLASAGELQKGNELALPSKYVNFLYLASHYEKLKGSPEDNEQKQLFVEQHKHYLDEIIEQISEFSKRVILADANLDKVLSAYNKHRDKPIREQAENIIHLFTLTNLGAPAAFKYFDTTIDRKRYTSTKEVLDATLIHQSITGLYETRIDLSQLGGDGGPAPGGGGGLLGRDLLTKLKAQIQFSTEGPQVTWEDRPAMCLVLNLEEEYRLHEKPVPPSIDPSWLQLFPMVWAEKAGMGLANQVPPVVVELKSDASPVAVRQYPMSKEAREGIRPHIQRFLDLGILVPCQSPWNTPLLPVKKPGTNDYRPVQDLREVNKRVQDIHPTVPNPYNLLSSLPPSHTWYSVLDLKDAFFCLKLHPNSQPLFAFEWRDPEKGNTGQLTWTRLPQGFKNSPTLFNEALHRDLASFRALNPQVVMLQYVDDLLVAAPTYRDCKEGTRRLLQELSKLGYRVSAKKAQLCREEVTYLGYLLKGGKRWLTPARKATVMKIPTPTTPRQVREFLGKAGFCRLFIPGFASLAAPLYPLTRPKVPFTWTEAHQEAFGRIKEALLSAPALALPDLTKPFALYVDEKEGVARGVLTQTLGPWRRPVAYLSKKLDPVASGWPTCLKAIAAVALLLKDADKLTLGQNVLVIAPHNLESIVRQPPDRWMTNARMTHYQSLLLNERVSFAPPAILNPATLLPVESDDTPIHICSEILAEETGTRPDLRDQPLPGVPAWYTDGSSFIMDGRRQAGAAIVDNKRTVWASNLPEGTSAQKAELIALTQALRLAEGKSINIYTDSRYAFATAHVHGAIYKQRGWLTSAGKDIKNKEEILALLEAIHLPKRVAIIHCPGHQRGTDPVATGNRKADEAAKQAAQSTRILTETTKNAGKRTADGSEFEKRTADGSEFESPKKKAKVE

SEQ ID NO: 6720 - protein, 2213 aa, synthetic construct
MPAAKRVKLDGGDKKYSIGLDIGTNSVGWAVITDEYKVPSKKFKVLGNTDRHSIKKNLIGALLFDSGETAEATRLKRTARRRYTRRKNRICYLQEIFSNEMAKVDDSFFHRLEESFLVEEDKKHERHPIFGNIVDEVAYHEKYPTIYHLRKKLVDSTDKADLRLIYLALAHMIKFRGHFLIEGDLNPDNSDVDKLFIQLVQTYNQLFEENPINASGVDAKAILSARLSKSRRLENLIAQLPGEKKNGLFGNLIALSLGLTPNFKSNFDLAEDAKLQLSKDTYDDDLDNLLAQIGDQYADLFLAAKNLSDAILLSDILRVNTEITKAPLSASMIKRYDEHHQDLTLLKALVRQQLPEKYKEIFFDQSKNGYAGYIDGGASQEEFYKFIKPILEKMDGTEELLVKLNREDLLRKQRTFDNGSIPHQIHLGELHAILRRQEDFYPFLKDNREKIEKILTFRIPYYVGPLARGNSRFAWMTRKSEETITPWNFEEVVDKGASAQSFIERMTNFDKNLPNEKVLPKHSLLYEYFTVYNELTKVKYVTEGMRKPAFLSGEQKKAIVDLLFKTNRKVTVKQLKEDYFKKIECFDSVEISGVEDRFNASLGTYHDLLKIIKDKDFLDNEENEDILEDIVLTLTLFEDREMIEERLKTYAHLFDDKVMKQLKRRRYTGWGRLSRKLINGIRDKQSGKTILDFLKSDGFANRNFMQLIHDDSLTFKEDIQKAQVSGQGDSLHEHIANLAGSPAIKKGILQTVKVVDELVKVMGRHKPENIVIEMARENQTTQKGQKNSRERMKRIEEGIKELGSQILKEHPVENTQLQNEKLYLYYLQNGRDMYVDQELDINRLSDYDVDHIVPQSFLKDDSIDNKVLTRSDKARGKSDNVPSEEVVKKMKNYWRQLLNAKLITQRKFDNLTKAERGGLSELDKAGFIKRQLVETRQITKHVAQILDSRMNTKYDENDKLIREVKVITLKSKLVSDFRKDFQFYKVREINNYHHAHDAYLNAVVGTALIKKYPKLESEFVYGDYKVYDVRKMIAKSEQEIGKATAKYFFYSNIMNFFKTEITLANGEIRKRPLIETNGETGEIVWDKGRDFATVRKVLSMPQVNIVKKTEVQTGGFSKESILPKRNSDKLIARKKDWDPKKYGGFDSPTVAYSVLVVAKVEKGKSKKLKSVKELLGITIMERSSFEKNPIDFLEAKGYKEVKKDLIIKLPKYSLFELENGRKRMLASAGELQKGNELALPSKYVNFLYLASHYEKLKGSPEDNEQKQLFVEQHKHYLDEIIEQISEFSKRVILADANLDKVLSAYNKHRDKPIREQAENIIHLFTLTNLGAPAAFKYFDTTIDRKRYTSTKEVLDATLIHQSITGLYETRIDLSQLGGDGGPAPGGGGGTLGDQGSRGSDPLPEPRVTLTVEGIPTEFLVNTGAEHSVLTKPMGKMGSKRTVVAGATGSKVYPWTTKRLLKIGQKQVTHSFLVIPECPAPLLGRDLLTKLKAQIQFSTEGPQVTWEDRPAMCLVLNLEEEYRLHEKPVPPSIDPSWLQLFPMVWAEKAGMGLANQVPPVVVELKSDASPVAVRQYPMSKEAREGIRPHIQRFLDLGILVPCQSPWNTPLLPVKKPGTNDYRPVQDLREVNKRVQDIHPTVPNPYNLLSSLPPSHTWYSVLDLKDAFFCLKLHPNSQPLFAFEWRDPEKGNTGQLTWTRLPQGFKNSPTLFNEALHRDLASFRALNPQVVMLQYVDDLLVAAPTYRDCKEGTRRLLQELSKLGYRVSAKKAQLCREEVTYLGYLLKGGKRWLTPARKATVMKIPTPTTPRQVREFLGTAGFCRLWIPGFASLAAPLYPLTRPKVPFTWTEAHQEAFGRIKEALLSAPALALPDLTKPFALYVDEKEGVARGVLTQTLGPWRRPVAYLSKKLDPVASGWPTCLKAIAAVALLLKDADKLTLGQNVLVIAPHNLESIVRQPPDRWMTNARMTHYQSLLLNERVSFAPPAILNPATLLPVESDDTPIHICSEILAEETGTRPDLRDQPLPGVPAWYTDGSSFIMDGRRQAGAAIVDNKRTVWASNLPEGTSAQKAELIALTQALRLAEGKSINIYTDSRYAFATAHVHGAIYKQRGWLTSAGKDIKNKEEILALLEAIHLPKRVAIIHCPGHQRGTDPVATGNRKADEAAKQAAQSTRILTETTKNAGKRTADGSEFEKRTADGSEFESPKKKAKVE

SEQ ID NO: 6721 - protein, 2091 aa, synthetic construct
MPAAKRVKLDGGDKKYSIGLDIGTNSVGWAVITDEYKVPSKKFKVLGNTDRHSIKKNLIGALLFDSGETAEATRLKRTARRRYTRRKNRICYLQEIFSNEMAKVDDSFFHRLEESFLVEEDKKHERHPIFGNIVDEVAYHEKYPTIYHLRKKLVDSTDKADLRLIYLALAHMIKFRGHFLIEGDLNPDNSDVDKLFIQLVQTYNQLFEENPINASGVDAKAILSARLSKSRRLENLIAQLPGEKKNGLFGNLIALSLGLTPNFKSNFDLAEDAKLQLSKDTYDDDLDNLLAQIGDQYADLFLAAKNLSDAILLSDILRVNTEITKAPLSASMIKRYDEHHQDLTLLKALVRQQLPEKYKEIFFDQSKNGYAGYIDGGASQEEFYKFIKPILEKMDGTEELLVKLNREDLLRKQRTFDNGSIPHQIHLGELHAILRRQEDFYPFLKDNREKIEKILTFRIPYYVGPLARGNSRFAWMTRKSEETITPWNFEEVVDKGASAQSFIERMTNFDKNLPNEKVLPKHSLLYEYFTVYNELTKVKYVTEGMRKPAFLSGEQKKAIVDLLFKTNRKVTVKQLKEDYFKKIECFDSVEISGVEDRFNASLGTYHDLLKIIKDKDFLDNEENEDILEDIVLTLTLFEDREMIEERLKTYAHLFDDKVMKQLKRRRYTGWGRLSRKLINGIRDKQSGKTILDFLKSDGFANRNFMQLIHDDSLTFKEDIQKAQVSGQGDSLHEHIANLAGSPAIKKGILQTVKVVDELVKVMGRHKPENIVIEMARENQTTQKGQKNSRERMKRIEEGIKELGSQILKEHPVENTQLQNEKLYLYYLQNGRDMYVDQELDINRLSDYDVDHIVPQSFLKDDSIDNKVLTRSDKARGKSDNVPSEEVVKKMKNYWRQLLNAKLITQRKFDNLTKAERGGLSELDKAGFIKRQLVETRQITKHVAQILDSRMNTKYDENDKLIREVKVITLKSKLVSDFRKDFQFYKVREINNYHHAHDAYLNAVVGTALIKKYPKLESEFVYGDYKVYDVRKMIAKSEQEIGKATAKYFFYSNIMNFFKTEITLANGEIRKRPLIETNGETGEIVWDKGRDFATVRKVLSMPQVNIVKKTEVQTGGFSKESILPKRNSDKLIARKKDWDPKKYGGFDSPTVAYSVLVVAKVEKGKSKKLKSVKELLGITIMERSSFEKNPIDFLEAKGYKEVKKDLIIKLPKYSLFELENGRKRMLASAGELQKGNELALPSKYVNFLYLASHYEKLKGSPEDNEQKQLFVEQHKHYLDEIIEQISEFSKRVILADANLDKVLSAYNKHRDKPIREQAENIIHLFTLTNLGAPAAFKYFDTTIDRKRYTSTKEVLDATLIHQSITGLYETRIDLSQLGGDGGPAPGGGGGTLGIEDEYRLHETSTEPDVSLGSTWLSDFPQAWAETGGMGLAVRQAPLIIPLKATSTPVSIQQYPMSHEARLGIKPHIQRLLDQGILVPCQSPWNTPLLPVKKPGTNDYRPVQDLREVNKRVEDIHPTVPNPYNLLSGLPPSHQWYTVLDLKDAFFCLRLHPTSQPLFAFEWRDPGMGISGQLTWTRLPQGFKNSPTLFNEALHRDLADFRIQHPDLILLQYVDDILLAATSELDCQQGTRALLQTLGDLGYRASAKKAQICQKQVKYLGYLLREGQRWLTEARKETVMGQPVPKTPRQLREFLGTAGFCRLWIPGFAEMAAPLYPLTKPGTLFSWGPDQQKAYQEIKQALLTAPALGLPDLTKPFELFVDEKQGYAKGVLTQKLGPWRRPVAYLSKKLDPVAAGWPPCLRMVAAIAVLTKDAGKLTMGQPLVILAPHAVEALVKQPPDRWLSNARMTHYQAMLLDTDRVQFGPVVALNPATLLPLPEEGAPHDCLEILAETHGTRPDLTDQPIPDADHTWYTDGSSFLQEGQRKAGAAVTTETEVIWAGALPAGTSAQRAELIALTQALKMAEGKRLNVYTDSRYAFATAHIHGEIYRRRGWLTSEGREIKNKSEILALLKALFLPKRLSIIHCLGHQKGDSAEARGNRLADQAAREAAIKTPPDTSTLLAGKRTADGSEFEKRTADGSEFESPKKKAKVE

SEQ ID NO: 6722 - protein, 2085 aa, synthetic construct
MPAAKRVKLDGGDKKYSIGLDIGTNSVGWAVITDEYKVPSKKFKVLGNTDRHSIKKNLIGALLFDSGETAEATRLKRTARRRYTRRKNRICYLQEIFSNEMAKVDDSFFHRLEESFLVEEDKKHERHPIFGNIVDEVAYHEKYPTIYHLRKKLVDSTDKADLRLIYLALAHMIKFRGHFLIEGDLNPDNSDVDKLFIQLVQTYNQLFEENPINASGVDAKAILSARLSKSRRLENLIAQLPGEKKNGLFGNLIALSLGLTPNFKSNFDLAEDAKLQLSKDTYDDDLDNLLAQIGDQYADLFLAAKNLSDAILLSDILRVNTEITKAPLSASMIKRYDEHHQDLTLLKALVRQQLPEKYKEIFFDQSKNGYAGYIDGGASQEEFYKFIKPILEKMDGTEELLVKLNREDLLRKQRTFDNGSIPHQIHLGELHAILRRQEDFYPFLKDNREKIEKILTFRIPYYVGPLARGNSRFAWMTRKSEETITPWNFEEVVDKGASAQSFIERMTNFDKNLPNEKVLPKHSLLYEYFTVYNELTKVKYVTEGMRKPAFLSGEQKKAIVDLLFKTNRKVTVKQLKEDYFKKIECFDSVEISGVEDRFNASLGTYHDLLKIIKDKDFLDNEENEDILEDIVLTLTLFEDREMIEERLKTYAHLFDDKVMKQLKRRRYTGWGRLSRKLINGIRDKQSGKTILDFLKSDGFANRNFMQLIHDDSLTFKEDIQKAQVSGQGDSLHEHIANLAGSPAIKKGILQTVKVVDELVKVMGRHKPENIVIEMARENQTTQKGQKNSRERMKRIEEGIKELGSQILKEHPVENTQLQNEKLYLYYLQNGRDMYVDQELDINRLSDYDVDHIVPQSFLKDDSIDNKVLTRSDKARGKSDNVPSEEVVKKMKNYWRQLLNAKLITQRKFDNLTKAERGGLSELDKAGFIKRQLVETRQITKHVAQILDSRMNTKYDENDKLIREVKVITLKSKLVSDFRKDFQFYKVREINNYHHAHDAYLNAVVGTALIKKYPKLESEFVYGDYKVYDVRKMIAKSEQEIGKATAKYFFYSNIMNFFKTEITLANGEIRKRPLIETNGETGEIVWDKGRDFATVRKVLSMPQVNIVKKTEVQTGGFSKESILPKRNSDKLIARKKDWDPKKYGGFDSPTVAYSVLVVAKVEKGKSKKLKSVKELLGITIMERSSFEKNPIDFLEAKGYKEVKKDLIIKLPKYSLFELENGRKRMLASAGELQKGNELALPSKYVNFLYLASHYEKLKGSPEDNEQKQLFVEQHKHYLDEIIEQISEFSKRVILADANLDKVLSAYNKHRDKPIREQAENIIHLFTLTNLGAPAAFKYFDTTIDRKRYTSTKEVLDATLIHQSITGLYETRIDLSQLGGDGGPAPGGGGGTLQLDDEYRLYSPLVKPDQNIQFWLEQFPQAWAETAGMGLAKQVPPQVIQLKASATPVSVRQYPLSKEAQEGIRPHVQRLIQQGILVPVQSPWNTPLLPVRKPGTNDYRPVQDLREVNKRVQDIHPTVPNPYNLLCALPPQRSWYTVLDLKDAFFCLRLHPTSQPLFAFEWRDPGTGRTGQLTWTRLPQGFKNSPTIFDEALHRDLANFRIQHPQVTLLQYVDDLLLAGATKQDCLEGTKALLLELSDLGYRASAKKAQICRREVTYLGYSLRDGQRWLTEARKKTVVQIPAPTTAKQVREFLGTAGFCRLWIPGFATLAAPLYPLTKEKGEFSWAPEHQKAFDAIKKALLSAPALALPDVTKPFTLYVDERKGVARGVLTQTLGPWRRPVAYLSKKLDPVASGWPVCLKAIAAVAILVKDADKLTLGQNITVIAPHALENIVRQPPDRWMTNARMTHYQSLLLTERVTFAPPAALNPATLLPEETDEPVTHDCHQLLIEETGVRKDLTDIPLTGEVLTWFTDGSSYVVEGKRMAGAAVVDGTRTIWASSLPEGTSAQKAELMALTQALRLAEGKSINIYTDSRYAFATAHVHGAIYKQRGLLTSAGREIKNKEEILSLLEALHLPKRLAIIHCPGHQKAKDPISRGNQMADRVAKQAAQGVNLLAGKRTADGSEFEKRTADGSEFESPKKKAKVE

SEQ ID NO: 6723 - protein, 2082 aa, synthetic construct
MPAAKRVKLDGGDKKYSIGLDIGTNSVGWAVITDEYKVPSKKFKVLGNTDRHSIKKNLIGALLFDSGETAEATRLKRTARRRYTRRKNRICYLQEIFSNEMAKVDDSFFHRLEESFLVEEDKKHERHPIFGNIVDEVAYHEKYPTIYHLRKKLVDSTDKADLRLIYLALAHMIKFRGHFLIEGDLNPDNSDVDKLFIQLVQTYNQLFEENPINASGVDAKAILSARLSKSRRLENLIAQLPGEKKNGLFGNLIALSLGLTPNFKSNFDLAEDAKLQLSKDTYDDDLDNLLAQIGDQYADLFLAAKNLSDAILLSDILRVNTEITKAPLSASMIKRYDEHHQDLTLLKALVRQQLPEKYKEIFFDQSKNGYAGYIDGGASQEEFYKFIKPILEKMDGTEELLVKLNREDLLRKQRTFDNGSIPHQIHLGELHAILRRQEDFYPFLKDNREKIEKILTFRIPYYVGPLARGNSRFAWMTRKSEETITPWNFEEVVDKGASAQSFIERMTNFDKNLPNEKVLPKHSLLYEYFTVYNELTKVKYVTEGMRKPAFLSGEQKKAIVDLLFKTNRKVTVKQLKEDYFKKIECFDSVEISGVEDRFNASLGTYHDLLKIIKDKDFLDNEENEDILEDIVLTLTLFEDREMIEERLKTYAHLFDDKVMKQLKRRRYTGWGRLSRKLINGIRDKQSGKTILDFLKSDGFANRNFMQLIHDDSLTFKEDIQKAQVSGQGDSLHEHIANLAGSPAIKKGILQTVKVVDELVKVMGRHKPENIVIEMARENQTTQKGQKNSRERMKRIEEGIKELGSQILKEHPVENTQLQNEKLYLYYLQNGRDMYVDQELDINRLSDYDVDHIVPQSFLKDDSIDNKVLTRSDKARGKSDNVPSEEVVKKMKNYWRQLLNAKLITQRKFDNLTKAERGGLSELDKAGFIKRQLVETRQITKHVAQILDSRMNTKYDENDKLIREVKVITLKSKLVSDFRKDFQFYKVREINNYHHAHDAYLNAVVGTALIKKYPKLESEFVYGDYKVYDVRKMIAKSEQEIGKATAKYFFYSNIMNFFKTEITLANGEIRKRPLIETNGETGEIVWDKGRDFATVRKVLSMPQVNIVKKTEVQTGGFSKESILPKRNSDKLIARKKDWDPKKYGGFDSPTVAYSVLVVAKVEKGKSKKLKSVKELLGITIMERSSFEKNPIDFLEAKGYKEVKKDLIIKLPKYSLFELENGRKRMLASAGELQKGNELALPSKYVNFLYLASHYEKLKGSPEDNEQKQLFVEQHKHYLDEIIEQISEFSKRVILADANLDKVLSAYNKHRDKPIREQAENIIHLFTLTNLGAPAAFKYFDTTIDRKRYTSTKEVLDATLIHQSITGLYETRIDLSQLGGDGGPAPGGGGGIPWLMKKPLQLTTLVPLQEYEERLLKQTMLTGSYKEKLQSLFLKYDALWQHWENQVGHRRIKPHHIATGTVNPRPQKQYPINPKAKASIQTVINDLLKQGVLIQQNSIMNTPVYPVPKPDGKWRMVLDYREVNKTIPLIAAQNQHSAGILSSIFRGKYKTTLDLSNGFWAHSITPESYWLTAFTWLGQQYCWTRLPQGFLNSPALFNADVVDLLKEVPNVQVYVDDIYISHDDPREHLEQLEKVFSLLLNAGYVVSLKKSEIAQHEVEFLGFNITKEGRGLTETFKQKLLNITPPRDLKQLQSILGLLNFARNFIPNFSELVKPLYNIIATAPGKYITWTTDNSQQLQNIISMLNSAENLEERNPEVRLIMKVNTSPSAGYIRFYNEFAKRPIMYLNYVYTKAEVKFTNTEKLLTTIHKGLIKALDLGMGQEILVYSPIVSMTKIQKTPLPERKALPIRWITWMSYLEDPRIQFHYDKTLPELQQVPTVTDDIIAKIKHPSEFSMVFYTDGSAIKHPNVNKSHNAGMGIAQVQFKPEFTVINTWSIPLGDHTAQLAEVAAVEFACKKALKIDGPVLIVTDSFYVAESVNKELPYWQSNGFFNNKKKPLKHVSKWKSIADCIQLKPDIIIIHEKGHQPTASTFHTEGNNLADKLATQGSYVVNAGKRTADGSEFEKRTADGSEFESPKKKAKVE

SEQ ID NO: 6724 - protein, 2082 aa, synthetic construct
MPAAKRVKLDGGDKKYSIGLDIGTNSVGWAVITDEYKVPSKKFKVLGNTDRHSIKKNLIGALLFDSGETAEATRLKRTARRRYTRRKNRICYLQEIFSNEMAKVDDSFFHRLEESFLVEEDKKHERHPIFGNIVDEVAYHEKYPTIYHLRKKLVDSTDKADLRLIYLALAHMIKFRGHFLIEGDLNPDNSDVDKLFIQLVQTYNQLFEENPINASGVDAKAILSARLSKSRRLENLIAQLPGEKKNGLFGNLIALSLGLTPNFKSNFDLAEDAKLQLSKDTYDDDLDNLLAQIGDQYADLFLAAKNLSDAILLSDILRVNTEITKAPLSASMIKRYDEHHQDLTLLKALVRQQLPEKYKEIFFDQSKNGYAGYIDGGASQEEFYKFIKPILEKMDGTEELLVKLNREDLLRKQRTFDNGSIPHQIHLGELHAILRRQEDFYPFLKDNREKIEKILTFRIPYYVGPLARGNSRFAWMTRKSEETITPWNFEEVVDKGASAQSFIERMTNFDKNLPNEKVLPKHSLLYEYFTVYNELTKVKYVTEGMRKPAFLSGEQKKAIVDLLFKTNRKVTVKQLKEDYFKKIECFDSVEISGVEDRFNASLGTYHDLLKIIKDKDFLDNEENEDILEDIVLTLTLFEDREMIEERLKTYAHLFDDKVMKQLKRRRYTGWGRLSRKLINGIRDKQSGKTILDFLKSDGFANRNFMQLIHDDSLTFKEDIQKAQVSGQGDSLHEHIANLAGSPAIKKGILQTVKVVDELVKVMGRHKPENIVIEMARENQTTQKGQKNSRERMKRIEEGIKELGSQILKEHPVENTQLQNEKLYLYYLQNGRDMYVDQELDINRLSDYDVDHIVPQSFLKDDSIDNKVLTRSDKARGKSDNVPSEEVVKKMKNYWRQLLNAKLITQRKFDNLTKAERGGLSELDKAGFIKRQLVETRQITKHVAQILDSRMNTKYDENDKLIREVKVITLKSKLVSDFRKDFQFYKVREINNYHHAHDAYLNAVVGTALIKKYPKLESEFVYGDYKVYDVRKMIAKSEQEIGKATAKYFFYSNIMNFFKTEITLANGEIRKRPLIETNGETGEIVWDKGRDFATVRKVLSMPQVNIVKKTEVQTGGFSKESILPKRNSDKLIARKKDWDPKKYGGFDSPTVAYSVLVVAKVEKGKSKKLKSVKELLGITIMERSSFEKNPIDFLEAKGYKEVKKDLIIKLPKYSLFELENGRKRMLASAGELQKGNELALPSKYVNFLYLASHYEKLKGSPEDNEQKQLFVEQHKHYLDEIIEQISEFSKRVILADANLDKVLSAYNKHRDKPIREQAENIIHLFTLTNLGAPAAFKYFDTTIDRKRYTSTKEVLDATLIHQSITGLYETRIDLSQLGGDGGPAPGGGGGIPWLMKKPLQLTTLVPLQEYEERLLKQTMLTGSYKEKLQSLFLKYDALWQHWENQVGHRRIKPHHIATGTVNPRPQKQYPINPKAKASIQTVINDLLKQGVLIQQNSIMNTPVYPVPKPDGKWRMVLDYREVNKTIPLIAAQNQHSAGILSSIFRGKYKTTLDLSNGFWAHSITPESYWLTAFTWLGQQYCWTRLPQGFLNSPALFNADVVDLLKEVPNVQVYVDDIYISHDDPREHLEQLEKVFSLLLNAGYVVSLKKSEIAQHEVEFLGFNITKEGRGLTETFKQKLLNITPPRDLKQLQSILGKLNFARNFIPNFSELVKPLYNIIATAPGKYITWTTDNSQQLQNIISMLNSAENLEERNPEVRLIMKVNTSPSAGYIRFYNEFAKRPIMYLNYVYTKAEVKFTNTEKLLTTIHKGLIKALDLGMGQEILVYSPIVSMTKIQKTPLPERKALPIRWITWMSYLEDPRIQFHYDKTLPELQQVPTVTDDIIAKIKHPSEFSMVFYTDGSAIKHPNVNKSHNAGMGIAQVQFKPEFTVINTWSIPLGDHTAQLAEVAAVEFACKKALKIDGPVLIVTDSFYVAESVNKELPYWQSNGFFNNKKKPLKHVSKWKSIADCIQLKPDIIIIHEKGHQPTASTFHTEGNNLADKLATQGSYVVNAGKRTADGSEFEKRTADGSEFESPKKKAKVE

SEQ ID NO: 6725 - protein, 2091 aa, synthetic construct
MPAAKRVKLDGGDKKYSIGLDIGTNSVGWAVITDEYKVPSKKFKVLGNTDRHSIKKNLIGALLFDSGETAEATRLKRTARRRYTRRKNRICYLQEIFSNEMAKVDDSFFHRLEESFLVEEDKKHERHPIFGNIVDEVAYHEKYPTIYHLRKKLVDSTDKADLRLIYLALAHMIKFRGHFLIEGDLNPDNSDVDKLFIQLVQTYNQLFEENPINASGVDAKAILSARLSKSRRLENLIAQLPGEKKNGLFGNLIALSLGLTPNFKSNFDLAEDAKLQLSKDTYDDDLDNLLAQIGDQYADLFLAAKNLSDAILLSDILRVNTEITKAPLSASMIKRYDEHHQDLTLLKALVRQQLPEKYKEIFFDQSKNGYAGYIDGGASQEEFYKFIKPILEKMDGTEELLVKLNREDLLRKQRTFDNGSIPHQIHLGELHAILRRQEDFYPFLKDNREKIEKILTFRIPYYVGPLARGNSRFAWMTRKSEETITPWNFEEVVDKGASAQSFIERMTNFDKNLPNEKVLPKHSLLYEYFTVYNELTKVKYVTEGMRKPAFLSGEQKKAIVDLLFKTNRKVTVKQLKEDYFKKIECFDSVEISGVEDRFNASLGTYHDLLKIIKDKDFLDNEENEDILEDIVLTLTLFEDREMIEERLKTYAHLFDDKVMKQLKRRRYTGWGRLSRKLINGIRDKQSGKTILDFLKSDGFANRNFMQLIHDDSLTFKEDIQKAQVSGQGDSLHEHIANLAGSPAIKKGILQTVKVVDELVKVMGRHKPENIVIEMARENQTTQKGQKNSRERMKRIEEGIKELGSQILKEHPVENTQLQNEKLYLYYLQNGRDMYVDQELDINRLSDYDVDHIVPQSFLKDDSIDNKVLTRSDKARGKSDNVPSEEVVKKMKNYWRQLLNAKLITQRKFDNLTKAERGGLSELDKAGFIKRQLVETRQITKHVAQILDSRMNTKYDENDKLIREVKVITLKSKLVSDFRKDFQFYKVREINNYHHAHDAYLNAVVGTALIKKYPKLESEFVYGDYKVYDVRKMIAKSEQEIGKATAKYFFYSNIMNFFKTEITLANGEIRKRPLIETNGETGEIVWDKGRDFATVRKVLSMPQVNIVKKTEVQTGGFSKESILPKRNSDKLIARKKDWDPKKYGGFDSPTVAYSVLVVAKVEKGKSKKLKSVKELLGITIMERSSFEKNPIDFLEAKGYKEVKKDLIIKLPKYSLFELENGRKRMLASAGELQKGNELALPSKYVNFLYLASHYEKLKGSPEDNEQKQLFVEQHKHYLDEIIEQISEFSKRVILADANLDKVLSAYNKHRDKPIREQAENIIHLFTLTNLGAPAAFKYFDTTIDRKRYTSTKEVLDATLIHQSITGLYETRIDLSQLGGDGGPAPGGGGGTLNIEDEYRLHETSKEPDVPLGSTWLSDFPQAWAETGGMGLAVRQAPLIIPLKATSTPVSIKQYPMSQEARLGIKPHIQRLLDQGILVPCQSPWNTPLLPVKKPGTNDYRPVQDLREVNKRVEDIHPTVPNPYNLLSGLPPSHQWYTVLDLKDAFFCLRLHPTSQPLFAFEWRDPEMGISGQLTWTRLPQGFKNSPTLFNEALHRDLADFRIQHPDLILLQYVDDLLLAATSEQDCQRGTRALLQTLGNLGYRASAKKAQICQKQVKYLGYLLKEGQRWLTEARKETVMGQPTPKTPRQLREFLGTAGFCRLWIPGFAEMAAPLYPLTKPGTLFNWGPDQQKAYQEIKQALLTAPALGLPDLTKPFELFVDEKQGYAKGVLTQKLGPWRRPVAYLSKKLDPVAAGWPPCLRMVAAIAVLTKDAGKLTMGQPLVILAPHAVEALVKQPPDRWLSNARMTHYQAMLLDTDRVQFGPVVALNPATLLPLPEKEAPHDCLEILAETHGTRPDLTDQPIPDADYTWYTDGSSFLQEGQRRAGAAVTTETEVIWARALPAGTSAQRAELIALTQALKMAEGKKLNVYTDSRYAFATAHVHGEIYRRRGWLTSEGREIKNKNEILALLKALFLPKRLSIIHCPGHQKGNSAEARGNRMADQAAREAAMKAVLETSTLLAGKRTADGSEFEKRTADGSEFESPKKKAKVE

SEQ ID NO: 6726 - protein, 2091 aa, synthetic construct
MPAAKRVKLDGGDKKYSIGLDIGTNSVGWAVITDEYKVPSKKFKVLGNTDRHSIKKNLIGALLFDSGETAEATRLKRTARRRYTRRKNRICYLQEIFSNEMAKVDDSFFHRLEESFLVEEDKKHERHPIFGNIVDEVAYHEKYPTIYHLRKKLVDSTDKADLRLIYLALAHMIKFRGHFLIEGDLNPDNSDVDKLFIQLVQTYNQLFEENPINASGVDAKAILSARLSKSRRLENLIAQLPGEKKNGLFGNLIALSLGLTPNFKSNFDLAEDAKLQLSKDTYDDDLDNLLAQIGDQYADLFLAAKNLSDAILLSDILRVNTEITKAPLSASMIKRYDEHHQDLTLLKALVRQQLPEKYKEIFFDQSKNGYAGYIDGGASQEEFYKFIKPILEKMDGTEELLVKLNREDLLRKQRTFDNGSIPHQIHLGELHAILRRQEDFYPFLKDNREKIEKILTFRIPYYVGPLARGNSRFAWMTRKSEETITPWNFEEVVDKGASAQSFIERMTNFDKNLPNEKVLPKHSLLYEYFTVYNELTKVKYVTEGMRKPAFLSGEQKKAIVDLLFKTNRKVTVKQLKEDYFKKIECFDSVEISGVEDRFNASLGTYHDLLKIIKDKDFLDNEENEDILEDIVLTLTLFEDREMIEERLKTYAHLFDDKVMKQLKRRRYTGWGRLSRKLINGIRDKQSGKTILDFLKSDGFANRNFMQLIHDDSLTFKEDIQKAQVSGQGDSLHEHIANLAGSPAIKKGILQTVKVVDELVKVMGRHKPENIVIEMARENQTTQKGQKNSRERMKRIEEGIKELGSQILKEHPVENTQLQNEKLYLYYLQNGRDMYVDQELDINRLSDYDVDHIVPQSFLKDDSIDNKVLTRSDKARGKSDNVPSEEVVKKMKNYWRQLLNAKLITQRKFDNLTKAERGGLSELDKAGFIKRQLVETRQITKHVAQILDSRMNTKYDENDKLIREVKVITLKSKLVSDFRKDFQFYKVREINNYHHAHDAYLNAVVGTALIKKYPKLESEFVYGDYKVYDVRKMIAKSEQEIGKATAKYFFYSNIMNFFKTEITLANGEIRKRPLIETNGETGEIVWDKGRDFATVRKVLSMPQVNIVKKTEVQTGGFSKESILPKRNSDKLIARKKDWDPKKYGGFDSPTVAYSVLVVAKVEKGKSKKLKSVKELLGITIMERSSFEKNPIDFLEAKGYKEVKKDLIIKLPKYSLFELENGRKRMLASAGELQKGNELALPSKYVNFLYLASHYEKLKGSPEDNEQKQLFVEQHKHYLDEIIEQISEFSKRVILADANLDKVLSAYNKHRDKPIREQAENIIHLFTLTNLGAPAAFKYFDTTIDRKRYTSTKEVLDATLIHQSITGLYETRIDLSQLGGDGGPAPGGGGGTLNIEDEYRLHETSKEPDVPLGSTWLSDFPQAWAETGGMGLAVRQAPLIIPLKATSTPVSIKQYPMSQEARLGIKPHIQRLLDQGILVPCQSPWNTPLLPVKKPGTNDYRPVQDLREVNKRVEDIHPTVPNPYNLLSGLPPSHQWYTVLDLKDAFFCLRLHPTSQPLFAFEWRDPEMGISGQLTWTRLPQGFKNSPTLFNEALHRDLADFRIQHPDLILLQYVDDLLLAATSEQDCQRGTRALLQTLGNLGYRASAKKAQICQKQVKYLGYLLKEGQRWLTEARKETVMGQPTPKTPRQLREFLGKAGFCRLFIPGFAEMAAPLYPLTKPGTLFNWGPDQQKAYQEIKQALLTAPALGLPDLTKPFELFVDEKQGYAKGVLTQKLGPWRRPVAYLSKKLDPVAAGWPPCLRMVAAIAVLTKDAGKLTMGQPLVILAPHAVEALVKQPPDRWLSNARMTHYQAMLLDTDRVQFGPVVALNPATLLPLPEKEAPHDCLEILAETHGTRPDLTDQPIPDADYTWYTDGSSFLQEGQRRAGAAVTTETEVIWARALPAGTSAQRAELIALTQALKMAEGKKLNVYTDSRYAFATAHVHGEIYRRRGWLTSEGREIKNKNEILALLKALFLPKRLSIIHCPGHQKGNSAEARGNRMADQAAREAAMKAVLETSTLLAGKRTADGSEFEKRTADGSEFESPKKKAKVE

SEQ ID NO: 6727 - protein, 2095 aa, synthetic construct
MPAAKRVKLDGGDKKYSIGLDIGTNSVGWAVITDEYKVPSKKFKVLGNTDRHSIKKNLIGALLFDSGETAEATRLKRTARRRYTRRKNRICYLQEIFSNEMAKVDDSFFHRLEESFLVEEDKKHERHPIFGNIVDEVAYHEKYPTIYHLRKKLVDSTDKADLRLIYLALAHMIKFRGHFLIEGDLNPDNSDVDKLFIQLVQTYNQLFEENPINASGVDAKAILSARLSKSRRLENLIAQLPGEKKNGLFGNLIALSLGLTPNFKSNFDLAEDAKLQLSKDTYDDDLDNLLAQIGDQYADLFLAAKNLSDAILLSDILRVNTEITKAPLSASMIKRYDEHHQDLTLLKALVRQQLPEKYKEIFFDQSKNGYAGYIDGGASQEEFYKFIKPILEKMDGTEELLVKLNREDLLRKQRTFDNGSIPHQIHLGELHAILRRQEDFYPFLKDNREKIEKILTFRIPYYVGPLARGNSRFAWMTRKSEETITPWNFEEVVDKGASAQSFIERMTNFDKNLPNEKVLPKHSLLYEYFTVYNELTKVKYVTEGMRKPAFLSGEQKKAIVDLLFKTNRKVTVKQLKEDYFKKIECFDSVEISGVEDRFNASLGTYHDLLKIIKDKDFLDNEENEDILEDIVLTLTLFEDREMIEERLKTYAHLFDDKVMKQLKRRRYTGWGRLSRKLINGIRDKQSGKTILDFLKSDGFANRNFMQLIHDDSLTFKEDIQKAQVSGQGDSLHEHIANLAGSPAIKKGILQTVKVVDELVKVMGRHKPENIVIEMARENQTTQKGQKNSRERMKRIEEGIKELGSQILKEHPVENTQLQNEKLYLYYLQNGRDMYVDQELDINRLSDYDVDHIVPQSFLKDDSIDNKVLTRSDKARGKSDNVPSEEVVKKMKNYWRQLLNAKLITQRKFDNLTKAERGGLSELDKAGFIKRQLVETRQITKHVAQILDSRMNTKYDENDKLIREVKVITLKSKLVSDFRKDFQFYKVREINNYHHAHDAYLNAVVGTALIKKYPKLESEFVYGDYKVYDVRKMIAKSEQEIGKATAKYFFYSNIMNFFKTEITLANGEIRKRPLIETNGETGEIVWDKGRDFATVRKVLSMPQVNIVKKTEVQTGGFSKESILPKRNSDKLIARKKDWDPKKYGGFDSPTVAYSVLVVAKVEKGKSKKLKSVKELLGITIMERSSFEKNPIDFLEAKGYKEVKKDLIIKLPKYSLFELENGRKRMLASAGELQKGNELALPSKYVNFLYLASHYEKLKGSPEDNEQKQLFVEQHKHYLDEIIEQISEFSKRVILADANLDKVLSAYNKHRDKPIREQAENIIHLFTLTNLGAPAAFKYFDTTIDRKRYTSTKEVLDATLIHQSITGLYETRIDLSQLGGDGGGSSEAAAKGGTAPLEEEYRLFLEAPIQNVTLLEQWKREIPKVWAEINPPGLASTQAPIHVQLLSTALPVRVRQYPITLEAKRSLRETIRKFRAAGILRPVHSPWNTPLLPVRKSGTSEYRMVQDLREVNKRVETIHPTVPNPYTLLSLLPPDRIWYSVLDLKDAFFCIPLAPESQLIFAFEWADAEEGESGQLTWTRLPQGFKNSPTLFNEALNRDLQGFRLDHPSVSLLQYVDDLLIAADTQAACLSATRDLLMTLAELGYRVSGKKAQLCQEEVTYLGFKIHKGSRSLSNSRTQAILQIPVPKTKRQVREFLGTIGYCRLWIPGFAELAQPLYAATRPGNDPLVWGEKEEEAFQSLKLALTQPPALALPSLDKPFQLFVEETSGAAKGVLTQALGPWKRPVAYLSKRLDPVAAGWPRCLRAIAAAALLTREASKLTFGQDIEITSSHNLESLLRSPPDKWLTNARITQYQVLLLDPPRVRFKQTAALNPATLLPETDDTLPIHHCLDTLDSLTSTRPDLTDQPLAQAEATLFTDGSSYIRDGKRYAGAAVVTLDSVIWAEPLPIGTSAQKAELIALTKALEWSKDKSVNIYTDSRYAFATLHVHGMIYRERGWLTAGGKAIKNAPEILALLTAVWLPKRVAVMHCKGHQKDDAPTSTGNRRADEVAREVAIRPLSTQATISAGKRTADGSEFEKRTADGSEFESPKKKAKVE

SEQ ID NO: 6728 - protein, 2099 aa, synthetic construct
MPAAKRVKLDGGDKKYSIGLDIGTNSVGWAVITDEYKVPSKKFKVLGNTDRHSIKKNLIGALLFDSGETAEATRLKRTARRRYTRRKNRICYLQEIFSNEMAKVDDSFFHRLEESFLVEEDKKHERHPIFGNIVDEVAYHEKYPTIYHLRKKLVDSTDKADLRLIYLALAHMIKFRGHFLIEGDLNPDNSDVDKLFIQLVQTYNQLFEENPINASGVDAKAILSARLSKSRRLENLIAQLPGEKKNGLFGNLIALSLGLTPNFKSNFDLAEDAKLQLSKDTYDDDLDNLLAQIGDQYADLFLAAKNLSDAILLSDILRVNTEITKAPLSASMIKRYDEHHQDLTLLKALVRQQLPEKYKEIFFDQSKNGYAGYIDGGASQEEFYKFIKPILEKMDGTEELLVKLNREDLLRKQRTFDNGSIPHQIHLGELHAILRRQEDFYPFLKDNREKIEKILTFRIPYYVGPLARGNSRFAWMTRKSEETITPWNFEEVVDKGASAQSFIERMTNFDKNLPNEKVLPKHSLLYEYFTVYNELTKVKYVTEGMRKPAFLSGEQKKAIVDLLFKTNRKVTVKQLKEDYFKKIECFDSVEISGVEDRFNASLGTYHDLLKIIKDKDFLDNEENEDILEDIVLTLTLFEDREMIEERLKTYAHLFDDKVMKQLKRRRYTGWGRLSRKLINGIRDKQSGKTILDFLKSDGFANRNFMQLIHDDSLTFKEDIQKAQVSGQGDSLHEHIANLAGSPAIKKGILQTVKVVDELVKVMGRHKPENIVIEMARENQTTQKGQKNSRERMKRIEEGIKELGSQILKEHPVENTQLQNEKLYLYYLQNGRDMYVDQELDINRLSDYDVDHIVPQSFLKDDSIDNKVLTRSDKARGKSDNVPSEEVVKKMKNYWRQLLNAKLITQRKFDNLTKAERGGLSELDKAGFIKRQLVETRQITKHVAQILDSRMNTKYDENDKLIREVKVITLKSKLVSDFRKDFQFYKVREINNYHHAHDAYLNAVVGTALIKKYPKLESEFVYGDYKVYDVRKMIAKSEQEIGKATAKYFFYSNIMNFFKTEITLANGEIRKRPLIETNGETGEIVWDKGRDFATVRKVLSMPQVNIVKKTEVQTGGFSKESILPKRNSDKLIARKKDWDPKKYGGFDSPTVAYSVLVVAKVEKGKSKKLKSVKELLGITIMERSSFEKNPIDFLEAKGYKEVKKDLIIKLPKYSLFELENGRKRMLASAGELQKGNELALPSKYVNFLYLASHYEKLKGSPEDNEQKQLFVEQHKHYLDEIIEQISEFSKRVILADANLDKVLSAYNKHRDKPIREQAENIIHLFTLTNLGAPAAFKYFDTTIDRKRYTSTKEVLDATLIHQSITGLYETRIDLSQLGGDGGGSSEAAAKGGTVSLQDEHRLFDIPVTTSLPDVWLQDFPQAWAETGGLGRAKCQAPIIIDLKPTAVPVSIKQYPMSLEAHMGIRQHIIKFLELGVLRPCRSPWNTPLLPVKKPGTQDYRPVQDLREINKRTVDIHPTVPNPYNLLSTLKPDYSWYTVLDLKDAFFCLPLAPQSQELFAFEWKDPERGISGQLTWTRLPQGFKNSPTLFNEALHRDLTDFRTQHPEVTLLQYVDDLLLAAPTKKACTQGTRHLLQELGEKGYRASAKKAQICQTKVTYLGYILSEGKRWLTPGRIETVARIPPPRNPREVREFLGTAGFCRLWIPGFAELAAPLYALTKPSTPFTWQTEHQLAFEALKKALLSAPALGLPDTSKPFTLFLDERQGIAKGVLTQKLGPWKRPVAYLSKKLDPVAAGWPPCLRIMAATAMLVKDSAKLTLGQPLTVITPHTLEAIVRQPPDRWITNARLTHYQALLLDTDRVQFGPPVTLNPATLLPVPENQPSPHDCRQVLAETHGTREDLKDQELPDADHTWYTDGSSYLDSGTRRAGAAVVDGHNTIWAQSLPPGTSAQKAELIALTKALELSKGKKANIYTDSRYAFATAHTHGSIYERRGWLTSEGKEIKNKAEIIALLKALFLPQEVAIIHCPGHQKGQDPVAVGNRQADRVARQAAMAEVLTLATEPDNTSHITAGKRTADGSEFEKRTADGSEFESPKKKAKVE

SEQ ID NO: 6729 - protein, 2124 aa, synthetic construct
MPAAKRVKLDGGDKKYSIGLDIGTNSVGWAVITDEYKVPSKKFKVLGNTDRHSIKKNLIGALLFDSGETAEATRLKRTARRRYTRRKNRICYLQEIFSNEMAKVDDSFFHRLEESFLVEEDKKHERHPIFGNIVDEVAYHEKYPTIYHLRKKLVDSTDKADLRLIYLALAHMIKFRGHFLIEGDLNPDNSDVDKLFIQLVQTYNQLFEENPINASGVDAKAILSARLSKSRRLENLIAQLPGEKKNGLFGNLIALSLGLTPNFKSNFDLAEDAKLQLSKDTYDDDLDNLLAQIGDQYADLFLAAKNLSDAILLSDILRVNTEITKAPLSASMIKRYDEHHQDLTLLKALVRQQLPEKYKEIFFDQSKNGYAGYIDGGASQEEFYKFIKPILEKMDGTEELLVKLNREDLLRKQRTFDNGSIPHQIHLGELHAILRRQEDFYPFLKDNREKIEKILTFRIPYYVGPLARGNSRFAWMTRKSEETITPWNFEEVVDKGASAQSFIERMTNFDKNLPNEKVLPKHSLLYEYFTVYNELTKVKYVTEGMRKPAFLSGEQKKAIVDLLFKTNRKVTVKQLKEDYFKKIECFDSVEISGVEDRFNASLGTYHDLLKIIKDKDFLDNEENEDILEDIVLTLTLFEDREMIEERLKTYAHLFDDKVMKQLKRRRYTGWGRLSRKLINGIRDKQSGKTILDFLKSDGFANRNFMQLIHDDSLTFKEDIQKAQVSGQGDSLHEHIANLAGSPAIKKGILQTVKVVDELVKVMGRHKPENIVIEMARENQTTQKGQKNSRERMKRIEEGIKELGSQILKEHPVENTQLQNEKLYLYYLQNGRDMYVDQELDINRLSDYDVDHIVPQSFLKDDSIDNKVLTRSDKARGKSDNVPSEEVVKKMKNYWRQLLNAKLITQRKFDNLTKAERGGLSELDKAGFIKRQLVETRQITKHVAQILDSRMNTKYDENDKLIREVKVITLKSKLVSDFRKDFQFYKVREINNYHHAHDAYLNAVVGTALIKKYPKLESEFVYGDYKVYDVRKMIAKSEQEIGKATAKYFFYSNIMNFFKTEITLANGEIRKRPLIETNGETGEIVWDKGRDFATVRKVLSMPQVNIVKKTEVQTGGFSKESILPKRNSDKLIARKKDWDPKKYGGFDSPTVAYSVLVVAKVEKGKSKKLKSVKELLGITIMERSSFEKNPIDFLEAKGYKEVKKDLIIKLPKYSLFELENGRKRMLASAGELQKGNELALPSKYVNFLYLASHYEKLKGSPEDNEQKQLFVEQHKHYLDEIIEQISEFSKRVILADANLDKVLSAYNKHRDKPIREQAENIIHLFTLTNLGAPAAFKYFDTTIDRKRYTSTKEVLDATLIHQSITGLYETRIDLSQLGGDGGGSSEAAAKGGLLGRDLLTKLKAQIQFSTEGPQVTWEDRPAMCLVLNLEEEYRLHEKPVPPSIDPSWLQLFPMVWAEKAGMGLANQVPPVVVELKSDASPVAVRQYPMSKEAREGIRPHIQRFLDLGILVPCQSPWNTPLLPVKKPGTNDYRPVQDLREVNKRVQDIHPTVPNPYNLLSSLPPSHTWYSVLDLKDAFFCLKLHPNSQPLFAFEWRDPEKGNTGQLTWTRLPQGFKNSPTLFNEALHRDLASFRALNPQVVMLQYVDDLLVAAPTYRDCKEGTRRLLQELSKLGYRVSAKKAQLCREEVTYLGYLLKGGKRWLTPARKATVMKIPTPTTPRQVREFLGTAGFCRLWIPGFASLAAPLYPLTRPKVPFTWTEAHQEAFGRIKEALLSAPALALPDLTKPFALYVDEKEGVARGVLTQTLGPWRRPVAYLSKKLDPVASGWPTCLKAIAAVALLLKDADKLTLGQNVLVIAPHNLESIVRQPPDRWMTNARMTHYQSLLLNERVSFAPPAILNPATLLPVESDDTPIHICSEILAEETGTRPDLRDQPLPGVPAWYTDGSSFIMDGRRQAGAAIVDNKRTVWASNLPEGTSAQKAELIALTQALRLAEGKSINIYTDSRYAFATAHVHGAIYKQRGWLTSAGKDIKNKEEILALLEAIHLPKRVAIIHCPGHQRGTDPVATGNRKADEAAKQAAQSTRILTETTKNAGKRTADGSEFEKRTADGSEFESPKKKAKVE

SEQ ID NO: 6730 - protein, 2093 aa, synthetic construct
MPAAKRVKLDGGDKKYSIGLDIGTNSVGWAVITDEYKVPSKKFKVLGNTDRHSIKKNLIGALLFDSGETAEATRLKRTARRRYTRRKNRICYLQEIFSNEMAKVDDSFFHRLEESFLVEEDKKHERHPIFGNIVDEVAYHEKYPTIYHLRKKLVDSTDKADLRLIYLALAHMIKFRGHFLIEGDLNPDNSDVDKLFIQLVQTYNQLFEENPINASGVDAKAILSARLSKSRRLENLIAQLPGEKKNGLFGNLIALSLGLTPNFKSNFDLAEDAKLQLSKDTYDDDLDNLLAQIGDQYADLFLAAKNLSDAILLSDILRVNTEITKAPLSASMIKRYDEHHQDLTLLKALVRQQLPEKYKEIFFDQSKNGYAGYIDGGASQEEFYKFIKPILEKMDGTEELLVKLNREDLLRKQRTFDNGSIPHQIHLGELHAILRRQEDFYPFLKDNREKIEKILTFRIPYYVGPLARGNSRFAWMTRKSEETITPWNFEEVVDKGASAQSFIERMTNFDKNLPNEKVLPKHSLLYEYFTVYNELTKVKYVTEGMRKPAFLSGEQKKAIVDLLFKTNRKVTVKQLKEDYFKKIECFDSVEISGVEDRFNASLGTYHDLLKIIKDKDFLDNEENEDILEDIVLTLTLFEDREMIEERLKTYAHLFDDKVMKQLKRRRYTGWGRLSRKLINGIRDKQSGKTILDFLKSDGFANRNFMQLIHDDSLTFKEDIQKAQVSGQGDSLHEHIANLAGSPAIKKGILQTVKVVDELVKVMGRHKPENIVIEMARENQTTQKGQKNSRERMKRIEEGIKELGSQILKEHPVENTQLQNEKLYLYYLQNGRDMYVDQELDINRLSDYDVDHIVPQSFLKDDSIDNKVLTRSDKARGKSDNVPSEEVVKKMKNYWRQLLNAKLITQRKFDNLTKAERGGLSELDKAGFIKRQLVETRQITKHVAQILDSRMNTKYDENDKLIREVKVITLKSKLVSDFRKDFQFYKVREINNYHHAHDAYLNAVVGTALIKKYPKLESEFVYGDYKVYDVRKMIAKSEQEIGKATAKYFFYSNIMNFFKTEITLANGEIRKRPLIETNGETGEIVWDKGRDFATVRKVLSMPQVNIVKKTEVQTGGFSKESILPKRNSDKLIARKKDWDPKKYGGFDSPTVAYSVLVVAKVEKGKSKKLKSVKELLGITIMERSSFEKNPIDFLEAKGYKEVKKDLIIKLPKYSLFELENGRKRMLASAGELQKGNELALPSKYVNFLYLASHYEKLKGSPEDNEQKQLFVEQHKHYLDEIIEQISEFSKRVILADANLDKVLSAYNKHRDKPIREQAENIIHLFTLTNLGAPAAFKYFDTTIDRKRYTSTKEVLDATLIHQSITGLYETRIDLSQLGGDGGGSSEAAAKGGTLNLEDEYRLYETSAEPEVSPGSTWLSDFPQAWAETGGMGLAVRQAPLIIPLKATSTPVSIKQYPMSQEAKLGIKPHIQRLLDQGILVPCQSPWNTPLLPVKKPGTNDYRPVQDLREVNKRVEDIHPTVPNPYNLLSGLPPSHRWYTVLDLKDAFFCLRLHPTSQPLFAFEWRDPGMGISGQLTWTRLPQGFKNSPTLFNEALHRDLADFRIQHPDLILLQYVDDILLAATSELDCQQGTRALLLTLGNLGYRASAKKAQLCQKQVKYLGYLLKEGQRWLTEARKETVMGQPTPKTPRQLREFLGTAGFCRLWIPGFAEMAAPLYPLTKPGTLFNWGPDQQKAYQEIKQALLTAPALGLPDLTKPFELFVDEKQGYAKGVLTQKLGPWRRPVAYLSKKLDPVAAGWPPCLRMVAAIAVLRKDAGKLTMGQPLVILAPHAVEALVKQPPDRWLSNARMTHYQAMLLDTDRVQFGPVVALNPATLLPLPEEGAPHDCLEILAETHGTRPDLTDQPIPDADHTWYTDGSSFLQEGQRKAGAAVTTETEVIWARALPAGTSAQRAELIALTQALKMAEGKRLNVYTDSRYAFATAHIHGEIYRRRGWLTSEGREIKNKSEILALLKALFLPKRLSIIHCLGHQKGDSAEARGNRLADQAAREAAIKTPPDTSTLLAGKRTADGSEFEKRTADGSEFESPKKKAKVE

SEQ ID NO: 6731 - protein, 2093 aa, synthetic construct
MPAAKRVKLDGGDKKYSIGLDIGTNSVGWAVITDEYKVPSKKFKVLGNTDRHSIKKNLIGALLFDSGETAEATRLKRTARRRYTRRKNRICYLQEIFSNEMAKVDDSFFHRLEESFLVEEDKKHERHPIFGNIVDEVAYHEKYPTIYHLRKKLVDSTDKADLRLIYLALAHMIKFRGHFLIEGDLNPDNSDVDKLFIQLVQTYNQLFEENPINASGVDAKAILSARLSKSRRLENLIAQLPGEKKNGLFGNLIALSLGLTPNFKSNFDLAEDAKLQLSKDTYDDDLDNLLAQIGDQYADLFLAAKNLSDAILLSDILRVNTEITKAPLSASMIKRYDEHHQDLTLLKALVRQQLPEKYKEIFFDQSKNGYAGYIDGGASQEEFYKFIKPILEKMDGTEELLVKLNREDLLRKQRTFDNGSIPHQIHLGELHAILRRQEDFYPFLKDNREKIEKILTFRIPYYVGPLARGNSRFAWMTRKSEETITPWNFEEVVDKGASAQSFIERMTNFDKNLPNEKVLPKHSLLYEYFTVYNELTKVKYVTEGMRKPAFLSGEQKKAIVDLLFKTNRKVTVKQLKEDYFKKIECFDSVEISGVEDRFNASLGTYHDLLKIIKDKDFLDNEENEDILEDIVLTLTLFEDREMIEERLKTYAHLFDDKVMKQLKRRRYTGWGRLSRKLINGIRDKQSGKTILDFLKSDGFANRNFMQLIHDDSLTFKEDIQKAQVSGQGDSLHEHIANLAGSPAIKKGILQTVKVVDELVKVMGRHKPENIVIEMARENQTTQKGQKNSRERMKRIEEGIKELGSQILKEHPVENTQLQNEKLYLYYLQNGRDMYVDQELDINRLSDYDVDHIVPQSFLKDDSIDNKVLTRSDKARGKSDNVPSEEVVKKMKNYWRQLLNAKLITQRKFDNLTKAERGGLSELDKAGFIKRQLVETRQITKHVAQILDSRMNTKYDENDKLIREVKVITLKSKLVSDFRKDFQFYKVREINNYHHAHDAYLNAVVGTALIKKYPKLESEFVYGDYKVYDVRKMIAKSEQEIGKATAKYFFYSNIMNFFKTEITLANGEIRKRPLIETNGETGEIVWDKGRDFATVRKVLSMPQVNIVKKTEVQTGGFSKESILPKRNSDKLIARKKDWDPKKYGGFDSPTVAYSVLVVAKVEKGKSKKLKSVKELLGITIMERSSFEKNPIDFLEAKGYKEVKKDLIIKLPKYSLFELENGRKRMLASAGELQKGNELALPSKYVNFLYLASHYEKLKGSPEDNEQKQLFVEQHKHYLDEIIEQISEFSKRVILADANLDKVLSAYNKHRDKPIREQAENIIHLFTLTNLGAPAAFKYFDTTIDRKRYTSTKEVLDATLIHQSITGLYETRIDLSQLGGDGGGSSEAAAKGGTLNIEDEYRLHETSKEPDVPLGSTWLSDFPQAWAETGGMGLAVRQAPLIIPLKATSTPVSIKQYPMSQEARLGIKPHIQRLLDQGILVPCQSPWNTPLLPVKKPGTNDYRPVQDLREVNKRVEDIHPTVPNPYNLLSGLPPSHQWYTVLDLKDAFFCLRLHPTSQPLFAFEWRDPEMGISGQLTWTRLPQGFKNSPTLFNEALHRDLADFRIQHPDLILLQYVDDLLLAATSEQDCQRGTRALLQTLGNLGYRASAKKAQICQKQVKYLGYLLKEGQRWLTEARKETVMGQPTPKTPRQLREFLGKAGFCRLFIPGFAEMAAPLYPLTKPGTLFNWGPDQQKAYQEIKQALLTAPALGLPDLTKPFELFVDEKQGYAKGVLTQKLGPWRRPVAYLSKKLDPVAAGWPPCLRMVAAIAVLTKDAGKLTMGQPLVILAPHAVEALVKQPPDRWLSNARMTHYQAMLLDTDRVQFGPVVALNPATLLPLPEKEAPHDCLEILAETHGTRPDLTDQPIPDADYTWYTDGSSFLQEGQRRAGAAVTTETEVIWARALPAGTSAQRAELIALTQALKMAEGKKLNVYTDSRYAFATAHVHGEIYRRRGWLTSEGREIKNKNEILALLKALFLPKRLSIIHCPGHQKGNSAEARGNRMADQAAREAAMKAVLETSTLLAGKRTADGSEFEKRTADGSEFESPKKKAKVE

SEQ ID NO: 6732 - protein, 2095 aa, synthetic construct
MPAAKRVKLDGGDKKYSIGLDIGTNSVGWAVITDEYKVPSKKFKVLGNTDRHSIKKNLIGALLFDSGETAEATRLKRTARRRYTRRKNRICYLQEIFSNEMAKVDDSFFHRLEESFLVEEDKKHERHPIFGNIVDEVAYHEKYPTIYHLRKKLVDSTDKADLRLIYLALAHMIKFRGHFLIEGDLNPDNSDVDKLFIQLVQTYNQLFEENPINASGVDAKAILSARLSKSRRLENLIAQLPGEKKNGLFGNLIALSLGLTPNFKSNFDLAEDAKLQLSKDTYDDDLDNLLAQIGDQYADLFLAAKNLSDAILLSDILRVNTEITKAPLSASMIKRYDEHHQDLTLLKALVRQQLPEKYKEIFFDQSKNGYAGYIDGGASQEEFYKFIKPILEKMDGTEELLVKLNREDLLRKQRTFDNGSIPHQIHLGELHAILRRQEDFYPFLKDNREKIEKILTFRIPYYVGPLARGNSRFAWMTRKSEETITPWNFEEVVDKGASAQSFIERMTNFDKNLPNEKVLPKHSLLYEYFTVYNELTKVKYVTEGMRKPAFLSGEQKKAIVDLLFKTNRKVTVKQLKEDYFKKIECFDSVEISGVEDRFNASLGTYHDLLKIIKDKDFLDNEENEDILEDIVLTLTLFEDREMIEERLKTYAHLFDDKVMKQLKRRRYTGWGRLSRKLINGIRDKQSGKTILDFLKSDGFANRNFMQLIHDDSLTFKEDIQKAQVSGQGDSLHEHIANLAGSPAIKKGILQTVKVVDELVKVMGRHKPENIVIEMARENQTTQKGQKNSRERMKRIEEGIKELGSQILKEHPVENTQLQNEKLYLYYLQNGRDMYVDQELDINRLSDYDVDHIVPQSFLKDDSIDNKVLTRSDKARGKSDNVPSEEVVKKMKNYWRQLLNAKLITQRKFDNLTKAERGGLSELDKAGFIKRQLVETRQITKHVAQILDSRMNTKYDENDKLIREVKVITLKSKLVSDFRKDFQFYKVREINNYHHAHDAYLNAVVGTALIKKYPKLESEFVYGDYKVYDVRKMIAKSEQEIGKATAKYFFYSNIMNFFKTEITLANGEIRKRPLIETNGETGEIVWDKGRDFATVRKVLSMPQVNIVKKTEVQTGGFSKESILPKRNSDKLIARKKDWDPKKYGGFDSPTVAYSVLVVAKVEKGKSKKLKSVKELLGITIMERSSFEKNPIDFLEAKGYKEVKKDLIIKLPKYSLFELENGRKRMLASAGELQKGNELALPSKYVNFLYLASHYEKLKGSPEDNEQKQLFVEQHKHYLDEIIEQISEFSKRVILADANLDKVLSAYNKHRDKPIREQAENIIHLFTLTNLGAPAAFKYFDTTIDRKRYTSTKEVLDATLIHQSITGLYETRIDLSQLGGDGGEAAAKGSSGGTAPLEEEYRLFLEAPIQNVTLLEQWKREIPKVWAEINPPGLASTQAPIHVQLLSTALPVRVRQYPITLEAKRSLRETIRKFRAAGILRPVHSPWNTPLLPVRKSGTSEYRMVQDLREVNKRVETIHPTVPNPYTLLSLLPPDRIWYSVLDLKDAFFCIPLAPESQLIFAFEWADAEEGESGQLTWTRLPQGFKNSPTLFNEALNRDLQGFRLDHPSVSLLQYVDDLLIAADTQAACLSATRDLLMTLAELGYRVSGKKAQLCQEEVTYLGFKIHKGSRSLSNSRTQAILQIPVPKTKRQVREFLGTIGYCRLWIPGFAELAQPLYAATRPGNDPLVWGEKEEEAFQSLKLALTQPPALALPSLDKPFQLFVEETSGAAKGVLTQALGPWKRPVAYLSKRLDPVAAGWPRCLRAIAAAALLTREASKLTFGQDIEITSSHNLESLLRSPPDKWLTNARITQYQVLLLDPPRVRFKQTAALNPATLLPETDDTLPIHHCLDTLDSLTSTRPDLTDQPLAQAEATLFTDGSSYIRDGKRYAGAAVVTLDSVIWAEPLPIGTSAQKAELIALTKALEWSKDKSVNIYTDSRYAFATLHVHGMIYRERGWLTAGGKAIKNAPEILALLTAVWLPKRVAVMHCKGHQKDDAPTSTGNRRADEVAREVAIRPLSTQATISAGKRTADGSEFEKRTADGSEFESPKKKAKVE

SEQ ID NO: 6733 - protein, 2095 aa, synthetic construct
MPAAKRVKLDGGDKKYSIGLDIGTNSVGWAVITDEYKVPSKKFKVLGNTDRHSIKKNLIGALLFDSGETAEATRLKRTARRRYTRRKNRICYLQEIFSNEMAKVDDSFFHRLEESFLVEEDKKHERHPIFGNIVDEVAYHEKYPTIYHLRKKLVDSTDKADLRLIYLALAHMIKFRGHFLIEGDLNPDNSDVDKLFIQLVQTYNQLFEENPINASGVDAKAILSARLSKSRRLENLIAQLPGEKKNGLFGNLIALSLGLTPNFKSNFDLAEDAKLQLSKDTYDDDLDNLLAQIGDQYADLFLAAKNLSDAILLSDILRVNTEITKAPLSASMIKRYDEHHQDLTLLKALVRQQLPEKYKEIFFDQSKNGYAGYIDGGASQEEFYKFIKPILEKMDGTEELLVKLNREDLLRKQRTFDNGSIPHQIHLGELHAILRRQEDFYPFLKDNREKIEKILTFRIPYYVGPLARGNSRFAWMTRKSEETITPWNFEEVVDKGASAQSFIERMTNFDKNLPNEKVLPKHSLLYEYFTVYNELTKVKYVTEGMRKPAFLSGEQKKAIVDLLFKTNRKVTVKQLKEDYFKKIECFDSVEISGVEDRFNASLGTYHDLLKIIKDKDFLDNEENEDILEDIVLTLTLFEDREMIEERLKTYAHLFDDKVMKQLKRRRYTGWGRLSRKLINGIRDKQSGKTILDFLKSDGFANRNFMQLIHDDSLTFKEDIQKAQVSGQGDSLHEHIANLAGSPAIKKGILQTVKVVDELVKVMGRHKPENIVIEMARENQTTQKGQKNSRERMKRIEEGIKELGSQILKEHPVENTQLQNEKLYLYYLQNGRDMYVDQELDINRLSDYDVDHIVPQSFLKDDSIDNKVLTRSDKARGKSDNVPSEEVVKKMKNYWRQLLNAKLITQRKFDNLTKAERGGLSELDKAGFIKRQLVETRQITKHVAQILDSRMNTKYDENDKLIREVKVITLKSKLVSDFRKDFQFYKVREINNYHHAHDAYLNAVVGTALIKKYPKLESEFVYGDYKVYDVRKMIAKSEQEIGKATAKYFFYSNIMNFFKTEITLANGEIRKRPLIETNGETGEIVWDKGRDFATVRKVLSMPQVNIVKKTEVQTGGFSKESILPKRNSDKLIARKKDWDPKKYGGFDSPTVAYSVLVVAKVEKGKSKKLKSVKELLGITIMERSSFEKNPIDFLEAKGYKEVKKDLIIKLPKYSLFELENGRKRMLASAGELQKGNELALPSKYVNFLYLASHYEKLKGSPEDNEQKQLFVEQHKHYLDEIIEQISEFSKRVILADANLDKVLSAYNKHRDKPIREQAENIIHLFTLTNLGAPAAFKYFDTTIDRKRYTSTKEVLDATLIHQSITGLYETRIDLSQLGGDGGEAAAKGSSGGTAPLEEEYRLFLEAPIQNVTLLEQWKREIPKVWAEINPPGLASTQAPIHVQLLSTALPVRVRQYPITLEAKRSLRETIRKFRAAGILRPVHSPWNTPLLPVRKSGTSEYRMVQDLREVNKRVETIHPTVPNPYTLLSLLPPDRIWYSVLDLKDAFFCIPLAPESQLIFAFEWADAEEGESGQLTWTRLPQGFKNSPTLFNEALNRDLQGFRLDHPSVSLLQYVDDLLIAADTQAACLSATRDLLMTLAELGYRVSGKKAQLCQEEVTYLGFKIHKGSRSLSNSRTQAILQIPVPKTKRQVREFLGKIGYCRLFIPGFAELAQPLYAATRPGNDPLVWGEKEEEAFQSLKLALTQPPALALPSLDKPFQLFVEETSGAAKGVLTQALGPWKRPVAYLSKRLDPVAAGWPRCLRAIAAAALLTREASKLTFGQDIEITSSHNLESLLRSPPDKWLTNARITQYQVLLLDPPRVRFKQTAALNPATLLPETDDTLPIHHCLDTLDSLTSTRPDLTDQPLAQAEATLFTDGSSYIRDGKRYAGAAVVTLDSVIWAEPLPIGTSAQKAELIALTKALEWSKDKSVNIYTDSRYAFATLHVHGMIYRERGWLTAGGKAIKNAPEILALLTAVWLPKRVAVMHCKGHQKDDAPTSTGNRRADEVAREVAIRPLSTQATISAGKRTADGSEFEKRTADGSEFESPKKKAKVE

SEQ ID NO: 6734 - protein, 2092 aa, synthetic construct
MPAAKRVKLDGGDKKYSIGLDIGTNSVGWAVITDEYKVPSKKFKVLGNTDRHSIKKNLIGALLFDSGETAEATRLKRTARRRYTRRKNRICYLQEIFSNEMAKVDDSFFHRLEESFLVEEDKKHERHPIFGNIVDEVAYHEKYPTIYHLRKKLVDSTDKADLRLIYLALAHMIKFRGHFLIEGDLNPDNSDVDKLFIQLVQTYNQLFEENPINASGVDAKAILSARLSKSRRLENLIAQLPGEKKNGLFGNLIALSLGLTPNFKSNFDLAEDAKLQLSKDTYDDDLDNLLAQIGDQYADLFLAAKNLSDAILLSDILRVNTEITKAPLSASMIKRYDEHHQDLTLLKALVRQQLPEKYKEIFFDQSKNGYAGYIDGGASQEEFYKFIKPILEKMDGTEELLVKLNREDLLRKQRTFDNGSIPHQIHLGELHAILRRQEDFYPFLKDNREKIEKILTFRIPYYVGPLARGNSRFAWMTRKSEETITPWNFEEVVDKGASAQSFIERMTNFDKNLPNEKVLPKHSLLYEYFTVYNELTKVKYVTEGMRKPAFLSGEQKKAIVDLLFKTNRKVTVKQLKEDYFKKIECFDSVEISGVEDRFNASLGTYHDLLKIIKDKDFLDNEENEDILEDIVLTLTLFEDREMIEERLKTYAHLFDDKVMKQLKRRRYTGWGRLSRKLINGIRDKQSGKTILDFLKSDGFANRNFMQLIHDDSLTFKEDIQKAQVSGQGDSLHEHIANLAGSPAIKKGILQTVKVVDELVKVMGRHKPENIVIEMARENQTTQKGQKNSRERMKRIEEGIKELGSQILKEHPVENTQLQNEKLYLYYLQNGRDMYVDQELDINRLSDYDVDHIVPQSFLKDDSIDNKVLTRSDKARGKSDNVPSEEVVKKMKNYWRQLLNAKLITQRKFDNLTKAERGGLSELDKAGFIKRQLVETRQITKHVAQILDSRMNTKYDENDKLIREVKVITLKSKLVSDFRKDFQFYKVREINNYHHAHDAYLNAVVGTALIKKYPKLESEFVYGDYKVYDVRKMIAKSEQEIGKATAKYFFYSNIMNFFKTEITLANGEIRKRPLIETNGETGEIVWDKGRDFATVRKVLSMPQVNIVKKTEVQTGGFSKESILPKRNSDKLIARKKDWDPKKYGGFDSPTVAYSVLVVAKVEKGKSKKLKSVKELLGITIMERSSFEKNPIDFLEAKGYKEVKKDLIIKLPKYSLFELENGRKRMLASAGELQKGNELALPSKYVNFLYLASHYEKLKGSPEDNEQKQLFVEQHKHYLDEIIEQISEFSKRVILADANLDKVLSAYNKHRDKPIREQAENIIHLFTLTNLGAPAAFKYFDTTIDRKRYTSTKEVLDATLIHQSITGLYETRIDLSQLGGDGGEAAAKGSSGGTLQLEEEYRLFEPESTQKQEMDIWLKNFPQAWAETGGMGTAHCQAPVLIQLKATATPISIRQYPMPHEAYQGIKPHIRRMLDQGILKPCQSPWNTPLLPVKKPGTEDYRPVQDLREVNKRVEDIHPTVPNPYNLLSTLPPSHPWYTVLDLKDAFFCLRLHSESQLLFAFEWRDPEIGLSGQLTWTRLPQGFKNSPTLFNEALHSDLADFRVRYPALVLLQYVDDLLLAAATRTECLEGTKALLETLGNKGYRASAKKAQICLQEVTYLGYSLKDGQRWLTKARKEAILSIPVPKNSRQVREFLGKAGYCRLFIPGFAELAAPLYPLTRPGTLFQWGTEQQLAFEDIKKALLSSPALGLPDITKPFELFIDENSGFAKGVLVQKLGPWKRPVAYLSKKLDTVASGWPPCLRMVAAIAILVKDAGKLTLGQPLTILTSHPVEALVRQPPNKWLSNARMTHYQAMLLDAERVHFGPTVSLNPATLLPLPSGGNHHDCLQILAETHGTRPDLTDQPLPDADLTWYTDGSSFIRNGEREAGAAVTTESEVIWAAPLPPGTSAQRAELIALTQALKMAEGKKLTVYTDSRYAFATTHVHGEIYRRRGWLTSEGKEIKNKNEILALLEALFLPKRLSIIHCPGHQKGDSPQAKGNRLADDTAKKAATETHSSLTVLPAGKRTADGSEFEKRTADGSEFESPKKKAKVE

SEQ ID NO: 6735 - protein, 2091 aa, synthetic construct
MPAAKRVKLDGGDKKYSIGLDIGTNSVGWAVITDEYKVPSKKFKVLGNTDRHSIKKNLIGALLFDSGETAEATRLKRTARRRYTRRKNRICYLQEIFSNEMAKVDDSFFHRLEESFLVEEDKKHERHPIFGNIVDEVAYHEKYPTIYHLRKKLVDSTDKADLRLIYLALAHMIKFRGHFLIEGDLNPDNSDVDKLFIQLVQTYNQLFEENPINASGVDAKAILSARLSKSRRLENLIAQLPGEKKNGLFGNLIALSLGLTPNFKSNFDLAEDAKLQLSKDTYDDDLDNLLAQIGDQYADLFLAAKNLSDAILLSDILRVNTEITKAPLSASMIKRYDEHHQDLTLLKALVRQQLPEKYKEIFFDQSKNGYAGYIDGGASQEEFYKFIKPILEKMDGTEELLVKLNREDLLRKQRTFDNGSIPHQIHLGELHAILRRQEDFYPFLKDNREKIEKILTFRIPYYVGPLARGNSRFAWMTRKSEETITPWNFEEVVDKGASAQSFIERMTNFDKNLPNEKVLPKHSLLYEYFTVYNELTKVKYVTEGMRKPAFLSGEQKKAIVDLLFKTNRKVTVKQLKEDYFKKIECFDSVEISGVEDRFNASLGTYHDLLKIIKDKDFLDNEENEDILEDIVLTLTLFEDREMIEERLKTYAHLFDDKVMKQLKRRRYTGWGRLSRKLINGIRDKQSGKTILDFLKSDGFANRNFMQLIHDDSLTFKEDIQKAQVSGQGDSLHEHIANLAGSPAIKKGILQTVKVVDELVKVMGRHKPENIVIEMARENQTTQKGQKNSRERMKRIEEGIKELGSQILKEHPVENTQLQNEKLYLYYLQNGRDMYVDQELDINRLSDYDVDHIVPQSFLKDDSIDNKVLTRSDKARGKSDNVPSEEVVKKMKNYWRQLLNAKLITQRKFDNLTKAERGGLSELDKAGFIKRQLVETRQITKHVAQILDSRMNTKYDENDKLIREVKVITLKSKLVSDFRKDFQFYKVREINNYHHAHDAYLNAVVGTALIKKYPKLESEFVYGDYKVYDVRKMIAKSEQEIGKATAKYFFYSNIMNFFKTEITLANGEIRKRPLIETNGETGEIVWDKGRDFATVRKVLSMPQVNIVKKTEVQTGGFSKESILPKRNSDKLIARKKDWDPKKYGGFDSPTVAYSVLVVAKVEKGKSKKLKSVKELLGITIMERSSFEKNPIDFLEAKGYKEVKKDLIIKLPKYSLFELENGRKRMLASAGELQKGNELALPSKYVNFLYLASHYEKLKGSPEDNEQKQLFVEQHKHYLDEIIEQISEFSKRVILADANLDKVLSAYNKHRDKPIREQAENIIHLFTLTNLGAPAAFKYFDTTIDRKRYTSTKEVLDATLIHQSITGLYETRIDLSQLGGDGGEAAAKGSSGGVLNLEEEYRLHEKPVPSSIDPSWLQLFPTVWAERAGMGLANQVPPVVVELRSGASPVAVRQYPMSKEAREGIRPHIQKFLDLGVLVPCRSPWNTPLLPVKKPGTNDYRPVQDLREINKRVQDIHPTVPNPYNLLSSLPPSYTWYSVLDLKDAFFCLRLHPNSQPLFAFEWKDPEKGNTGQLTWTRLPQGFKNSPTLFNEALHRDLAPFRALNPQVVLLQYVDDLLVAAPTYEDCKKGTQKLLQELSKLGYRVSAKKAQLCQREVTYLGYLLKEGKRWLTPARKATVMKIPVPTTPRQVREFLGKAGFCRLFIPGFASLAAPLYPLTKPSIPFIWTEEHQQAFDHIKKALLSAPALALPDLTKPFTLYIDERAGVARGVLTQTLGPWRRPVAYLSKKLDPVASGWPTCLKAVAAVALLLKDADKLTLGQNVTVIASHSLESIVRQPPDRWMTNARMTHYQSLLLNERVSFAPPAVLNPATLLPVESEATPVHRCSEILAEETGTRRDLEDQPLPGVPTWYTDGSSFITEGKRRAGAPIVDGKRTVWASSLPEGTSAQKAELVALTQALRLAEGKNINIYTDSRYAFATAHIHGAIYKQRGWLTSAGKDIKNKEEILALLEAIHLPRRVAIIHCPGHQRGSNPVATGNRRADEAAKQAALSTRVLAGTTKPAGKRTADGSEFEKRTADGSEFESPKKKAKVE

SEQ ID NO: 6736 - protein, 2215 aa, synthetic construct
MPAAKRVKLDGGDKKYSIGLDIGTNSVGWAVITDEYKVPSKKFKVLGNTDRHSIKKNLIGALLFDSGETAEATRLKRTARRRYTRRKNRICYLQEIFSNEMAKVDDSFFHRLEESFLVEEDKKHERHPIFGNIVDEVAYHEKYPTIYHLRKKLVDSTDKADLRLIYLALAHMIKFRGHFLIEGDLNPDNSDVDKLFIQLVQTYNQLFEENPINASGVDAKAILSARLSKSRRLENLIAQLPGEKKNGLFGNLIALSLGLTPNFKSNFDLAEDAKLQLSKDTYDDDLDNLLAQIGDQYADLFLAAKNLSDAILLSDILRVNTEITKAPLSASMIKRYDEHHQDLTLLKALVRQQLPEKYKEIFFDQSKNGYAGYIDGGASQEEFYKFIKPILEKMDGTEELLVKLNREDLLRKQRTFDNGSIPHQIHLGELHAILRRQEDFYPFLKDNREKIEKILTFRIPYYVGPLARGNSRFAWMTRKSEETITPWNFEEVVDKGASAQSFIERMTNFDKNLPNEKVLPKHSLLYEYFTVYNELTKVKYVTEGMRKPAFLSGEQKKAIVDLLFKTNRKVTVKQLKEDYFKKIECFDSVEISGVEDRFNASLGTYHDLLKIIKDKDFLDNEENEDILEDIVLTLTLFEDREMIEERLKTYAHLFDDKVMKQLKRRRYTGWGRLSRKLINGIRDKQSGKTILDFLKSDGFANRNFMQLIHDDSLTFKEDIQKAQVSGQGDSLHEHIANLAGSPAIKKGILQTVKVVDELVKVMGRHKPENIVIEMARENQTTQKGQKNSRERMKRIEEGIKELGSQILKEHPVENTQLQNEKLYLYYLQNGRDMYVDQELDINRLSDYDVDHIVPQSFLKDDSIDNKVLTRSDKARGKSDNVPSEEVVKKMKNYWRQLLNAKLITQRKFDNLTKAERGGLSELDKAGFIKRQLVETRQITKHVAQILDSRMNTKYDENDKLIREVKVITLKSKLVSDFRKDFQFYKVREINNYHHAHDAYLNAVVGTALIKKYPKLESEFVYGDYKVYDVRKMIAKSEQEIGKATAKYFFYSNIMNFFKTEITLANGEIRKRPLIETNGETGEIVWDKGRDFATVRKVLSMPQVNIVKKTEVQTGGFSKESILPKRNSDKLIARKKDWDPKKYGGFDSPTVAYSVLVVAKVEKGKSKKLKSVKELLGITIMERSSFEKNPIDFLEAKGYKEVKKDLIIKLPKYSLFELENGRKRMLASAGELQKGNELALPSKYVNFLYLASHYEKLKGSPEDNEQKQLFVEQHKHYLDEIIEQISEFSKRVILADANLDKVLSAYNKHRDKPIREQAENIIHLFTLTNLGAPAAFKYFDTTIDRKRYTSTKEVLDATLIHQSITGLYETRIDLSQLGGDGGEAAAKGSSGGTLGDQGSRGSDPLPEPRVTLTVEGIPTEFLVNTGAEHSVLTKPMGKMGSKRTVVAGATGSKVYPWTTKRLLKIGQKQVTHSFLVIPECPAPLLGRDLLTKLKAQIQFSTEGPQVTWEDRPAMCLVLNLEEEYRLHEKPVPPSIDPSWLQLFPMVWAEKAGMGLANQVPPVVVELKSDASPVAVRQYPMSKEAREGIRPHIQRFLDLGILVPCQSPWNTPLLPVKKPGTNDYRPVQDLREVNKRVQDIHPTVPNPYNLLSSLPPSHTWYSVLDLKDAFFCLKLHPNSQPLFAFEWRDPEKGNTGQLTWTRLPQGFKNSPTLFNEALHRDLASFRALNPQVVMLQYVDDLLVAAPTYRDCKEGTRRLLQELSKLGYRVSAKKAQLCREEVTYLGYLLKGGKRWLTPARKATVMKIPTPTTPRQVREFLGKAGFCRLFIPGFASLAAPLYPLTRPKVPFTWTEAHQEAFGRIKEALLSAPALALPDLTKPFALYVDEKEGVARGVLTQTLGPWRRPVAYLSKKLDPVASGWPTCLKAIAAVALLLKDADKLTLGQNVLVIAPHNLESIVRQPPDRWMTNARMTHYQSLLLNERVSFAPPAILNPATLLPVESDDTPIHICSEILAEETGTRPDLRDQPLPGVPAWYTDGSSFIMDGRRQAGAAIVDNKRTVWASNLPEGTSAQKAELIALTQALRLAEGKSINIYTDSRYAFATAHVHGAIYKQRGWLTSAGKDIKNKEEILALLEAIHLPKRVAIIHCPGHQRGTDPVATGNRKADEAAKQAAQSTRILTETTKNAGKRTADGSEFEKRTADGSEFESPKKKAKVE

SEQ ID NO: 6737 - protein, 2093 aa, synthetic construct
MPAAKRVKLDGGDKKYSIGLDIGTNSVGWAVITDEYKVPSKKFKVLGNTDRHSIKKNLIGALLFDSGETAEATRLKRTARRRYTRRKNRICYLQEIFSNEMAKVDDSFFHRLEESFLVEEDKKHERHPIFGNIVDEVAYHEKYPTIYHLRKKLVDSTDKADLRLIYLALAHMIKFRGHFLIEGDLNPDNSDVDKLFIQLVQTYNQLFEENPINASGVDAKAILSARLSKSRRLENLIAQLPGEKKNGLFGNLIALSLGLTPNFKSNFDLAEDAKLQLSKDTYDDDLDNLLAQIGDQYADLFLAAKNLSDAILLSDILRVNTEITKAPLSASMIKRYDEHHQDLTLLKALVRQQLPEKYKEIFFDQSKNGYAGYIDGGASQEEFYKFIKPILEKMDGTEELLVKLNREDLLRKQRTFDNGSIPHQIHLGELHAILRRQEDFYPFLKDNREKIEKILTFRIPYYVGPLARGNSRFAWMTRKSEETITPWNFEEVVDKGASAQSFIERMTNFDKNLPNEKVLPKHSLLYEYFTVYNELTKVKYVTEGMRKPAFLSGEQKKAIVDLLFKTNRKVTVKQLKEDYFKKIECFDSVEISGVEDRFNASLGTYHDLLKIIKDKDFLDNEENEDILEDIVLTLTLFEDREMIEERLKTYAHLFDDKVMKQLKRRRYTGWGRLSRKLINGIRDKQSGKTILDFLKSDGFANRNFMQLIHDDSLTFKEDIQKAQVSGQGDSLHEHIANLAGSPAIKKGILQTVKVVDELVKVMGRHKPENIVIEMARENQTTQKGQKNSRERMKRIEEGIKELGSQILKEHPVENTQLQNEKLYLYYLQNGRDMYVDQELDINRLSDYDVDHIVPQSFLKDDSIDNKVLTRSDKARGKSDNVPSEEVVKKMKNYWRQLLNAKLITQRKFDNLTKAERGGLSELDKAGFIKRQLVETRQITKHVAQILDSRMNTKYDENDKLIREVKVITLKSKLVSDFRKDFQFYKVREINNYHHAHDAYLNAVVGTALIKKYPKLESEFVYGDYKVYDVRKMIAKSEQEIGKATAKYFFYSNIMNFFKTEITLANGEIRKRPLIETNGETGEIVWDKGRDFATVRKVLSMPQVNIVKKTEVQTGGFSKESILPKRNSDKLIARKKDWDPKKYGGFDSPTVAYSVLVVAKVEKGKSKKLKSVKELLGITIMERSSFEKNPIDFLEAKGYKEVKKDLIIKLPKYSLFELENGRKRMLASAGELQKGNELALPSKYVNFLYLASHYEKLKGSPEDNEQKQLFVEQHKHYLDEIIEQISEFSKRVILADANLDKVLSAYNKHRDKPIREQAENIIHLFTLTNLGAPAAFKYFDTTIDRKRYTSTKEVLDATLIHQSITGLYETRIDLSQLGGDGGEAAAKGSSGGTLNLEDEYRLYETSAEPEVSPGSTWLSDFPQAWAETGGMGLAVRQAPLIIPLKATSTPVSIKQYPMSQEAKLGIKPHIQRLLDQGILVPCQSPWNTPLLPVKKPGTNDYRPVQDLREVNKRVEDIHPTVPNPYNLLSGLPPSHRWYTVLDLKDAFFCLRLHPTSQPLFAFEWRDPGMGISGQLTWTRLPQGFKNSPTLFNEALHRDLADFRIQHPDLILLQYVDDILLAATSELDCQQGTRALLLTLGNLGYRASAKKAQLCQKQVKYLGYLLKEGQRWLTEARKETVMGQPTPKTPRQLREFLGTAGFCRLWIPGFAEMAAPLYPLTKPGTLFNWGPDQQKAYQEIKQALLTAPALGLPDLTKPFELFVDEKQGYAKGVLTQKLGPWRRPVAYLSKKLDPVAAGWPPCLRMVAAIAVLRKDAGKLTMGQPLVILAPHAVEALVKQPPDRWLSNARMTHYQAMLLDTDRVQFGPVVALNPATLLPLPEEGAPHDCLEILAETHGTRPDLTDQPIPDADHTWYTDGSSFLQEGQRKAGAAVTTETEVIWARALPAGTSAQRAELIALTQALKMAEGKRLNVYTDSRYAFATAHIHGEIYRRRGWLTSEGREIKNKSEILALLKALFLPKRLSIIHCLGHQKGDSAEARGNRLADQAAREAAIKTPPDTSTLLAGKRTADGSEFEKRTADGSEFESPKKKAKVE

SEQ ID NO: 6738 - protein, 2093 aa, synthetic construct; identical to SEQ ID NO: 4512

SEQ ID NO: 6739 - protein, 2093 aa, synthetic construct
MPAAKRVKLDGGDKKYSIGLDIGTNSVGWAVITDEYKVPSKKFKVLGNTDRHSIKKNLIGALLFDSGETAEATRLKRTARRRYTRRKNRICYLQEIFSNEMAKVDDSFFHRLEESFLVEEDKKHERHPIFGNIVDEVAYHEKYPTIYHLRKKLVDSTDKADLRLIYLALAHMIKFRGHFLIEGDLNPDNSDVDKLFIQLVQTYNQLFEENPINASGVDAKAILSARLSKSRRLENLIAQLPGEKKNGLFGNLIALSLGLTPNFKSNFDLAEDAKLQLSKDTYDDDLDNLLAQIGDQYADLFLAAKNLSDAILLSDILRVNTEITKAPLSASMIKRYDEHHQDLTLLKALVRQQLPEKYKEIFFDQSKNGYAGYIDGGASQEEFYKFIKPILEKMDGTEELLVKLNREDLLRKQRTFDNGSIPHQIHLGELHAILRRQEDFYPFLKDNREKIEKILTFRIPYYVGPLARGNSRFAWMTRKSEETITPWNFEEVVDKGASAQSFIERMTNFDKNLPNEKVLPKHSLLYEYFTVYNELTKVKYVTEGMRKPAFLSGEQKKAIVDLLFKTNRKVTVKQLKEDYFKKIECFDSVEISGVEDRFNASLGTYHDLLKIIKDKDFLDNEENEDILEDIVLTLTLFEDREMIEERLKTYAHLFDDKVMKQLKRRRYTGWGRLSRKLINGIRDKQSGKTILDFLKSDGFANRNFMQLIHDDSLTFKEDIQKAQVSGQGDSLHEHIANLAGSPAIKKGILQTVKVVDELVKVMGRHKPENIVIEMARENQTTQKGQKNSRERMKRIEEGIKELGSQILKEHPVENTQLQNEKLYLYYLQNGRDMYVDQELDINRLSDYDVDHIVPQSFLKDDSIDNKVLTRSDKARGKSDNVPSEEVVKKMKNYWRQLLNAKLITQRKFDNLTKAERGGLSELDKAGFIKRQLVETRQITKHVAQILDSRMNTKYDENDKLIREVKVITLKSKLVSDFRKDFQFYKVREINNYHHAHDAYLNAVVGTALIKKYPKLESEFVYGDYKVYDVRKMIAKSEQEIGKATAKYFFYSNIMNFFKTEITLANGEIRKRPLIETNGETGEIVWDKGRDFATVRKVLSMPQVNIVKKTEVQTGGFSKESILPKRNSDKLIARKKDWDPKKYGGFDSPTVAYSVLVVAKVEKGKSKKLKSVKELLGITIMERSSFEKNPIDFLEAKGYKEVKKDLIIKLPKYSLFELENGRKRMLASAGELQKGNELALPSKYVNFLYLASHYEKLKGSPEDNEQKQLFVEQHKHYLDEIIEQISEFSKRVILADANLDKVLSAYNKHRDKPIREQAENIIHLFTLTNLGAPAAFKYFDTTIDRKRYTSTKEVLDATLIHQSITGLYETRIDLSQLGGDGGEAAAKGSSGGTLGIEDEYRLHETSTEPDVSLGSTWLSDFPQAWAETGGMGLAVRQAPLIIPLKATSTPVSIQQYPMSHEARLGIKPHIQRLLDQGILVPCQSPWNTPLLPVKKPGTNDYRPVQDLREVNKRVEDIHPTVPNPYNLLSGLPPSHQWYTVLDLKDAFFCLRLHPTSQPLFAFEWRDPGMGISGQLTWTRLPQGFKNSPTLFDEALHRDLADFRIQHPDLILLQYVDDILLAATSELDCQQGTRALLQTLGDLGYRASAKKAQICQKQVKYLGYLLREGQRWLTEARKETVMGQPVPKTPRQLREFLGTAGFCRLWIPGFAEMAAPLYPLTKTGTLFSWGPDQQKAYQEIKQALLTAPALGLPDLTKPFELFVDEKQGYAKGVLTQKLGPWRRPVAYLSKKLDPVAAGWPPCLRMVAAIAVLTKDAGKLTMGQPLVILAPHAVEALVKQPPDRWLSNARMTHYQAMLLDTDRVQFGPVVALNPATLLPLPEEGAPHDCLEILAETHGTRPDLTDQPIPDADHTWYTDGSSFLQEGQRKAGAAVTTETEVIWAGALPAGTSAQRAELIALTQALKMAEGKRLNVYTDSRYAFATAHIHGEIYRRRGLLTSEGREIKNKSEILALLKALFLPKRLSIIHCLGHQKGDSAEARGNRLADQAAREAAIKTPPDTSTLLAGKRTADGSEFEKRTADGSEFESPKKKAKVE

SEQ ID NO: 6740 - protein, 2093 aa, synthetic construct
MPAAKRVKLDGGDKKYSIGLDIGTNSVGWAVITDEYKVPSKKFKVLGNTDRHSIKKNLIGALLFDSGETAEATRLKRTARRRYTRRKNRICYLQEIFSNEMAKVDDSFFHRLEESFLVEEDKKHERHPIFGNIVDEVAYHEKYPTIYHLRKKLVDSTDKADLRLIYLALAHMIKFRGHFLIEGDLNPDNSDVDKLFIQLVQTYNQLFEENPINASGVDAKAILSARLSKSRRLENLIAQLPGEKKNGLFGNLIALSLGLTPNFKSNFDLAEDAKLQLSKDTYDDDLDNLLAQIGDQYADLFLAAKNLSDAILLSDILRVNTEITKAPLSASMIKRYDEHHQDLTLLKALVRQQLPEKYKEIFFDQSKNGYAGYIDGGASQEEFYKFIKPILEKMDGTEELLVKLNREDLLRKQRTFDNGSIPHQIHLGELHAILRRQEDFYPFLKDNREKIEKILTFRIPYYVGPLARGNSRFAWMTRKSEETITPWNFEEVVDKGASAQSFIERMTNFDKNLPNEKVLPKHSLLYEYFTVYNELTKVKYVTEGMRKPAFLSGEQKKAIVDLLFKTNRKVTVKQLKEDYFKKIECFDSVEISGVEDRFNASLGTYHDLLKIIKDKDFLDNEENEDILEDIVLTLTLFEDREMIEERLKTYAHLFDDKVMKQLKRRRYTGWGRLSRKLINGIRDKQSGKTILDFLKSDGFANRNFMQLIHDDSLTFKEDIQKAQVSGQGDSLHEHIANLAGSPAIKKGILQTVKVVDELVKVMGRHKPENIVIEMARENQTTQKGQKNSRERMKRIEEGIKELGSQILKEHPVENTQLQNEKLYLYYLQNGRDMYVDQELDINRLSDYDVDHIVPQSFLKDDSIDNKVLTRSDKARGKSDNVPSEEVVKKMKNYWRQLLNAKLITQRKFDNLTKAERGGLSELDKAGFIKRQLVETRQITKHVAQILDSRMNTKYDENDKLIREVKVITLKSKLVSDFRKDFQFYKVREINNYHHAHDAYLNAVVGTALIKKYPKLESEFVYGDYKVYDVRKMIAKSEQEIGKATAKYFFYSNIMNFFKTEITLANGEIRKRPLIETNGETGEIVWDKGRDFATVRKVLSMPQVNIVKKTEVQTGGFSKESILPKRNSDKLIARKKDWDPKKYGGFDSPTVAYSVLVVAKVEKGKSKKLKSVKELLGITIMERSSFEKNPIDFLEAKGYKEVKKDLIIKLPKYSLFELENGRKRMLASAGELQKGNELALPSKYVNFLYLASHYEKLKGSPEDNEQKQLFVEQHKHYLDEIIEQISEFSKRVILADANLDKVLSAYNKHRDKPIREQAENIIHLFTLTNLGAPAAFKYFDTTIDRKRYTSTKEVLDATLIHQSITGLYETRIDLSQLGGDGGEAAAKGSSGGTLNIEDEYRLHEISTEPDVSPGSTWLSDFPQAWAETGGMGLAVRQAPLIIPLKATSTPVSIKQYPMSQEAKLGIKPHIQRLLDQGILVPCQSPWNTPLLPVKKPGTNDYRPVQGLREVNKRVEDIHPTVPNPYNLLSGLPTSHRWYTVLDLKDAFFCLRLHPTSQPLFASEWRDPGMGISGQLTWTRLPQGFKNSPTLFNEALHRGLADFRIQHPDLILLQYVDDLLLAATSELDCQQGTRALLKTLGNLGYRASAKKAQICQKQVKYLGYLLREGQRWLTEARKETVMGQPTPKTPRQLREFLGTAGFCRLWIPRFAEMAAPLYPLTKPGTLFNWGPDQQKAYHEIKQALLTAPALGLPDLTKPFELFVDEKQGYAKGVLTQKLGPWRRPVAYLSKKLDPVAAGWPPCLRMVAAIAVLTKDAGKLTMGQPLVILAPHAVEALVKQPPDRWLSNARMTHYQAMLLDTDRVQFGPVVALNPATLLPLPEEGAPHDCLEILAETHGTEPDLTDQPIPDADHTWYTDGSSFLQEGQRKAGAAVTTETEVIWARALPAGTSAQRAELIALTQALKMAEGKRLNVYTDSRYAFATAHIHGEIYKRRGWLTSEGREIKNKSEILALLKALFLPKRLSIIHCLGHQKGDSAEARGNRLADQAAREAAIKTPPDTSTLLAGKRTADGSEFEKRTADGSEFESPKKKAKVE

SEQ ID NO: 6741 - protein, 2087 aa, synthetic construct
MPAAKRVKLDGGDKKYSIGLDIGTNSVGWAVITDEYKVPSKKFKVLGNTDRHSIKKNLIGALLFDSGETAEATRLKRTARRRYTRRKNRICYLQEIFSNEMAKVDDSFFHRLEESFLVEEDKKHERHPIFGNIVDEVAYHEKYPTIYHLRKKLVDSTDKADLRLIYLALAHMIKFRGHFLIEGDLNPDNSDVDKLFIQLVQTYNQLFEENPINASGVDAKAILSARLSKSRRLENLIAQLPGEKKNGLFGNLIALSLGLTPNFKSNFDLAEDAKLQLSKDTYDDDLDNLLAQIGDQYADLFLAAKNLSDAILLSDILRVNTEITKAPLSASMIKRYDEHHQDLTLLKALVRQQLPEKYKEIFFDQSKNGYAGYIDGGASQEEFYKFIKPILEKMDGTEELLVKLNREDLLRKQRTFDNGSIPHQIHLGELHAILRRQEDFYPFLKDNREKIEKILTFRIPYYVGPLARGNSRFAWMTRKSEETITPWNFEEVVDKGASAQSFIERMTNFDKNLPNEKVLPKHSLLYEYFTVYNELTKVKYVTEGMRKPAFLSGEQKKAIVDLLFKTNRKVTVKQLKEDYFKKIECFDSVEISGVEDRFNASLGTYHDLLKIIKDKDFLDNEENEDILEDIVLTLTLFEDREMIEERLKTYAHLFDDKVMKQLKRRRYTGWGRLSRKLINGIRDKQSGKTILDFLKSDGFANRNFMQLIHDDSLTFKEDIQKAQVSGQGDSLHEHIANLAGSPAIKKGILQTVKVVDELVKVMGRHKPENIVIEMARENQTTQKGQKNSRERMKRIEEGIKELGSQILKEHPVENTQLQNEKLYLYYLQNGRDMYVDQELDINRLSDYDVDHIVPQSFLKDDSIDNKVLTRSDKARGKSDNVPSEEVVKKMKNYWRQLLNAKLITQRKFDNLTKAERGGLSELDKAGFIKRQLVETRQITKHVAQILDSRMNTKYDENDKLIREVKVITLKSKLVSDFRKDFQFYKVREINNYHHAHDAYLNAVVGTALIKKYPKLESEFVYGDYKVYDVRKMIAKSEQEIGKATAKYFFYSNIMNFFKTEITLANGEIRKRPLIETNGETGEIVWDKGRDFATVRKVLSMPQVNIVKKTEVQTGGFSKESILPKRNSDKLIARKKDWDPKKYGGFDSPTVAYSVLVVAKVEKGKSKKLKSVKELLGITIMERSSFEKNPIDFLEAKGYKEVKKDLIIKLPKYSLFELENGRKRMLASAGELQKGNELALPSKYVNFLYLASHYEKLKGSPEDNEQKQLFVEQHKHYLDEIIEQISEFSKRVILADANLDKVLSAYNKHRDKPIREQAENIIHLFTLTNLGAPAAFKYFDTTIDRKRYTSTKEVLDATLIHQSITGLYETRIDLSQLGGDGGEAAAKGSSGGTLQLDDEYRLYSPLVKPDQNIQFWLEQFPQAWAETAGMGLAKQVPPQVIQLKASATPVSVRQYPLSKEAQEGIRPHVQRLIQQGILVPVQSPWNTPLLPVRKPGTNDYRPVQDLREVNKRVQDIHPTVPNPYNLLCALPPQRSWYTVLDLKDAFFCLRLHPTSQPLFAFEWRDPGTGRTGQLTWTRLPQGFKNSPTIFDEALHRDLANFRIQHPQVTLLQYVDDLLLAGATKQDCLEGTKALLLELSDLGYRASAKKAQICRREVTYLGYSLRDGQRWLTEARKKTVVQIPAPTTAKQVREFLGTAGFCRLWIPGFATLAAPLYPLTKEKGEFSWAPEHQKAFDAIKKALLSAPALALPDVTKPFTLYVDERKGVARGVLTQTLGPWRRPVAYLSKKLDPVASGWPVCLKAIAAVAILVKDADKLTLGQNITVIAPHALENIVRQPPDRWMTNARMTHYQSLLLTERVTFAPPAALNPATLLPEETDEPVTHDCHQLLIEETGVRKDLTDIPLTGEVLTWFTDGSSYVVEGKRMAGAAVVDGTRTIWASSLPEGTSAQKAELMALTQALRLAEGKSINIYTDSRYAFATAHVHGAIYKQRGLLTSAGREIKNKEEILSLLEALHLPKRLAIIHCPGHQKAKDPISRGNQMADRVAKQAAQGVNLLAGKRTADGSEFEKRTADGSEFESPKKKAKVE

SEQ ID NO: 6742 - protein, 2014 aa, synthetic construct
MPAAKRVKLDGGDKKYSIGLDIGTNSVGWAVITDEYKVPSKKFKVLGNTDRHSIKKNLIGALLFDSGETAEATRLKRTARRRYTRRKNRICYLQEIFSNEMAKVDDSFFHRLEESFLVEEDKKHERHPIFGNIVDEVAYHEKYPTIYHLRKKLVDSTDKADLRLIYLALAHMIKFRGHFLIEGDLNPDNSDVDKLFIQLVQTYNQLFEENPINASGVDAKAILSARLSKSRRLENLIAQLPGEKKNGLFGNLIALSLGLTPNFKSNFDLAEDAKLQLSKDTYDDDLDNLLAQIGDQYADLFLAAKNLSDAILLSDILRVNTEITKAPLSASMIKRYDEHHQDLTLLKALVRQQLPEKYKEIFFDQSKNGYAGYIDGGASQEEFYKFIKPILEKMDGTEELLVKLNREDLLRKQRTFDNGSIPHQIHLGELHAILRRQEDFYPFLKDNREKIEKILTFRIPYYVGPLARGNSRFAWMTRKSEETITPWNFEEVVDKGASAQSFIERMTNFDKNLPNEKVLPKHSLLYEYFTVYNELTKVKYVTEGMRKPAFLSGEQKKAIVDLLFKTNRKVTVKQLKEDYFKKIECFDSVEISGVEDRFNASLGTYHDLLKIIKDKDFLDNEENEDILEDIVLTLTLFEDREMIEERLKTYAHLFDDKVMKQLKRRRYTGWGRLSRKLINGIRDKQSGKTILDFLKSDGFANRNFMQLIHDDSLTFKEDIQKAQVSGQGDSLHEHIANLAGSPAIKKGILQTVKVVDELVKVMGRHKPENIVIEMARENQTTQKGQKNSRERMKRIEEGIKELGSQILKEHPVENTQLQNEKLYLYYLQNGRDMYVDQELDINRLSDYDVDHIVPQSFLKDDSIDNKVLTRSDKARGKSDNVPSEEVVKKMKNYWRQLLNAKLITQRKFDNLTKAERGGLSELDKAGFIKRQLVETRQITKHVAQILDSRMNTKYDENDKLIREVKVITLKSKLVSDFRKDFQFYKVREINNYHHAHDAYLNAVVGTALIKKYPKLESEFVYGDYKVYDVRKMIAKSEQEIGKATAKYFFYSNIMNFFKTEITLANGEIRKRPLIETNGETGEIVWDKGRDFATVRKVLSMPQVNIVKKTEVQTGGFSKESILPKRNSDKLIARKKDWDPKKYGGFDSPTVAYSVLVVAKVEKGKSKKLKSVKELLGITIMERSSFEKNPIDFLEAKGYKEVKKDLIIKLPKYSLFELENGRKRMLASAGELQKGNELALPSKYVNFLYLASHYEKLKGSPEDNEQKQLFVEQHKHYLDEIIEQISEFSKRVILADANLDKVLSAYNKHRDKPIREQAENIIHLFTLTNLGAPAAFKYFDTTIDRKRYTSTKEVLDATLIHQSITGLYETRIDLSQLGGDGGEAAAKGSSGGPRSRAIDIPVPHADKISWKITDPVWVDQWPLTYEKTLAAIALVQEQLAAGHIEPTNSPWNTPIFIIKKKSGSWRLLQDLRAVNKVMVPMGALQPGLPSPVAPPLNYHKIVIDLKDCFFTIPLHPEDRPYFAFSVPQINFQSPMPRYQWKVLPQGMANSPTLCQKFVAAAIAPVRSQWPEAYILHYMDDILLACDSAEAAKACYAHIISCLTSYGLKIAPDKVQVSEPFSYLGFELHHQQVFTPRVCLKTDHLKTLNDFQKLLGDIQWLRPYLKLPTSALVPLNNILKPDPNPLSVRALTPEAKQSLALINKAIQNQSVQQISYNLPLVLLLLPTPHTPTAVFWQPNGTDPTKNGSPLLWLHLPASPSKVLLTYPSLLAMLIIKGRYTGRQLFGRDPHSIIIPYTQDQLTWLLQTSDEWAIALSSFTGDIDNHYPSDPVIQFAKLHQFIFPKITKCAPIPQATLVFTDGSSNGIAAYVIDNQPISIKSPYLSAQLVELYAILQVFTVLAHQPFNLYTDSAYIAQSVPLLETVPFIKSSTNATPLFSKLQQLILNRQHPFFIGHLRAHLNLPGPLAEGNALADAATQIFPIISDAGKRTADGSEFEKRTADGSEFESPKKKAKVE

SEQ ID NO: 6743 - protein, 2072 aa, synthetic construct
MPAAKRVKLDGGDKKYSIGLDIGTNSVGWAVITDEYKVPSKKFKVLGNTDRHSIKKNLIGALLFDSGETAEATRLKRTARRRYTRRKNRICYLQEIFSNEMAKVDDSFFHRLEESFLVEEDKKHERHPIFGNIVDEVAYHEKYPTIYHLRKKLVDSTDKADLRLIYLALAHMIKFRGHFLIEGDLNPDNSDVDKLFIQLVQTYNQLFEENPINASGVDAKAILSARLSKSRRLENLIAQLPGEKKNGLFGNLIALSLGLTPNFKSNFDLAEDAKLQLSKDTYDDDLDNLLAQIGDQYADLFLAAKNLSDAILLSDILRVNTEITKAPLSASMIKRYDEHHQDLTLLKALVRQQLPEKYKEIFFDQSKNGYAGYIDGGASQEEFYKFIKPILEKMDGTEELLVKLNREDLLRKQRTFDNGSIPHQIHLGELHAILRRQEDFYPFLKDNREKIEKILTFRIPYYVGPLARGNSRFAWMTRKSEETITPWNFEEVVDKGASAQSFIERMTNFDKNLPNEKVLPKHSLLYEYFTVYNELTKVKYVTEGMRKPAFLSGEQKKAIVDLLFKTNRKVTVKQLKEDYFKKIECFDSVEISGVEDRFNASLGTYHDLLKIIKDKDFLDNEENEDILEDIVLTLTLFEDREMIEERLKTYAHLFDDKVMKQLKRRRYTGWGRLSRKLINGIRDKQSGKTILDFLKSDGFANRNFMQLIHDDSLTFKEDIQKAQVSGQGDSLHEHIANLAGSPAIKKGILQTVKVVDELVKVMGRHKPENIVIEMARENQTTQKGQKNSRERMKRIEEGIKELGSQILKEHPVENTQLQNEKLYLYYLQNGRDMYVDQELDINRLSDYDVDHIVPQSFLKDDSIDNKVLTRSDKARGKSDNVPSEEVVKKMKNYWRQLLNAKLITQRKFDNLTKAERGGLSELDKAGFIKRQLVETRQITKHVAQILDSRMNTKYDENDKLIREVKVITLKSKLVSDFRKDFQFYKVREINNYHHAHDAYLNAVVGTALIKKYPKLESEFVYGDYKVYDVRKMIAKSEQEIGKATAKYFFYSNIMNFFKTEITLANGEIRKRPLIETNGETGEIVWDKGRDFATVRKVLSMPQVNIVKKTEVQTGGFSKESILPKRNSDKLIARKKDWDPKKYGGFDSPTVAYSVLVVAKVEKGKSKKLKSVKELLGITIMERSSFEKNPIDFLEAKGYKEVKKDLIIKLPKYSLFELENGRKRMLASAGELQKGNELALPSKYVNFLYLASHYEKLKGSPEDNEQKQLFVEQHKHYLDEIIEQISEFSKRVILADANLDKVLSAYNKHRDKPIREQAENIIHLFTLTNLGAPAAFKYFDTTIDRKRYTSTKEVLDATLIHQSITGLYETRIDLSQLGGDGGEAAAKGSSGGSCQTKNTLNIDEYLLQFPDQLWASLPTDIGRMLVPPITIKIKDNASLPSIRQYPLPKDKTEGLRPLISSLENQGILIKCHSPCNTPIFPIKKAGRDEYRMIHDLRAINNIVAPLTAVVASPTTVLSNLAPSLHWFTVIDLSNAFFSVPIHKDSQYLFAFTFEGHQYTWTVLPQGFIHSPTLFSQALYQSLHKIKFKISSEICIYMDDVLIASKDRDTNLKDTAVMLQHLASEGHKVSKKKLQLCQQEVVYLGQLLTPEGRKILPDRKVTVSQFQQPTTIRQIRAFLGLVGYCRHWIPEFSIHSKFLEKQLKKDTAEPFQLDDQQVEAFNKLKHAITTAPVLVVPDPAKPFQLYTSHSEHASIAVLTQKHAGRTRPIAFLSSKFDAIESGLPPCLKACASIHRSLTQADSFILGAPLIIYTTHAICTLLQRDRSQLVTASRFSKWEADLLRPELTFVACSAVSPAHLYMQSCENNIPPHDCVLLTHTISRPRPDLSDLPIPDPDMTLFSDGSYTTGRGGAAVVMHRPVTDDFIIIHQQPGGASAQTAELLALAAACHLATDKTVNIYTDSRYAYGVVHDFGHLWMHRGFVTSAGTPIKNHKEIEYLLKQIMKPKQVSVIKIEAHTKGVSMEVRGNAAADEAAKNAVFLVQRAGKRTADGSEFEKRTADGSEFESPKKKAKVE

SEQ ID NO: 6744 - protein, 2093 aa, synthetic construct
MPAAKRVKLDGGDKKYSIGLDIGTNSVGWAVITDEYKVPSKKFKVLGNTDRHSIKKNLIGALLFDSGETAEATRLKRTARRRYTRRKNRICYLQEIFSNEMAKVDDSFFHRLEESFLVEEDKKHERHPIFGNIVDEVAYHEKYPTIYHLRKKLVDSTDKADLRLIYLALAHMIKFRGHFLIEGDLNPDNSDVDKLFIQLVQTYNQLFEENPINASGVDAKAILSARLSKSRRLENLIAQLPGEKKNGLFGNLIALSLGLTPNFKSNFDLAEDAKLQLSKDTYDDDLDNLLAQIGDQYADLFLAAKNLSDAILLSDILRVNTEITKAPLSASMIKRYDEHHQDLTLLKALVRQQLPEKYKEIFFDQSKNGYAGYIDGGASQEEFYKFIKPILEKMDGTEELLVKLNREDLLRKQRTFDNGSIPHQIHLGELHAILRRQEDFYPFLKDNREKIEKILTFRIPYYVGPLARGNSRFAWMTRKSEETITPWNFEEVVDKGASAQSFIERMTNFDKNLPNEKVLPKHSLLYEYFTVYNELTKVKYVTEGMRKPAFLSGEQKKAIVDLLFKTNRKVTVKQLKEDYFKKIECFDSVEISGVEDRFNASLGTYHDLLKIIKDKDFLDNEENEDILEDIVLTLTLFEDREMIEERLKTYAHLFDDKVMKQLKRRRYTGWGRLSRKLINGIRDKQSGKTILDFLKSDGFANRNFMQLIHDDSLTFKEDIQKAQVSGQGDSLHEHIANLAGSPAIKKGILQTVKVVDELVKVMGRHKPENIVIEMARENQTTQKGQKNSRERMKRIEEGIKELGSQILKEHPVENTQLQNEKLYLYYLQNGRDMYVDQELDINRLSDYDVDHIVPQSFLKDDSIDNKVLTRSDKARGKSDNVPSEEVVKKMKNYWRQLLNAKLITQRKFDNLTKAERGGLSELDKAGFIKRQLVETRQITKHVAQILDSRMNTKYDENDKLIREVKVITLKSKLVSDFRKDFQFYKVREINNYHHAHDAYLNAVVGTALIKKYPKLESEFVYGDYKVYDVRKMIAKSEQEIGKATAKYFFYSNIMNFFKTEITLANGEIRKRPLIETNGETGEIVWDKGRDFATVRKVLSMPQVNIVKKTEVQTGGFSKESILPKRNSDKLIARKKDWDPKKYGGFDSPTVAYSVLVVAKVEKGKSKKLKSVKELLGITIMERSSFEKNPIDFLEAKGYKEVKKDLIIKLPKYSLFELENGRKRMLASAGELQKGNELALPSKYVNFLYLASHYEKLKGSPEDNEQKQLFVEQHKHYLDEIIEQISEFSKRVILADANLDKVLSAYNKHRDKPIREQAENIIHLFTLTNLGAPAAFKYFDTTIDRKRYTSTKEVLDATLIHQSITGLYETRIDLSQLGGDGGEAAAKGSSGGTLNIEDEYRLHETSKEPDVPLGSTWLSDFPQAWAETGGMGLAVRQAPLIIPLKATSTPVSIKQYPMSQEARLGIKPHIQRLLDQGILVPCQSPWNTPLLPVKKPGTNDYRPVQDLREVNKRVEDIHPTVPNPYNLLSGLPPSHQWYTVLDLKDAFFCLRLHPTSQPLFAFEWRDPEMGISGQLTWTRLPQGFKNSPTLFNEALHRDLADFRIQHPDLILLQYVDDLLLAATSEQDCQRGTRALLQTLGNLGYRASAKKAQICQKQVKYLGYLLKEGQRWLTEARKETVMGQPTPKTPRQLREFLGTAGFCRLWIPGFAEMAAPLYPLTKPGTLFNWGPDQQKAYQEIKQALLTAPALGLPDLTKPFELFVDEKQGYAKGVLTQKLGPWRRPVAYLSKKLDPVAAGWPPCLRMVAAIAVLTKDAGKLTMGQPLVILAPHAVEALVKQPPDRWLSNARMTHYQAMLLDTDRVQFGPVVALNPATLLPLPEKEAPHDCLEILAETHGTRPDLTDQPIPDADYTWYTDGSSFLQEGQRRAGAAVTTETEVIWARALPAGTSAQRAELIALTQALKMAEGKKLNVYTDSRYAFATAHVHGEIYRRRGWLTSEGREIKNKNEILALLKALFLPKRLSIIHCPGHQKGNSAEARGNRMADQAAREAAMKAVLETSTLLAGKRTADGSEFEKRTADGSEFESPKKKAKVE

SEQ ID NO: 6745 - protein, 2093 aa, synthetic construct
MPAAKRVKLDGGDKKYSIGLDIGTNSVGWAVITDEYKVPSKKFKVLGNTDRHSIKKNLIGALLFDSGETAEATRLKRTARRRYTRRKNRICYLQEIFSNEMAKVDDSFFHRLEESFLVEEDKKHERHPIFGNIVDEVAYHEKYPTIYHLRKKLVDSTDKADLRLIYLALAHMIKFRGHFLIEGDLNPDNSDVDKLFIQLVQTYNQLFEENPINASGVDAKAILSARLSKSRRLENLIAQLPGEKKNGLFGNLIALSLGLTPNFKSNFDLAEDAKLQLSKDTYDDDLDNLLAQIGDQYADLFLAAKNLSDAILLSDILRVNTEITKAPLSASMIKRYDEHHQDLTLLKALVRQQLPEKYKEIFFDQSKNGYAGYIDGGASQEEFYKFIKPILEKMDGTEELLVKLNREDLLRKQRTFDNGSIPHQIHLGELHAILRRQEDFYPFLKDNREKIEKILTFRIPYYVGPLARGNSRFAWMTRKSEETITPWNFEEVVDKGASAQSFIERMTNFDKNLPNEKVLPKHSLLYEYFTVYNELTKVKYVTEGMRKPAFLSGEQKKAIVDLLFKTNRKVTVKQLKEDYFKKIECFDSVEISGVEDRFNASLGTYHDLLKIIKDKDFLDNEENEDILEDIVLTLTLFEDREMIEERLKTYAHLFDDKVMKQLKRRRYTGWGRLSRKLINGIRDKQSGKTILDFLKSDGFANRNFMQLIHDDSLTFKEDIQKAQVSGQGDSLHEHIANLAGSPAIKKGILQTVKVVDELVKVMGRHKPENIVIEMARENQTTQKGQKNSRERMKRIEEGIKELGSQILKEHPVENTQLQNEKLYLYYLQNGRDMYVDQELDINRLSDYDVDHIVPQSFLKDDSIDNKVLTRSDKARGKSDNVPSEEVVKKMKNYWRQLLNAKLITQRKFDNLTKAERGGLSELDKAGFIKRQLVETRQITKHVAQILDSRMNTKYDENDKLIREVKVITLKSKLVSDFRKDFQFYKVREINNYHHAHDAYLNAVVGTALIKKYPKLESEFVYGDYKVYDVRKMIAKSEQEIGKATAKYFFYSNIMNFFKTEITLANGEIRKRPLIETNGETGEIVWDKGRDFATVRKVLSMPQVNIVKKTEVQTGGFSKESILPKRNSDKLIARKKDWDPKKYGGFDSPTVAYSVLVVAKVEKGKSKKLKSVKELLGITIMERSSFEKNPIDFLEAKGYKEVKKDLIIKLPKYSLFELENGRKRMLASAGELQKGNELALPSKYVNFLYLASHYEKLKGSPEDNEQKQLFVEQHKHYLDEIIEQISEFSKRVILADANLDKVLSAYNKHRDKPIREQAENIIHLFTLTNLGAPAAFKYFDTTIDRKRYTSTKEVLDATLIHQSITGLYETRIDLSQLGGDGGGSSPAPGGTAPLEEEYRLFLEAPIQNVTLLEQWKREIPKVWAEINPPGLASTQAPIHVQLLSTALPVRVRQYPITLEAKRSLRETIRKFRAAGILRPVHSPWNTPLLPVRKSGTSEYRMVQDLREVNKRVETIHPTVPNPYTLLSLLPPDRIWYSVLDLKDAFFCIPLAPESQLIFAFEWADAEEGESGQLTWTRLPQGFKNSPTLFNEALNRDLQGFRLDHPSVSLLQYVDDLLIAADTQAACLSATRDLLMTLAELGYRVSGKKAQLCQEEVTYLGFKIHKGSRSLSNSRTQAILQIPVPKTKRQVREFLGTIGYCRLWIPGFAELAQPLYAATRPGNDPLVWGEKEEEAFQSLKLALTQPPALALPSLDKPFQLFVEETSGAAKGVLTQALGPWKRPVAYLSKRLDPVAAGWPRCLRAIAAAALLTREASKLTFGQDIEITSSHNLESLLRSPPDKWLTNARITQYQVLLLDPPRVRFKQTAALNPATLLPETDDTLPIHHCLDTLDSLTSTRPDLTDQPLAQAEATLFTDGSSYIRDGKRYAGAAVVTLDSVIWAEPLPIGTSAQKAELIALTKALEWSKDKSVNIYTDSRYAFATLHVHGMIYRERGWLTAGGKAIKNAPEILALLTAVWLPKRVAVMHCKGHQKDDAPTSTGNRRADEVAREVAIRPLSTQATISAGKRTADGSEFEKRTADGSEFESPKKKAKVE

SEQ ID NO: 6746 - protein, 2097 aa, synthetic construct
MPAAKRVKLDGGDKKYSIGLDIGTNSVGWAVITDEYKVPSKKFKVLGNTDRHSIKKNLIGALLFDSGETAEATRLKRTARRRYTRRKNRICYLQEIFSNEMAKVDDSFFHRLEESFLVEEDKKHERHPIFGNIVDEVAYHEKYPTIYHLRKKLVDSTDKADLRLIYLALAHMIKFRGHFLIEGDLNPDNSDVDKLFIQLVQTYNQLFEENPINASGVDAKAILSARLSKSRRLENLIAQLPGEKKNGLFGNLIALSLGLTPNFKSNFDLAEDAKLQLSKDTYDDDLDNLLAQIGDQYADLFLAAKNLSDAILLSDILRVNTEITKAPLSASMIKRYDEHHQDLTLLKALVRQQLPEKYKEIFFDQSKNGYAGYIDGGASQEEFYKFIKPILEKMDGTEELLVKLNREDLLRKQRTFDNGSIPHQIHLGELHAILRRQEDFYPFLKDNREKIEKILTFRIPYYVGPLARGNSRFAWMTRKSEETITPWNFEEVVDKGASAQSFIERMTNFDKNLPNEKVLPKHSLLYEYFTVYNELTKVKYVTEGMRKPAFLSGEQKKAIVDLLFKTNRKVTVKQLKEDYFKKIECFDSVEISGVEDRFNASLGTYHDLLKIIKDKDFLDNEENEDILEDIVLTLTLFEDREMIEERLKTYAHLFDDKVMKQLKRRRYTGWGRLSRKLINGIRDKQSGKTILDFLKSDGFANRNFMQLIHDDSLTFKEDIQKAQVSGQGDSLHEHIANLAGSPAIKKGILQTVKVVDELVKVMGRHKPENIVIEMARENQTTQKGQKNSRERMKRIEEGIKELGSQILKEHPVENTQLQNEKLYLYYLQNGRDMYVDQELDINRLSDYDVDHIVPQSFLKDDSIDNKVLTRSDKARGKSDNVPSEEVVKKMKNYWRQLLNAKLITQRKFDNLTKAERGGLSELDKAGFIKRQLVETRQITKHVAQILDSRMNTKYDENDKLIREVKVITLKSKLVSDFRKDFQFYKVREINNYHHAHDAYLNAVVGTALIKKYPKLESEFVYGDYKVYDVRKMIAKSEQEIGKATAKYFFYSNIMNFFKTEITLANGEIRKRPLIETNGETGEIVWDKGRDFATVRKVLSMPQVNIVKKTEVQTGGFSKESILPKRNSDKLIARKKDWDPKKYGGFDSPTVAYSVLVVAKVEKGKSKKLKSVKELLGITIMERSSFEKNPIDFLEAKGYKEVKKDLIIKLPKYSLFELENGRKRMLASAGELQKGNELALPSKYVNFLYLASHYEKLKGSPEDNEQKQLFVEQHKHYLDEIIEQISEFSKRVILADANLDKVLSAYNKHRDKPIREQAENIIHLFTLTNLGAPAAFKYFDTTIDRKRYTSTKEVLDATLIHQSITGLYETRIDLSQLGGDGGGSSPAPGGTVSLQDEHRLFDIPVTTSLPDVWLQDFPQAWAETGGLGRAKCQAPIIIDLKPTAVPVSIKQYPMSLEAHMGIRQHIIKFLELGVLRPCRSPWNTPLLPVKKPGTQDYRPVQDLREINKRTVDIHPTVPNPYNLLSTLKPDYSWYTVLDLKDAFFCLPLAPQSQELFAFEWKDPERGISGQLTWTRLPQGFKNSPTLFNEALHRDLTDFRTQHPEVTLLQYVDDLLLAAPTKKACTQGTRHLLQELGEKGYRASAKKAQICQTKVTYLGYILSEGKRWLTPGRIETVARIPPPRNPREVREFLGKAGFCRLFIPGFAELAAPLYALTKPSTPFTWQTEHQLAFEALKKALLSAPALGLPDTSKPFTLFLDERQGIAKGVLTQKLGPWKRPVAYLSKKLDPVAAGWPPCLRIMAATAMLVKDSAKLTLGQPLTVITPHTLEAIVRQPPDRWITNARLTHYQALLLDTDRVQFGPPVTLNPATLLPVPENQPSPHDCRQVLAETHGTREDLKDQELPDADHTWYTDGSSYLDSGTRRAGAAVVDGHNTIWAQSLPPGTSAQKAELIALTKALELSKGKKANIYTDSRYAFATAHTHGSIYERRGWLTSEGKEIKNKAEIIALLKALFLPQEVAIIHCPGHQKGQDPVAVGNRQADRVARQAAMAEVLTLATEPDNTSHITAGKRTADGSEFEKRTADGSEFESPKKKAKVE

SEQ ID NO: 6747 - protein, 2082 aa, synthetic construct
MPAAKRVKLDGGDKKYSIGLDIGTNSVGWAVITDEYKVPSKKFKVLGNTDRHSIKKNLIGALLFDSGETAEATRLKRTARRRYTRRKNRICYLQEIFSNEMAKVDDSFFHRLEESFLVEEDKKHERHPIFGNIVDEVAYHEKYPTIYHLRKKLVDSTDKADLRLIYLALAHMIKFRGHFLIEGDLNPDNSDVDKLFIQLVQTYNQLFEENPINASGVDAKAILSARLSKSRRLENLIAQLPGEKKNGLFGNLIALSLGLTPNFKSNFDLAEDAKLQLSKDTYDDDLDNLLAQIGDQYADLFLAAKNLSDAILLSDILRVNTEITKAPLSASMIKRYDEHHQDLTLLKALVRQQLPEKYKEIFFDQSKNGYAGYIDGGASQEEFYKFIKPILEKMDGTEELLVKLNREDLLRKQRTFDNGSIPHQIHLGELHAILRRQEDFYPFLKDNREKIEKILTFRIPYYVGPLARGNSRFAWMTRKSEETITPWNFEEVVDKGASAQSFIERMTNFDKNLPNEKVLPKHSLLYEYFTVYNELTKVKYVTEGMRKPAFLSGEQKKAIVDLLFKTNRKVTVKQLKEDYFKKIECFDSVEISGVEDRFNASLGTYHDLLKIIKDKDFLDNEENEDILEDIVLTLTLFEDREMIEERLKTYAHLFDDKVMKQLKRRRYTGWGRLSRKLINGIRDKQSGKTILDFLKSDGFANRNFMQLIHDDSLTFKEDIQKAQVSGQGDSLHEHIANLAGSPAIKKGILQTVKVVDELVKVMGRHKPENIVIEMARENQTTQKGQKNSRERMKRIEEGIKELGSQILKEHPVENTQLQNEKLYLYYLQNGRDMYVDQELDINRLSDYDVDHIVPQSFLKDDSIDNKVLTRSDKARGKSDNVPSEEVVKKMKNYWRQLLNAKLITQRKFDNLTKAERGGLSELDKAGFIKRQLVETRQITKHVAQILDSRMNTKYDENDKLIREVKVITLKSKLVSDFRKDFQFYKVREINNYHHAHDAYLNAVVGTALIKKYPKLESEFVYGDYKVYDVRKMIAKSEQEIGKATAKYFFYSNIMNFFKTEITLANGEIRKRPLIETNGETGEIVWDKGRDFATVRKVLSMPQVNIVKKTEVQTGGFSKESILPKRNSDKLIARKKDWDPKKYGGFDSPTVAYSVLVVAKVEKGKSKKLKSVKELLGITIMERSSFEKNPIDFLEAKGYKEVKKDLIIKLPKYSLFELENGRKRMLASAGELQKGNELALPSKYVNFLYLASHYEKLKGSPEDNEQKQLFVEQHKHYLDEIIEQISEFSKRVILADANLDKVLSAYNKHRDKPIREQAENIIHLFTLTNLGAPAAFKYFDTTIDRKRYTSTKEVLDATLIHQSITGLYETRIDLSQLGGDGGGSSPAPGGVPWILKKPLELTIKLDLEEQQGTLLNNSILSKKGKEELKQLFEKYSALWQSWENQVGHRRIRPHKIATGTVKPTPQKQYHINPKAKPDIQIVINDLLKQGVLIQKESTMNTPVYPVPKPNGRWRMVLDYRAVNKVTPLIAVQNQHSYGILGSLFKGRYKTTIDLSNGFWAHPIVPEDYWITAFTWQGKQYCWTVLPQGFLNSPGLFTGDVVDLLQGIPNVEVYVDDVYISHDSEKEHLEYLDILFNRLKEAGYIISLKKSNIANSIVDFLGFQITNEGRGLTDTFKEKLENITAPTTLKQLQSILGLLNFARNFIPDFTELIAPLYALIPKSTKNYVPWQIEHSTTLETLITKLNGAEYLQGRKGDKTLIMKVNASYTTGYIRYYNEGEKKPISYVSIVFSKTELKFTELEKLLTTVHKGLLKALDLSMGQNIHVYSPIVSMQNIQKTPQTAKKALASRWLSWLSYLEDPRIRFFYDPQMPALKDLPAVDTGKDNKKHPSNFQHIFYTDGSAITSPTKEGHLNAGMGIVYFINKDGNLQKQQEWSISLGNHTAQFAEIAAFEFALKKCLPLGGNILVVTDSNYVAKAYNEELDVWASNGFVNNRKKPLKHISKWKSVADLKRLRPDVVVTHEPGHQKLDSSPHAYGNNLADQLATQASFKVHAGKRTADGSEFEKRTADGSEFESPKKKAKVE

SEQ ID NO: 6748 - protein, 2090 aa, synthetic construct
MPAAKRVKLDGGDKKYSIGLDIGTNSVGWAVITDEYKVPSKKFKVLGNTDRHSIKKNLIGALLFDSGETAEATRLKRTARRRYTRRKNRICYLQEIFSNEMAKVDDSFFHRLEESFLVEEDKKHERHPIFGNIVDEVAYHEKYPTIYHLRKKLVDSTDKADLRLIYLALAHMIKFRGHFLIEGDLNPDNSDVDKLFIQLVQTYNQLFEENPINASGVDAKAILSARLSKSRRLENLIAQLPGEKKNGLFGNLIALSLGLTPNFKSNFDLAEDAKLQLSKDTYDDDLDNLLAQIGDQYADLFLAAKNLSDAILLSDILRVNTEITKAPLSASMIKRYDEHHQDLTLLKALVRQQLPEKYKEIFFDQSKNGYAGYIDGGASQEEFYKFIKPILEKMDGTEELLVKLNREDLLRKQRTFDNGSIPHQIHLGELHAILRRQEDFYPFLKDNREKIEKILTFRIPYYVGPLARGNSRFAWMTRKSEETITPWNFEEVVDKGASAQSFIERMTNFDKNLPNEKVLPKHSLLYEYFTVYNELTKVKYVTEGMRKPAFLSGEQKKAIVDLLFKTNRKVTVKQLKEDYFKKIECFDSVEISGVEDRFNASLGTYHDLLKIIKDKDFLDNEENEDILEDIVLTLTLFEDREMIEERLKTYAHLFDDKVMKQLKRRRYTGWGRLSRKLINGIRDKQSGKTILDFLKSDGFANRNFMQLIHDDSLTFKEDIQKAQVSGQGDSLHEHIANLAGSPAIKKGILQTVKVVDELVKVMGRHKPENIVIEMARENQTTQKGQKNSRERMKRIEEGIKELGSQILKEHPVENTQLQNEKLYLYYLQNGRDMYVDQELDINRLSDYDVDHIVPQSFLKDDSIDNKVLTRSDKARGKSDNVPSEEVVKKMKNYWRQLLNAKLITQRKFDNLTKAERGGLSELDKAGFIKRQLVETRQITKHVAQILDSRMNTKYDENDKLIREVKVITLKSKLVSDFRKDFQFYKVREINNYHHAHDAYLNAVVGTALIKKYPKLESEFVYGDYKVYDVRKMIAKSEQEIGKATAKYFFYSNIMNFFKTEITLANGEIRKRPLIETNGETGEIVWDKGRDFATVRKVLSMPQVNIVKKTEVQTGGFSKESILPKRNSDKLIARKKDWDPKKYGGFDSPTVAYSVLVVAKVEKGKSKKLKSVKELLGITIMERSSFEKNPIDFLEAKGYKEVKKDLIIKLPKYSLFELENGRKRMLASAGELQKGNELALPSKYVNFLYLASHYEKLKGSPEDNEQKQLFVEQHKHYLDEIIEQISEFSKRVILADANLDKVLSAYNKHRDKPIREQAENIIHLFTLTNLGAPAAFKYFDTTIDRKRYTSTKEVLDATLIHQSITGLYETRIDLSQLGGDGGGSSPAPGGTLQLEEEYRLFEPESTQKQEMDIWLKNFPQAWAETGGMGTAHCQAPVLIQLKATATPISIRQYPMPHEAYQGIKPHIRRMLDQGILKPCQSPWNTPLLPVKKPGTEDYRPVQDLREVNKRVEDIHPTVPNPYNLLSTLPPSHPWYTVLDLKDAFFCLRLHSESQLLFAFEWRDPEIGLSGQLTWTRLPQGFKNSPTLFNEALHSDLADFRVRYPALVLLQYVDDLLLAAATRTECLEGTKALLETLGNKGYRASAKKAQICLQEVTYLGYSLKDGQRWLTKARKEAILSIPVPKNSRQVREFLGTAGYCRLWIPGFAELAAPLYPLTRPGTLFQWGTEQQLAFEDIKKALLSSPALGLPDITKPFELFIDENSGFAKGVLVQKLGPWKRPVAYLSKKLDTVASGWPPCLRMVAAIAILVKDAGKLTLGQPLTILTSHPVEALVRQPPNKWLSNARMTHYQAMLLDAERVHFGPTVSLNPATLLPLPSGGNHHDCLQILAETHGTRPDLTDQPLPDADLTWYTDGSSFIRNGEREAGAAVTTESEVIWAAPLPPGTSAQRAELIALTQALKMAEGKKLTVYTDSRYAFATTHVHGEIYRRRGWLTSEGKEIKNKNEILALLEALFLPKRLSIIHCPGHQKGDSPQAKGNRLADDTAKKAATETHSSLTVLPAGKRTADGSEFEKRTADGSEFESPKKKAKVE

SEQ ID NO: 6749 - protein, 2213 aa, synthetic construct
MPAAKRVKLDGGDKKYSIGLDIGTNSVGWAVITDEYKVPSKKFKVLGNTDRHSIKKNLIGALLFDSGETAEATRLKRTARRRYTRRKNRICYLQEIFSNEMAKVDDSFFHRLEESFLVEEDKKHERHPIFGNIVDEVAYHEKYPTIYHLRKKLVDSTDKADLRLIYLALAHMIKFRGHFLIEGDLNPDNSDVDKLFIQLVQTYNQLFEENPINASGVDAKAILSARLSKSRRLENLIAQLPGEKKNGLFGNLIALSLGLTPNFKSNFDLAEDAKLQLSKDTYDDDLDNLLAQIGDQYADLFLAAKNLSDAILLSDILRVNTEITKAPLSASMIKRYDEHHQDLTLLKALVRQQLPEKYKEIFFDQSKNGYAGYIDGGASQEEFYKFIKPILEKMDGTEELLVKLNREDLLRKQRTFDNGSIPHQIHLGELHAILRRQEDFYPFLKDNREKIEKILTFRIPYYVGPLARGNSRFAWMTRKSEETITPWNFEEVVDKGASAQSFIERMTNFDKNLPNEKVLPKHSLLYEYFTVYNELTKVKYVTEGMRKPAFLSGEQKKAIVDLLFKTNRKVTVKQLKEDYFKKIECFDSVEISGVEDRFNASLGTYHDLLKIIKDKDFLDNEENEDILEDIVLTLTLFEDREMIEERLKTYAHLFDDKVMKQLKRRRYTGWGRLSRKLINGIRDKQSGKTILDFLKSDGFANRNFMQLIHDDSLTFKEDIQKAQVSGQGDSLHEHIANLAGSPAIKKGILQTVKVVDELVKVMGRHKPENIVIEMARENQTTQKGQKNSRERMKRIEEGIKELGSQILKEHPVENTQLQNEKLYLYYLQNGRDMYVDQELDINRLSDYDVDHIVPQSFLKDDSIDNKVLTRSDKARGKSDNVPSEEVVKKMKNYWRQLLNAKLITQRKFDNLTKAERGGLSELDKAGFIKRQLVETRQITKHVAQILDSRMNTKYDENDKLIREVKVITLKSKLVSDFRKDFQFYKVREINNYHHAHDAYLNAVVGTALIKKYPKLESEFVYGDYKVYDVRKMIAKSEQEIGKATAKYFFYSNIMNFFKTEITLANGEIRKRPLIETNGETGEIVWDKGRDFATVRKVLSMPQVNIVKKTEVQTGGFSKESILPKRNSDKLIARKKDWDPKKYGGFDSPTVAYSVLVVAKVEKGKSKKLKSVKELLGITIMERSSFEKNPIDFLEAKGYKEVKKDLIIKLPKYSLFELENGRKRMLASAGELQKGNELALPSKYVNFLYLASHYEKLKGSPEDNEQKQLFVEQHKHYLDEIIEQISEFSKRVILADANLDKVLSAYNKHRDKPIREQAENIIHLFTLTNLGAPAAFKYFDTTIDRKRYTSTKEVLDATLIHQSITGLYETRIDLSQLGGDGGGSSPAPGGTLGDQGSRGSDPLPEPRVTLTVEGIPTEFLVNTGAEHSVLTKPMGKMGSKRTVVAGATGSKVYPWTTKRLLKIGQKQVTHSFLVIPECPAPLLGRDLLTKLKAQIQFSTEGPQVTWEDRPAMCLVLNLEEEYRLHEKPVPPSIDPSWLQLFPMVWAEKAGMGLANQVPPVVVELKSDASPVAVRQYPMSKEAREGIRPHIQRFLDLGILVPCQSPWNTPLLPVKKPGTNDYRPVQDLREVNKRVQDIHPTVPNPYNLLSSLPPSHTWYSVLDLKDAFFCLKLHPNSQPLFAFEWRDPEKGNTGQLTWTRLPQGFKNSPTLFNEALHRDLASFRALNPQVVMLQYVDDLLVAAPTYRDCKEGTRRLLQELSKLGYRVSAKKAQLCREEVTYLGYLLKGGKRWLTPARKATVMKIPTPTTPRQVREFLGTAGFCRLWIPGFASLAAPLYPLTRPKVPFTWTEAHQEAFGRIKEALLSAPALALPDLTKPFALYVDEKEGVARGVLTQTLGPWRRPVAYLSKKLDPVASGWPTCLKAIAAVALLLKDADKLTLGQNVLVIAPHNLESIVRQPPDRWMTNARMTHYQSLLLNERVSFAPPAILNPATLLPVESDDTPIHICSEILAEETGTRPDLRDQPLPGVPAWYTDGSSFIMDGRRQAGAAIVDNKRTVWASNLPEGTSAQKAELIALTQALRLAEGKSINIYTDSRYAFATAHVHGAIYKQRGWLTSAGKDIKNKEEILALLEAIHLPKRVAIIHCPGHQRGTDPVATGNRKADEAAKQAAQSTRILTETTKNAGKRTADGSEFEKRTADGSEFESPKKKAKVE

SEQ ID NO: 6750 - protein, 2091 aa, synthetic construct
MPAAKRVKLDGGDKKYSIGLDIGTNSVGWAVITDEYKVPSKKFKVLGNTDRHSIKKNLIGALLFDSGETAEATRLKRTARRRYTRRKNRICYLQEIFSNEMAKVDDSFFHRLEESFLVEEDKKHERHPIFGNIVDEVAYHEKYPTIYHLRKKLVDSTDKADLRLIYLALAHMIKFRGHFLIEGDLNPDNSDVDKLFIQLVQTYNQLFEENPINASGVDAKAILSARLSKSRRLENLIAQLPGEKKNGLFGNLIALSLGLTPNFKSNFDLAEDAKLQLSKDTYDDDLDNLLAQIGDQYADLFLAAKNLSDAILLSDILRVNTEITKAPLSASMIKRYDEHHQDLTLLKALVRQQLPEKYKEIFFDQSKNGYAGYIDGGASQEEFYKFIKPILEKMDGTEELLVKLNREDLLRKQRTFDNGSIPHQIHLGELHAILRRQEDFYPFLKDNREKIEKILTFRIPYYVGPLARGNSRFAWMTRKSEETITPWNFEEVVDKGASAQSFIERMTNFDKNLPNEKVLPKHSLLYEYFTVYNELTKVKYVTEGMRKPAFLSGEQKKAIVDLLFKTNRKVTVKQLKEDYFKKIECFDSVEISGVEDRFNASLGTYHDLLKIIKDKDFLDNEENEDILEDIVLTLTLFEDREMIEERLKTYAHLFDDKVMKQLKRRRYTGWGRLSRKLINGIRDKQSGKTILDFLKSDGFANRNFMQLIHDDSLTFKEDIQKAQVSGQGDSLHEHIANLAGSPAIKKGILQTVKVVDELVKVMGRHKPENIVIEMARENQTTQKGQKNSRERMKRIEEGIKELGSQILKEHPVENTQLQNEKLYLYYLQNGRDMYVDQELDINRLSDYDVDHIVPQSFLKDDSIDNKVLTRSDKARGKSDNVPSEEVVKKMKNYWRQLLNAKLITQRKFDNLTKAERGGLSELDKAGFIKRQLVETRQITKHVAQILDSRMNTKYDENDKLIREVKVITLKSKLVSDFRKDFQFYKVREINNYHHAHDAYLNAVVGTALIKKYPKLESEFVYGDYKVYDVRKMIAKSEQEIGKATAKYFFYSNIMNFFKTEITLANGEIRKRPLIETNGETGEIVWDKGRDFATVRKVLSMPQVNIVKKTEVQTGGFSKESILPKRNSDKLIARKKDWDPKKYGGFDSPTVAYSVLVVAKVEKGKSKKLKSVKELLGITIMERSSFEKNPIDFLEAKGYKEVKKDLIIKLPKYSLFELENGRKRMLASAGELQKGNELALPSKYVNFLYLASHYEKLKGSPEDNEQKQLFVEQHKHYLDEIIEQISEFSKRVILADANLDKVLSAYNKHRDKPIREQAENIIHLFTLTNLGAPAAFKYFDTTIDRKRYTSTKEVLDATLIHQSITGLYETRIDLSQLGGDGGGSSPAPGGTLGIEDEYRLHETSTEPDVSLGSTWLSDFPQAWAETGGMGLAVRQAPLIIPLKATSTPVSIQQYPMSHEARLGIKPHIQRLLDQGILVPCQSPWNTPLLPVKKPGTNDYRPVQDLREVNKRVEDIHPTVPNPYNLLSGLPPSHQWYTVLDLKDAFFCLRLHPTSQPLFAFEWRDPGMGISGQLTWTRLPQGFKNSPTLFNEALHRDLADFRIQHPDLILLQYVDDILLAATSELDCQQGTRALLQTLGDLGYRASAKKAQICQKQVKYLGYLLREGQRWLTEARKETVMGQPVPKTPRQLREFLGTAGFCRLWIPGFAEMAAPLYPLTKPGTLFSWGPDQQKAYQEIKQALLTAPALGLPDLTKPFELFVDEKQGYAKGVLTQKLGPWRRPVAYLSKKLDPVAAGWPPCLRMVAAIAVLTKDAGKLTMGQPLVILAPHAVEALVKQPPDRWLSNARMTHYQAMLLDTDRVQFGPVVALNPATLLPLPEEGAPHDCLEILAETHGTRPDLTDQPIPDADHTWYTDGSSFLQEGQRKAGAAVTTETEVIWAGALPAGTSAQRAELIALTQALKMAEGKRLNVYTDSRYAFATAHIHGEIYRRRGWLTSEGREIKNKSEILALLKALFLPKRLSIIHCLGHQKGDSAEARGNRLADQAAREAAIKTPPDTSTLLAGKRTADGSEFEKRTADGSEFESPKKKAKVE

SEQ ID NO: 6751 - protein, 2111 aa, synthetic construct
MPAAKRVKLDGGDKKYSIGLDIGTNSVGWAVITDEYKVPSKKFKVLGNTDRHSIKKNLIGALLFDSGETAEATRLKRTARRRYTRRKNRICYLQEIFSNEMAKVDDSFFHRLEESFLVEEDKKHERHPIFGNIVDEVAYHEKYPTIYHLRKKLVDSTDKADLRLIYLALAHMIKFRGHFLIEGDLNPDNSDVDKLFIQLVQTYNQLFEENPINASGVDAKAILSARLSKSRRLENLIAQLPGEKKNGLFGNLIALSLGLTPNFKSNFDLAEDAKLQLSKDTYDDDLDNLLAQIGDQYADLFLAAKNLSDAILLSDILRVNTEITKAPLSASMIKRYDEHHQDLTLLKALVRQQLPEKYKEIFFDQSKNGYAGYIDGGASQEEFYKFIKPILEKMDGTEELLVKLNREDLLRKQRTFDNGSIPHQIHLGELHAILRRQEDFYPFLKDNREKIEKILTFRIPYYVGPLARGNSRFAWMTRKSEETITPWNFEEVVDKGASAQSFIERMTNFDKNLPNEKVLPKHSLLYEYFTVYNELTKVKYVTEGMRKPAFLSGEQKKAIVDLLFKTNRKVTVKQLKEDYFKKIECFDSVEISGVEDRFNASLGTYHDLLKIIKDKDFLDNEENEDILEDIVLTLTLFEDREMIEERLKTYAHLFDDKVMKQLKRRRYTGWGRLSRKLINGIRDKQSGKTILDFLKSDGFANRNFMQLIHDDSLTFKEDIQKAQVSGQGDSLHEHIANLAGSPAIKKGILQTVKVVDELVKVMGRHKPENIVIEMARENQTTQKGQKNSRERMKRIEEGIKELGSQILKEHPVENTQLQNEKLYLYYLQNGRDMYVDQELDINRLSDYDVDHIVPQSFLKDDSIDNKVLTRSDKARGKSDNVPSEEVVKKMKNYWRQLLNAKLITQRKFDNLTKAERGGLSELDKAGFIKRQLVETRQITKHVAQILDSRMNTKYDENDKLIREVKVITLKSKLVSDFRKDFQFYKVREINNYHHAHDAYLNAVVGTALIKKYPKLESEFVYGDYKVYDVRKMIAKSEQEIGKATAKYFFYSNIMNFFKTEITLANGEIRKRPLIETNGETGEIVWDKGRDFATVRKVLSMPQVNIVKKTEVQTGGFSKESILPKRNSDKLIARKKDWDPKKYGGFDSPTVAYSVLVVAKVEKGKSKKLKSVKELLGITIMERSSFEKNPIDFLEAKGYKEVKKDLIIKLPKYSLFELENGRKRMLASAGELQKGNELALPSKYVNFLYLASHYEKLKGSPEDNEQKQLFVEQHKHYLDEIIEQISEFSKRVILADANLDKVLSAYNKHRDKPIREQAENIIHLFTLTNLGAPAAFKYFDTTIDRKRYTSTKEVLDATLIHQSITGLYETRIDLSQLGGDGGGSSPAPGGTLNIEDEYRLHETSKEPDVSLGSTWLSDFPQAWAETGGMGLAVRQAPLIIPLKATSTPVSIKQYPMSQEARLGIKPHIQRLLDQGILVPCQSPWNTPLLPVKKPGTNDYRPVQDLREVNKRVEDIHPTVPNPYNLLSGLPPSHQWYTVLDLKDAFFCLRLHPTSQPLFAFEWRDPEMGISGQLTWTRLPQGFKNSPTLFNEALHRDLADFRIQHPDLILLQYVDDLLLAATSELDCQQGTRALLQTLGNLGYRASAKKAQICQKQVKYLGYLLKEGQRWLTEARKETVMGQPTPKTPRQLREFLGKAGFCRLFIPGFAEMAAPLYPLTKPGTLFNWGPDQQKAYQEIKQALLTAPALGLPDLTKPFELFVDEKQGYAKGVLTQKLGPWRRPVAYLSKKLDPVAAGWPPCLRMVAAIAVLTKDAGKLTMGQPLVILAPHAVEALVKQPPDRWLSNARMTHYQALLLDTDRVQFGPVVALNPATLLPLPEEGLQHNCLDILAEAHGTRPDLTDQPLPDADHTWYTDGSSLLQEGQRKAGAAVTTETEVIWAKALPAGTSAQRAELIALTQALKMAEGKKLNVYTDSRYAFATAHIHGEIYRRRGWLTSEGKEIKNKDEILALLKALFLPKRLSIIHCPGHQKGHSAEARGNRMADQAARKAAITETPDTSTLLIENSSPSGGSKRTADGSEFEAGKRTADGSEFEKRTADGSEFESPKKKAKVE

SEQ ID NO: 6752 - protein, 2111 aa, synthetic construct; identical to SEQ ID NO: 6751

SEQ ID NO: 6753 - protein, 2082 aa, synthetic construct
MPAAKRVKLDGGDKKYSIGLDIGTNSVGWAVITDEYKVPSKKFKVLGNTDRHSIKKNLIGALLFDSGETAEATRLKRTARRRYTRRKNRICYLQEIFSNEMAKVDDSFFHRLEESFLVEEDKKHERHPIFGNIVDEVAYHEKYPTIYHLRKKLVDSTDKADLRLIYLALAHMIKFRGHFLIEGDLNPDNSDVDKLFIQLVQTYNQLFEENPINASGVDAKAILSARLSKSRRLENLIAQLPGEKKNGLFGNLIALSLGLTPNFKSNFDLAEDAKLQLSKDTYDDDLDNLLAQIGDQYADLFLAAKNLSDAILLSDILRVNTEITKAPLSASMIKRYDEHHQDLTLLKALVRQQLPEKYKEIFFDQSKNGYAGYIDGGASQEEFYKFIKPILEKMDGTEELLVKLNREDLLRKQRTFDNGSIPHQIHLGELHAILRRQEDFYPFLKDNREKIEKILTFRIPYYVGPLARGNSRFAWMTRKSEETITPWNFEEVVDKGASAQSFIERMTNFDKNLPNEKVLPKHSLLYEYFTVYNELTKVKYVTEGMRKPAFLSGEQKKAIVDLLFKTNRKVTVKQLKEDYFKKIECFDSVEISGVEDRFNASLGTYHDLLKIIKDKDFLDNEENEDILEDIVLTLTLFEDREMIEERLKTYAHLFDDKVMKQLKRRRYTGWGRLSRKLINGIRDKQSGKTILDFLKSDGFANRNFMQLIHDDSLTFKEDIQKAQVSGQGDSLHEHIANLAGSPAIKKGILQTVKVVDELVKVMGRHKPENIVIEMARENQTTQKGQKNSRERMKRIEEGIKELGSQILKEHPVENTQLQNEKLYLYYLQNGRDMYVDQELDINRLSDYDVDHIVPQSFLKDDSIDNKVLTRSDKARGKSDNVPSEEVVKKMKNYWRQLLNAKLITQRKFDNLTKAERGGLSELDKAGFIKRQLVETRQITKHVAQILDSRMNTKYDENDKLIREVKVITLKSKLVSDFRKDFQFYKVREINNYHHAHDAYLNAVVGTALIKKYPKLESEFVYGDYKVYDVRKMIAKSEQEIGKATAKYFFYSNIMNFFKTEITLANGEIRKRPLIETNGETGEIVWDKGRDFATVRKVLSMPQVNIVKKTEVQTGGFSKESILPKRNSDKLIARKKDWDPKKYGGFDSPTVAYSVLVVAKVEKGKSKKLKSVKELLGITIMERSSFEKNPIDFLEAKGYKEVKKDLIIKLPKYSLFELENGRKRMLASAGELQKGNELALPSKYVNFLYLASHYEKLKGSPEDNEQKQLFVEQHKHYLDEIIEQISEFSKRVILADANLDKVLSAYNKHRDKPIREQAENIIHLFTLTNLGAPAAFKYFDTTIDRKRYTSTKEVLDATLIHQSITGLYETRIDLSQLGGDGGGSSPAPGGIPWLMKKPLQLTTLVPLQEYEERLLKQTMLTGSYKEKLQSLFLKYDALWQHWENQVGHRRIKPHHIATGTVNPRPQKQYPINPKAKASIQTVINDLLKQGVLIQQNSIMNTPVYPVPKPDGKWRMVLDYREVNKTIPLIAAQNQHSAGILSSIFRGKYKTTLDLSNGFWAHSITPESYWLTAFTWLGQQYCWTRLPQGFLNSPALFNADVVDLLKEVPNVQVYVDDIYISHDDPREHLEQLEKVFSLLLNAGYVVSLKKSEIAQHEVEFLGFNITKEGRGLTETFKQKLLNITPPRDLKQLQSILGLLNFARNFIPNFSELVKPLYNIIATAPGKYITWTTDNSQQLQNIISMLNSAENLEERNPEVRLIMKVNTSPSAGYIRFYNEFAKRPIMYLNYVYTKAEVKFTNTEKLLTTIHKGLIKALDLGMGQEILVYSPIVSMTKIQKTPLPERKALPIRWITWMSYLEDPRIQFHYDKTLPELQQVPTVTDDIIAKIKHPSEFSMVFYTDGSAIKHPNVNKSHNAGMGIAQVQFKPEFTVINTWSIPLGDHTAQLAEVAAVEFACKKALKIDGPVLIVTDSFYVAESVNKELPYWQSNGFFNNKKKPLKHVSKWKSIADCIQLKPDIIIIHEKGHQPTASTFHTEGNNLADKLATQGSYVVNAGKRTADGSEFEKRTADGSEFESPKKKAKVE

SEQ ID NO: 6754 - protein, 2091 aa, synthetic construct
MPAAKRVKLDGGDKKYSIGLDIGTNSVGWAVITDEYKVPSKKFKVLGNTDRHSIKKNLIGALLFDSGETAEATRLKRTARRRYTRRKNRICYLQEIFSNEMAKVDDSFFHRLEESFLVEEDKKHERHPIFGNIVDEVAYHEKYPTIYHLRKKLVDSTDKADLRLIYLALAHMIKFRGHFLIEGDLNPDNSDVDKLFIQLVQTYNQLFEENPINASGVDAKAILSARLSKSRRLENLIAQLPGEKKNGLFGNLIALSLGLTPNFKSNFDLAEDAKLQLSKDTYDDDLDNLLAQIGDQYADLFLAAKNLSDAILLSDILRVNTEITKAPLSASMIKRYDEHHQDLTLLKALVRQQLPEKYKEIFFDQSKNGYAGYIDGGASQEEFYKFIKPILEKMDGTEELLVKLNREDLLRKQRTFDNGSIPHQIHLGELHAILRRQEDFYPFLKDNREKIEKILTFRIPYYVGPLARGNSRFAWMTRKSEETITPWNFEEVVDKGASAQSFIERMTNFDKNLPNEKVLPKHSLLYEYFTVYNELTKVKYVTEGMRKPAFLSGEQKKAIVDLLFKTNRKVTVKQLKEDYFKKIECFDSVEISGVEDRFNASLGTYHDLLKIIKDKDFLDNEENEDILEDIVLTLTLFEDREMIEERLKTYAHLFDDKVMKQLKRRRYTGWGRLSRKLINGIRDKQSGKTILDFLKSDGFANRNFMQLIHDDSLTFKEDIQKAQVSGQGDSLHEHIANLAGSPAIKKGILQTVKVVDELVKVMGRHKPENIVIEMARENQTTQKGQKNSRERMKRIEEGIKELGSQILKEHPVENTQLQNEKLYLYYLQNGRDMYVDQELDINRLSDYDVDHIVPQSFLKDDSIDNKVLTRSDKARGKSDNVPSEEVVKKMKNYWRQLLNAKLITQRKFDNLTKAERGGLSELDKAGFIKRQLVETRQITKHVAQILDSRMNTKYDENDKLIREVKVITLKSKLVSDFRKDFQFYKVREINNYHHAHDAYLNAVVGTALIKKYPKLESEFVYGDYKVYDVRKMIAKSEQEIGKATAKYFFYSNIMNFFKTEITLANGEIRKRPLIETNGETGEIVWDKGRDFATVRKVLSMPQVNIVKKTEVQTGGFSKESILPKRNSDKLIARKKDWDPKKYGGFDSPTVAYSVLVVAKVEKGKSKKLKSVKELLGITIMERSSFEKNPIDFLEAKGYKEVKKDLIIKLPKYSLFELENGRKRMLASAGELQKGNELALPSKYVNFLYLASHYEKLKGSPEDNEQKQLFVEQHKHYLDEIIEQISEFSKRVILADANLDKVLSAYNKHRDKPIREQAENIIHLFTLTNLGAPAAFKYFDTTIDRKRYTSTKEVLDATLIHQSITGLYETRIDLSQLGGDGGGSSPAPGGTLNIEDEYRLHETSKEPDVPLGSTWLSDFPQAWAETGGMGLAVRQAPLIIPLKATSTPVSIKQYPMSQEARLGIKPHIQRLLDQGILVPCQSPWNTPLLPVKKPGTNDYRPVQDLREVNKRVEDIHPTVPNPYNLLSGLPPSHQWYTVLDLKDAFFCLRLHPTSQPLFAFEWRDPEMGISGQLTWTRLPQGFKNSPTLFNEALHRDLADFRIQHPDLILLQYVDDLLLAATSEQDCQRGTRALLQTLGNLGYRASAKKAQICQKQVKYLGYLLKEGQRWLTEARKETVMGQPTPKTPRQLREFLGTAGFCRLWIPGFAEMAAPLYPLTKPGTLFNWGPDQQKAYQEIKQALLTAPALGLPDLTKPFELFVDEKQGYAKGVLTQKLGPWRRPVAYLSKKLDPVAAGWPPCLRMVAAIAVLTKDAGKLTMGQPLVILAPHAVEALVKQPPDRWLSNARMTHYQAMLLDTDRVQFGPVVALNPATLLPLPEKEAPHDCLEILAETHGTRPDLTDQPIPDADYTWYTDGSSFLQEGQRRAGAAVTTETEVIWARALPAGTSAQRAELIALTQALKMAEGKKLNVYTDSRYAFATAHVHGEIYRRRGWLTSEGREIKNKNEILALLKALFLPKRLSIIHCPGHQKGNSAEARGNRMADQAAREAAMKAVLETSTLLAGKRTADGSEFEKRTADGSEFESPKKKAKVE

SEQ ID NO: 6755 - protein, 2093 aa, synthetic construct
MPAAKRVKLDGGDKKYSIGLDIGTNSVGWAVITDEYKVPSKKFKVLGNTDRHSIKKNLIGALLFDSGETAEATRLKRTARRRYTRRKNRICYLQEIFSNEMAKVDDSFFHRLEESFLVEEDKKHERHPIFGNIVDEVAYHEKYPTIYHLRKKLVDSTDKADLRLIYLALAHMIKFRGHFLIEGDLNPDNSDVDKLFIQLVQTYNQLFEENPINASGVDAKAILSARLSKSRRLENLIAQLPGEKKNGLFGNLIALSLGLTPNFKSNFDLAEDAKLQLSKDTYDDDLDNLLAQIGDQYADLFLAAKNLSDAILLSDILRVNTEITKAPLSASMIKRYDEHHQDLTLLKALVRQQLPEKYKEIFFDQSKNGYAGYIDGGASQEEFYKFIKPILEKMDGTEELLVKLNREDLLRKQRTFDNGSIPHQIHLGELHAILRRQEDFYPFLKDNREKIEKILTFRIPYYVGPLARGNSRFAWMTRKSEETITPWNFEEVVDKGASAQSFIERMTNFDKNLPNEKVLPKHSLLYEYFTVYNELTKVKYVTEGMRKPAFLSGEQKKAIVDLLFKTNRKVTVKQLKEDYFKKIECFDSVEISGVEDRFNASLGTYHDLLKIIKDKDFLDNEENEDILEDIVLTLTLFEDREMIEERLKTYAHLFDDKVMKQLKRRRYTGWGRLSRKLINGIRDKQSGKTILDFLKSDGFANRNFMQLIHDDSLTFKEDIQKAQVSGQGDSLHEHIANLAGSPAIKKGILQTVKVVDELVKVMGRHKPENIVIEMARENQTTQKGQKNSRERMKRIEEGIKELGSQILKEHPVENTQLQNEKLYLYYLQNGRDMYVDQELDINRLSDYDVDHIVPQSFLKDDSIDNKVLTRSDKARGKSDNVPSEEVVKKMKNYWRQLLNAKLITQRKFDNLTKAERGGLSELDKAGFIKRQLVETRQITKHVAQILDSRMNTKYDENDKLIREVKVITLKSKLVSDFRKDFQFYKVREINNYHHAHDAYLNAVVGTALIKKYPKLESEFVYGDYKVYDVRKMIAKSEQEIGKATAKYFFYSNIMNFFKTEITLANGEIRKRPLIETNGETGEIVWDKGRDFATVRKVLSMPQVNIVKKTEVQTGGFSKESILPKRNSDKLIARKKDWDPKKYGGFDSPTVAYSVLVVAKVEKGKSKKLKSVKELLGITIMERSSFEKNPIDFLEAKGYKEVKKDLIIKLPKYSLFELENGRKRMLASAGELQKGNELALPSKYVNFLYLASHYEKLKGSPEDNEQKQLFVEQHKHYLDEIIEQISEFSKRVILADANLDKVLSAYNKHRDKPIREQAENIIHLFTLTNLGAPAAFKYFDTTIDRKRYTSTKEVLDATLIHQSITGLYETRIDLSQLGGDGGPAPGSSGGTAPLEEEYRLFLEAPIQNVTLLEQWKREIPKVWAEINPPGLASTQAPIHVQLLSTALPVRVRQYPITLEAKRSLRETIRKFRAAGILRPVHSPWNTPLLPVRKSGTSEYRMVQDLREVNKRVETIHPTVPNPYTLLSLLPPDRIWYSVLDLKDAFFCIPLAPESQLIFAFEWADAEEGESGQLTWTRLPQGFKNSPTLFNEALNRDLQGFRLDHPSVSLLQYVDDLLIAADTQAACLSATRDLLMTLAELGYRVSGKKAQLCQEEVTYLGFKIHKGSRSLSNSRTQAILQIPVPKTKRQVREFLGTIGYCRLWIPGFAELAQPLYAATRPGNDPLVWGEKEEEAFQSLKLALTQPPALALPSLDKPFQLFVEETSGAAKGVLTQALGPWKRPVAYLSKRLDPVAAGWPRCLRAIAAAALLTREASKLTFGQDIEITSSHNLESLLRSPPDKWLTNARITQYQVLLLDPPRVRFKQTAALNPATLLPETDDTLPIHHCLDTLDSLTSTRPDLTDQPLAQAEATLFTDGSSYIRDGKRYAGAAVVTLDSVIWAEPLPIGTSAQKAELIALTKALEWSKDKSVNIYTDSRYAFATLHVHGMIYRERGWLTAGGKAIKNAPEILALLTAVWLPKRVAVMHCKGHQKDDAPTSTGNRRADEVAREVAIRPLSTQATISAGKRTADGSEFEKRTADGSEFESPKKKAKVE

SEQ ID NO: 6756 - protein, 2093 aa, synthetic construct
MPAAKRVKLDGGDKKYSIGLDIGTNSVGWAVITDEYKVPSKKFKVLGNTDRHSIKKNLIGALLFDSGETAEATRLKRTARRRYTRRKNRICYLQEIFSNEMAKVDDSFFHRLEESFLVEEDKKHERHPIFGNIVDEVAYHEKYPTIYHLRKKLVDSTDKADLRLIYLALAHMIKFRGHFLIEGDLNPDNSDVDKLFIQLVQTYNQLFEENPINASGVDAKAILSARLSKSRRLENLIAQLPGEKKNGLFGNLIALSLGLTPNFKSNFDLAEDAKLQLSKDTYDDDLDNLLAQIGDQYADLFLAAKNLSDAILLSDILRVNTEITKAPLSASMIKRYDEHHQDLTLLKALVRQQLPEKYKEIFFDQSKNGYAGYIDGGASQEEFYKFIKPILEKMDGTEELLVKLNREDLLRKQRTFDNGSIPHQIHLGELHAILRRQEDFYPFLKDNREKIEKILTFRIPYYVGPLARGNSRFAWMTRKSEETITPWNFEEVVDKGASAQSFIERMTNFDKNLPNEKVLPKHSLLYEYFTVYNELTKVKYVTEGMRKPAFLSGEQKKAIVDLLFKTNRKVTVKQLKEDYFKKIECFDSVEISGVEDRFNASLGTYHDLLKIIKDKDFLDNEENEDILEDIVLTLTLFEDREMIEERLKTYAHLFDDKVMKQLKRRRYTGWGRLSRKLINGIRDKQSGKTILDFLKSDGFANRNFMQLIHDDSLTFKEDIQKAQVSGQGDSLHEHIANLAGSPAIKKGILQTVKVVDELVKVMGRHKPENIVIEMARENQTTQKGQKNSRERMKRIEEGIKELGSQILKEHPVENTQLQNEKLYLYYLQNGRDMYVDQELDINRLSDYDVDHIVPQSFLKDDSIDNKVLTRSDKARGKSDNVPSEEVVKKMKNYWRQLLNAKLITQRKFDNLTKAERGGLSELDKAGFIKRQLVETRQITKHVAQILDSRMNTKYDENDKLIREVKVITLKSKLVSDFRKDFQFYKVREINNYHHAHDAYLNAVVGTALIKKYPKLESEFVYGDYKVYDVRKMIAKSEQEIGKATAKYFFYSNIMNFFKTEITLANGEIRKRPLIETNGETGEIVWDKGRDFATVRKVLSMPQVNIVKKTEVQTGGFSKESILPKRNSDKLIARKKDWDPKKYGGFDSPTVAYSVLVVAKVEKGKSKKLKSVKELLGITIMERSSFEKNPIDFLEAKGYKEVKKDLIIKLPKYSLFELENGRKRMLASAGELQKGNELALPSKYVNFLYLASHYEKLKGSPEDNEQKQLFVEQHKHYLDEIIEQISEFSKRVILADANLDKVLSAYNKHRDKPIREQAENIIHLFTLTNLGAPAAFKYFDTTIDRKRYTSTKEVLDATLIHQSITGLYETRIDLSQLGGDGGPAPGSSGGTAPLEEEYRLFLEAPIQNVTLLEQWKREIPKVWAEINPPGLASTQAPIHVQLLSTALPVRVRQYPITLEAKRSLRETIRKFRAAGILRPVHSPWNTPLLPVRKSGTSEYRMVQDLREVNKRVETIHPTVPNPYTLLSLLPPDRIWYSVLDLKDAFFCIPLAPESQLIFAFEWADAEEGESGQLTWTRLPQGFKNSPTLFNEALNRDLQGFRLDHPSVSLLQYVDDLLIAADTQAACLSATRDLLMTLAELGYRVSGKKAQLCQEEVTYLGFKIHKGSRSLSNSRTQAILQIPVPKTKRQVREFLGKIGYCRLFIPGFAELAQPLYAATRPGNDPLVWGEKEEEAFQSLKLALTQPPALALPSLDKPFQLFVEETSGAAKGVLTQALGPWKRPVAYLSKRLDPVAAGWPRCLRAIAAAALLTREASKLTFGQDIEITSSHNLESLLRSPPDKWLTNARITQYQVLLLDPPRVRFKQTAALNPATLLPETDDTLPIHHCLDTLDSLTSTRPDLTDQPLAQAEATLFTDGSSYIRDGKRYAGAAVVTLDSVIWAEPLPIGTSAQKAELIALTKALEWSKDKSVNIYTDSRYAFATLHVHGMIYRERGWLTAGGKAIKNAPEILALLTAVWLPKRVAVMHCKGHQKDDAPTSTGNRRADEVAREVAIRPLSTQATISAGKRTADGSEFEKRTADGSEFESPKKKAKVE

SEQ ID NO: 6757 - protein, 2090 aa, synthetic construct
MPAAKRVKLDGGDKKYSIGLDIGTNSVGWAVITDEYKVPSKKFKVLGNTDRHSIKKNLIGALLFDSGETAEATRLKRTARRRYTRRKNRICYLQEIFSNEMAKVDDSFFHRLEESFLVEEDKKHERHPIFGNIVDEVAYHEKYPTIYHLRKKLVDSTDKADLRLIYLALAHMIKFRGHFLIEGDLNPDNSDVDKLFIQLVQTYNQLFEENPINASGVDAKAILSARLSKSRRLENLIAQLPGEKKNGLFGNLIALSLGLTPNFKSNFDLAEDAKLQLSKDTYDDDLDNLLAQIGDQYADLFLAAKNLSDAILLSDILRVNTEITKAPLSASMIKRYDEHHQDLTLLKALVRQQLPEKYKEIFFDQSKNGYAGYIDGGASQEEFYKFIKPILEKMDGTEELLVKLNREDLLRKQRTFDNGSIPHQIHLGELHAILRRQEDFYPFLKDNREKIEKILTFRIPYYVGPLARGNSRFAWMTRKSEETITPWNFEEVVDKGASAQSFIERMTNFDKNLPNEKVLPKHSLLYEYFTVYNELTKVKYVTEGMRKPAFLSGEQKKAIVDLLFKTNRKVTVKQLKEDYFKKIECFDSVEISGVEDRFNASLGTYHDLLKIIKDKDFLDNEENEDILEDIVLTLTLFEDREMIEERLKTYAHLFDDKVMKQLKRRRYTGWGRLSRKLINGIRDKQSGKTILDFLKSDGFANRNFMQLIHDDSLTFKEDIQKAQVSGQGDSLHEHIANLAGSPAIKKGILQTVKVVDELVKVMGRHKPENIVIEMARENQTTQKGQKNSRERMKRIEEGIKELGSQILKEHPVENTQLQNEKLYLYYLQNGRDMYVDQELDINRLSDYDVDHIVPQSFLKDDSIDNKVLTRSDKARGKSDNVPSEEVVKKMKNYWRQLLNAKLITQRKFDNLTKAERGGLSELDKAGFIKRQLVETRQITKHVAQILDSRMNTKYDENDKLIREVKVITLKSKLVSDFRKDFQFYKVREINNYHHAHDAYLNAVVGTALIKKYPKLESEFVYGDYKVYDVRKMIAKSEQEIGKATAKYFFYSNIMNFFKTEITLANGEIRKRPLIETNGETGEIVWDKGRDFATVRKVLSMPQVNIVKKTEVQTGGFSKESILPKRNSDKLIARKKDWDPKKYGGFDSPTVAYSVLVVAKVEKGKSKKLKSVKELLGITIMERSSFEKNPIDFLEAKGYKEVKKDLIIKLPKYSLFELENGRKRMLASAGELQKGNELALPSKYVNFLYLASHYEKLKGSPEDNEQKQLFVEQHKHYLDEIIEQISEFSKRVILADANLDKVLSAYNKHRDKPIREQAENIIHLFTLTNLGAPAAFKYFDTTIDRKRYTSTKEVLDATLIHQSITGLYETRIDLSQLGGDGGPAPGSSGGTLQLEEEYRLFEPESTQKQEMDIWLKNFPQAWAETGGMGTAHCQAPVLIQLKATATPISIRQYPMPHEAYQGIKPHIRRMLDQGILKPCQSPWNTPLLPVKKPGTEDYRPVQDLREVNKRVEDIHPTVPNPYNLLSTLPPSHPWYTVLDLKDAFFCLRLHSESQLLFAFEWRDPEIGLSGQLTWTRLPQGFKNSPTLFNEALHSDLADFRVRYPALVLLQYVDDLLLAAATRTECLEGTKALLETLGNKGYRASAKKAQICLQEVTYLGYSLKDGQRWLTKARKEAILSIPVPKNSRQVREFLGTAGYCRLWIPGFAELAAPLYPLTRPGTLFQWGTEQQLAFEDIKKALLSSPALGLPDITKPFELFIDENSGFAKGVLVQKLGPWKRPVAYLSKKLDTVASGWPPCLRMVAAIAILVKDAGKLTLGQPLTILTSHPVEALVRQPPNKWLSNARMTHYQAMLLDAERVHFGPTVSLNPATLLPLPSGGNHHDCLQILAETHGTRPDLTDQPLPDADLTWYTDGSSFIRNGEREAGAAVTTESEVIWAAPLPPGTSAQRAELIALTQALKMAEGKKLTVYTDSRYAFATTHVHGEIYRRRGWLTSEGKEIKNKNEILALLEALFLPKRLSIIHCPGHQKGDSPQAKGNRLADDTAKKAATETHSSLTVLPAGKRTADGSEFEKRTADGSEFESPKKKAKVE

SEQ ID NO: 6758 - protein, 2213 aa, synthetic construct
MPAAKRVKLDGGDKKYSIGLDIGTNSVGWAVITDEYKVPSKKFKVLGNTDRHSIKKNLIGALLFDSGETAEATRLKRTARRRYTRRKNRICYLQEIFSNEMAKVDDSFFHRLEESFLVEEDKKHERHPIFGNIVDEVAYHEKYPTIYHLRKKLVDSTDKADLRLIYLALAHMIKFRGHFLIEGDLNPDNSDVDKLFIQLVQTYNQLFEENPINASGVDAKAILSARLSKSRRLENLIAQLPGEKKNGLFGNLIALSLGLTPNFKSNFDLAEDAKLQLSKDTYDDDLDNLLAQIGDQYADLFLAAKNLSDAILLSDILRVNTEITKAPLSASMIKRYDEHHQDLTLLKALVRQQLPEKYKEIFFDQSKNGYAGYIDGGASQEEFYKFIKPILEKMDGTEELLVKLNREDLLRKQRTFDNGSIPHQIHLGELHAILRRQEDFYPFLKDNREKIEKILTFRIPYYVGPLARGNSRFAWMTRKSEETITPWNFEEVVDKGASAQSFIERMTNFDKNLPNEKVLPKHSLLYEYFTVYNELTKVKYVTEGMRKPAFLSGEQKKAIVDLLFKTNRKVTVKQLKEDYFKKIECFDSVEISGVEDRFNASLGTYHDLLKIIKDKDFLDNEENEDILEDIVLTLTLFEDREMIEERLKTYAHLFDDKVMKQLKRRRYTGWGRLSRKLINGIRDKQSGKTILDFLKSDGFANRNFMQLIHDDSLTFKEDIQKAQVSGQGDSLHEHIANLAGSPAIKKGILQTVKVVDELVKVMGRHKPENIVIEMARENQTTQKGQKNSRERMKRIEEGIKELGSQILKEHPVENTQLQNEKLYLYYLQNGRDMYVDQELDINRLSDYDVDHIVPQSFLKDDSIDNKVLTRSDKARGKSDNVPSEEVVKKMKNYWRQLLNAKLITQRKFDNLTKAERGGLSELDKAGFIKRQLVETRQITKHVAQILDSRMNTKYDENDKLIREVKVITLKSKLVSDFRKDFQFYKVREINNYHHAHDAYLNAVVGTALIKKYPKLESEFVYGDYKVYDVRKMIAKSEQEIGKATAKYFFYSNIMNFFKTEITLANGEIRKRPLIETNGETGEIVWDKGRDFATVRKVLSMPQVNIVKKTEVQTGGFSKESILPKRNSDKLIARKKDWDPKKYGGFDSPTVAYSVLVVAKVEKGKSKKLKSVKELLGITIMERSSFEKNPIDFLEAKGYKEVKKDLIIKLPKYSLFELENGRKRMLASAGELQKGNELALPSKYVNFLYLASHYEKLKGSPEDNEQKQLFVEQHKHYLDEIIEQISEFSKRVILADANLDKVLSAYNKHRDKPIREQAENIIHLFTLTNLGAPAAFKYFDTTIDRKRYTSTKEVLDATLIHQSITGLYETRIDLSQLGGDGGPAPGSSGGTLGDQGSRGSDPLPEPRVTLTVEGIPTEFLVNTGAEHSVLTKPMGKMGSKRTVVAGATGSKVYPWTTKRLLKIGQKQVTHSFLVIPECPAPLLGRDLLTKLKAQIQFSTEGPQVTWEDRPAMCLVLNLEEEYRLHEKPVPPSIDPSWLQLFPMVWAEKAGMGLANQVPPVVVELKSDASPVAVRQYPMSKEAREGIRPHIQRFLDLGILVPCQSPWNTPLLPVKKPGTNDYRPVQDLREVNKRVQDIHPTVPNPYNLLSSLPPSHTWYSVLDLKDAFFCLKLHPNSQPLFAFEWRDPEKGNTGQLTWTRLPQGFKNSPTLFNEALHRDLASFRALNPQVVMLQYVDDLLVAAPTYRDCKEGTRRLLQELSKLGYRVSAKKAQLCREEVTYLGYLLKGGKRWLTPARKATVMKIPTPTTPRQVREFLGTAGFCRLWIPGFASLAAPLYPLTRPKVPFTWTEAHQEAFGRIKEALLSAPALALPDLTKPFALYVDEKEGVARGVLTQTLGPWRRPVAYLSKKLDPVASGWPTCLKAIAAVALLLKDADKLTLGQNVLVIAPHNLESIVRQPPDRWMTNARMTHYQSLLLNERVSFAPPAILNPATLLPVESDDTPIHICSEILAEETGTRPDLRDQPLPGVPAWYTDGSSFIMDGRRQAGAAIVDNKRTVWASNLPEGTSAQKAELIALTQALRLAEGKSINIYTDSRYAFATAHVHGAIYKQRGWLTSAGKDIKNKEEILALLEAIHLPKRVAIIHCPGHQRGTDPVATGNRKADEAAKQAAQSTRILTETTKNAGKRTADGSEFEKRTADGSEFESPKKKAKVE

SEQ ID NO: 6759 - protein, 2091 aa, synthetic construct
MPAAKRVKLDGGDKKYSIGLDIGTNSVGWAVITDEYKVPSKKFKVLGNTDRHSIKKNLIGALLFDSGETAEATRLKRTARRRYTRRKNRICYLQEIFSNEMAKVDDSFFHRLEESFLVEEDKKHERHPIFGNIVDEVAYHEKYPTIYHLRKKLVDSTDKADLRLIYLALAHMIKFRGHFLIEGDLNPDNSDVDKLFIQLVQTYNQLFEENPINASGVDAKAILSARLSKSRRLENLIAQLPGEKKNGLFGNLIALSLGLTPNFKSNFDLAEDAKLQLSKDTYDDDLDNLLAQIGDQYADLFLAAKNLSDAILLSDILRVNTEITKAPLSASMIKRYDEHHQDLTLLKALVRQQLPEKYKEIFFDQSKNGYAGYIDGGASQEEFYKFIKPILEKMDGTEELLVKLNREDLLRKQRTFDNGSIPHQIHLGELHAILRRQEDFYPFLKDNREKIEKILTFRIPYYVGPLARGNSRFAWMTRKSEETITPWNFEEVVDKGASAQSFIERMTNFDKNLPNEKVLPKHSLLYEYFTVYNELTKVKYVTEGMRKPAFLSGEQKKAIVDLLFKTNRKVTVKQLKEDYFKKIECFDSVEISGVEDRFNASLGTYHDLLKIIKDKDFLDNEENEDILEDIVLTLTLFEDREMIEERLKTYAHLFDDKVMKQLKRRRYTGWGRLSRKLINGIRDKQSGKTILDFLKSDGFANRNFMQLIHDDSLTFKEDIQKAQVSGQGDSLHEHIANLAGSPAIKKGILQTVKVVDELVKVMGRHKPENIVIEMARENQTTQKGQKNSRERMKRIEEGIKELGSQILKEHPVENTQLQNEKLYLYYLQNGRDMYVDQELDINRLSDYDVDHIVPQSFLKDDSIDNKVLTRSDKARGKSDNVPSEEVVKKMKNYWRQLLNAKLITQRKFDNLTKAERGGLSELDKAGFIKRQLVETRQITKHVAQILDSRMNTKYDENDKLIREVKVITLKSKLVSDFRKDFQFYKVREINNYHHAHDAYLNAVVGTALIKKYPKLESEFVYGDYKVYDVRKMIAKSEQEIGKATAKYFFYSNIMNFFKTEITLANGEIRKRPLIETNGETGEIVWDKGRDFATVRKVLSMPQVNIVKKTEVQTGGFSKESILPKRNSDKLIARKKDWDPKKYGGFDSPTVAYSVLVVAKVEKGKSKKLKSVKELLGITIMERSSFEKNPIDFLEAKGYKEVKKDLIIKLPKYSLFELENGRKRMLASAGELQKGNELALPSKYVNFLYLASHYEKLKGSPEDNEQKQLFVEQHKHYLDEIIEQISEFSKRVILADANLDKVLSAYNKHRDKPIREQAENIIHLFTLTNLGAPAAFKYFDTTIDRKRYTSTKEVLDATLIHQSITGLYETRIDLSQLGGDGGPAPGSSGGTLNLEDEYRLYETSAEPEVSPGSTWLSDFPQAWAETGGMGLAVRQAPLIIPLKATSTPVSIKQYPMSQEAKLGIKPHIQRLLDQGILVPCQSPWNTPLLPVKKPGTNDYRPVQDLREVNKRVEDIHPTVPNPYNLLSGLPPSHRWYTVLDLKDAFFCLRLHPTSQPLFAFEWRDPGMGISGQLTWTRLPQGFKNSPTLFNEALHRDLADFRIQHPDLILLQYVDDILLAATSELDCQQGTRALLLTLGNLGYRASAKKAQLCQKQVKYLGYLLKEGQRWLTEARKETVMGQPTPKTPRQLREFLGTAGFCRLWIPGFAEMAAPLYPLTKPGTLFNWGPDQQKAYQEIKQALLTAPALGLPDLTKPFELFVDEKQGYAKGVLTQKLGPWRRPVAYLSKKLDPVAAGWPPCLRMVAAIAVLRKDAGKLTMGQPLVILAPHAVEALVKQPPDRWLSNARMTHYQAMLLDTDRVQFGPVVALNPATLLPLPEEGAPHDCLEILAETHGTRPDLTDQPIPDADHTWYTDGSSFLQEGQRKAGAAVTTETEVIWARALPAGTSAQRAELIALTQALKMAEGKRLNVYTDSRYAFATAHIHGEIYRRRGWLTSEGREIKNKSEILALLKALFLPKRLSIIHCLGHQKGDSAEARGNRLADQAAREAAIKTPPDTSTLLAGKRTADGSEFEKRTADGSEFESPKKKAKVE

SEQ ID NO: 6760 - protein, 2091 aa, synthetic construct; identical to SEQ ID NO: 4513

SEQ ID NO: 6761 - protein, 2091 aa, synthetic construct; identical to SEQ ID NO: 4513

SEQ ID NO: 6762 - protein, 2082 aa, synthetic construct
MPAAKRVKLDGGDKKYSIGLDIGTNSVGWAVITDEYKVPSKKFKVLGNTDRHSIKKNLIGALLFDSGETAEATRLKRTARRRYTRRKNRICYLQEIFSNEMAKVDDSFFHRLEESFLVEEDKKHERHPIFGNIVDEVAYHEKYPTIYHLRKKLVDSTDKADLRLIYLALAHMIKFRGHFLIEGDLNPDNSDVDKLFIQLVQTYNQLFEENPINASGVDAKAILSARLSKSRRLENLIAQLPGEKKNGLFGNLIALSLGLTPNFKSNFDLAEDAKLQLSKDTYDDDLDNLLAQIGDQYADLFLAAKNLSDAILLSDILRVNTEITKAPLSASMIKRYDEHHQDLTLLKALVRQQLPEKYKEIFFDQSKNGYAGYIDGGASQEEFYKFIKPILEKMDGTEELLVKLNREDLLRKQRTFDNGSIPHQIHLGELHAILRRQEDFYPFLKDNREKIEKILTFRIPYYVGPLARGNSRFAWMTRKSEETITPWNFEEVVDKGASAQSFIERMTNFDKNLPNEKVLPKHSLLYEYFTVYNELTKVKYVTEGMRKPAFLSGEQKKAIVDLLFKTNRKVTVKQLKEDYFKKIECFDSVEISGVEDRFNASLGTYHDLLKIIKDKDFLDNEENEDILEDIVLTLTLFEDREMIEERLKTYAHLFDDKVMKQLKRRRYTGWGRLSRKLINGIRDKQSGKTILDFLKSDGFANRNFMQLIHDDSLTFKEDIQKAQVSGQGDSLHEHIANLAGSPAIKKGILQTVKVVDELVKVMGRHKPENIVIEMARENQTTQKGQKNSRERMKRIEEGIKELGSQILKEHPVENTQLQNEKLYLYYLQNGRDMYVDQELDINRLSDYDVDHIVPQSFLKDDSIDNKVLTRSDKARGKSDNVPSEEVVKKMKNYWRQLLNAKLITQRKFDNLTKAERGGLSELDKAGFIKRQLVETRQITKHVAQILDSRMNTKYDENDKLIREVKVITLKSKLVSDFRKDFQFYKVREINNYHHAHDAYLNAVVGTALIKKYPKLESEFVYGDYKVYDVRKMIAKSEQEIGKATAKYFFYSNIMNFFKTEITLANGEIRKRPLIETNGETGEIVWDKGRDFATVRKVLSMPQVNIVKKTEVQTGGFSKESILPKRNSDKLIARKKDWDPKKYGGFDSPTVAYSVLVVAKVEKGKSKKLKSVKELLGITIMERSSFEKNPIDFLEAKGYKEVKKDLIIKLPKYSLFELENGRKRMLASAGELQKGNELALPSKYVNFLYLASHYEKLKGSPEDNEQKQLFVEQHKHYLDEIIEQISEFSKRVILADANLDKVLSAYNKHRDKPIREQAENIIHLFTLTNLGAPAAFKYFDTTIDRKRYTSTKEVLDATLIHQSITGLYETRIDLSQLGGDGGPAPGSSGGIPWLMKKPLQLTTLVPLQEYEERLLKQTMLTGSYKEKLQSLFLKYDALWQHWENQVGHRRIKPHHIATGTVNPRPQKQYPINPKAKASIQTVINDLLKQGVLIQQNSIMNTPVYPVPKPDGKWRMVLDYREVNKTIPLIAAQNQHSAGILSSIFRGKYKTTLDLSNGFWAHSITPESYWLTAFTWLGQQYCWTRLPQGFLNSPALFNADVVDLLKEVPNVQVYVDDIYISHDDPREHLEQLEKVFSLLLNAGYVVSLKKSEIAQHEVEFLGFNITKEGRGLTETFKQKLLNITPPRDLKQLQSILGKLNFARNFIPNFSELVKPLYNIIATAPGKYITWTTDNSQQLQNIISMLNSAENLEERNPEVRLIMKVNTSPSAGYIRFYNEFAKRPIMYLNYVYTKAEVKFTNTEKLLTTIHKGLIKALDLGMGQEILVYSPIVSMTKIQKTPLPERKALPIRWITWMSYLEDPRIQFHYDKTLPELQQVPTVTDDIIAKIKHPSEFSMVFYTDGSAIKHPNVNKSHNAGMGIAQVQFKPEFTVINTWSIPLGDHTAQLAEVAAVEFACKKALKIDGPVLIVTDSFYVAESVNKELPYWQSNGFFNNKKKPLKHVSKWKSIADCIQLKPDIIIIHEKGHQPTASTFHTEGNNLADKLATQGSYVVNAGKRTADGSEFEKRTADGSEFESPKKKAKVE

SEQ ID NO: 6763 - protein, 2012 aa, synthetic construct
MPAAKRVKLDGGDKKYSIGLDIGTNSVGWAVITDEYKVPSKKFKVLGNTDRHSIKKNLIGALLFDSGETAEATRLKRTARRRYTRRKNRICYLQEIFSNEMAKVDDSFFHRLEESFLVEEDKKHERHPIFGNIVDEVAYHEKYPTIYHLRKKLVDSTDKADLRLIYLALAHMIKFRGHFLIEGDLNPDNSDVDKLFIQLVQTYNQLFEENPINASGVDAKAILSARLSKSRRLENLIAQLPGEKKNGLFGNLIALSLGLTPNFKSNFDLAEDAKLQLSKDTYDDDLDNLLAQIGDQYADLFLAAKNLSDAILLSDILRVNTEITKAPLSASMIKRYDEHHQDLTLLKALVRQQLPEKYKEIFFDQSKNGYAGYIDGGASQEEFYKFIKPILEKMDGTEELLVKLNREDLLRKQRTFDNGSIPHQIHLGELHAILRRQEDFYPFLKDNREKIEKILTFRIPYYVGPLARGNSRFAWMTRKSEETITPWNFEEVVDKGASAQSFIERMTNFDKNLPNEKVLPKHSLLYEYFTVYNELTKVKYVTEGMRKPAFLSGEQKKAIVDLLFKTNRKVTVKQLKEDYFKKIECFDSVEISGVEDRFNASLGTYHDLLKIIKDKDFLDNEENEDILEDIVLTLTLFEDREMIEERLKTYAHLFDDKVMKQLKRRRYTGWGRLSRKLINGIRDKQSGKTILDFLKSDGFANRNFMQLIHDDSLTFKEDIQKAQVSGQGDSLHEHIANLAGSPAIKKGILQTVKVVDELVKVMGRHKPENIVIEMARENQTTQKGQKNSRERMKRIEEGIKELGSQILKEHPVENTQLQNEKLYLYYLQNGRDMYVDQELDINRLSDYDVDHIVPQSFLKDDSIDNKVLTRSDKARGKSDNVPSEEVVKKMKNYWRQLLNAKLITQRKFDNLTKAERGGLSELDKAGFIKRQLVETRQITKHVAQILDSRMNTKYDENDKLIREVKVITLKSKLVSDFRKDFQFYKVREINNYHHAHDAYLNAVVGTALIKKYPKLESEFVYGDYKVYDVRKMIAKSEQEIGKATAKYFFYSNIMNFFKTEITLANGEIRKRPLIETNGETGEIVWDKGRDFATVRKVLSMPQVNIVKKTEVQTGGFSKESILPKRNSDKLIARKKDWDPKKYGGFDSPTVAYSVLVVAKVEKGKSKKLKSVKELLGITIMERSSFEKNPIDFLEAKGYKEVKKDLIIKLPKYSLFELENGRKRMLASAGELQKGNELALPSKYVNFLYLASHYEKLKGSPEDNEQKQLFVEQHKHYLDEIIEQISEFSKRVILADANLDKVLSAYNKHRDKPIREQAENIIHLFTLTNLGAPAAFKYFDTTIDRKRYTSTKEVLDATLIHQSITGLYETRIDLSQLGGDGGPAPGSSGGPRSRAIDIPVPHADKISWKITDPVWVDQWPLTYEKTLAAIALVQEQLAAGHIEPTNSPWNTPIFIIKKKSGSWRLLQDLRAVNKVMVPMGALQPGLPSPVAIPLNYHKIVIDLKDCFFTIPLHPEDRPYFAFSVPQINFQSPMPRYQWKVLPQGMANSPTLCQKFVAAAIAPVRSQWPEAYILHYMDDILLACDSAEAAKACYAHIISCLTSYGLKIAPDKVQVSEPFSYLGFELHHQQVFTPRVCLKTDHLKTLNDFQKLLGDIQWLRPYLKLPTSALVPLNNILKPDPNPLSVRALTPEAKQSLALINKAIQNQSVQQISYNLPLVLLLLPTPHTPTAVFWQPNGTDPTKNGSPLLWLHLPASPSKVLLTYPSLLAMLIIKGRYTGRQLFGRDPHSIIIPYTQDQLTWLLQTSDEWAIALSSFTGDIDNHYPSDPVIQFAKLHQFIFPKITKCAPIPQATLVFTDGSSNGIAAYVIDNQPISIKSPYLSAQLVELYAILQVFTVLAHQPFNLYTDSAYIAQSVPLLETVPFIKSSTNATPLFSKLQQLILNRQHPFFIGHLRAHLNLPGPLAEGNALADAATQIFPIISDAGKRTADGSEFEKRTADGSEFESPKKKAKVE

SEQ ID NO: 6764 - protein, 2091 aa, synthetic construct
MPAAKRVKLDGGDKKYSIGLDIGTNSVGWAVITDEYKVPSKKFKVLGNTDRHSIKKNLIGALLFDSGETAEATRLKRTARRRYTRRKNRICYLQEIFSNEMAKVDDSFFHRLEESFLVEEDKKHERHPIFGNIVDEVAYHEKYPTIYHLRKKLVDSTDKADLRLIYLALAHMIKFRGHFLIEGDLNPDNSDVDKLFIQLVQTYNQLFEENPINASGVDAKAILSARLSKSRRLENLIAQLPGEKKNGLFGNLIALSLGLTPNFKSNFDLAEDAKLQLSKDTYDDDLDNLLAQIGDQYADLFLAAKNLSDAILLSDILRVNTEITKAPLSASMIKRYDEHHQDLTLLKALVRQQLPEKYKEIFFDQSKNGYAGYIDGGASQEEFYKFIKPILEKMDGTEELLVKLNREDLLRKQRTFDNGSIPHQIHLGELHAILRRQEDFYPFLKDNREKIEKILTFRIPYYVGPLARGNSRFAWMTRKSEETITPWNFEEVVDKGASAQSFIERMTNFDKNLPNEKVLPKHSLLYEYFTVYNELTKVKYVTEGMRKPAFLSGEQKKAIVDLLFKTNRKVTVKQLKEDYFKKIECFDSVEISGVEDRFNASLGTYHDLLKIIKDKDFLDNEENEDILEDIVLTLTLFEDREMIEERLKTYAHLFDDKVMKQLKRRRYTGWGRLSRKLINGIRDKQSGKTILDFLKSDGFANRNFMQLIHDDSLTFKEDIQKAQVSGQGDSLHEHIANLAGSPAIKKGILQTVKVVDELVKVMGRHKPENIVIEMARENQTTQKGQKNSRERMKRIEEGIKELGSQILKEHPVENTQLQNEKLYLYYLQNGRDMYVDQELDINRLSDYDVDHIVPQSFLKDDSIDNKVLTRSDKARGKSDNVPSEEVVKKMKNYWRQLLNAKLITQRKFDNLTKAERGGLSELDKAGFIKRQLVETRQITKHVAQILDSRMNTKYDENDKLIREVKVITLKSKLVSDFRKDFQFYKVREINNYHHAHDAYLNAVVGTALIKKYPKLESEFVYGDYKVYDVRKMIAKSEQEIGKATAKYFFYSNIMNFFKTEITLANGEIRKRPLIETNGETGEIVWDKGRDFATVRKVLSMPQVNIVKKTEVQTGGFSKESILPKRNSDKLIARKKDWDPKKYGGFDSPTVAYSVLVVAKVEKGKSKKLKSVKELLGITIMERSSFEKNPIDFLEAKGYKEVKKDLIIKLPKYSLFELENGRKRMLASAGELQKGNELALPSKYVNFLYLASHYEKLKGSPEDNEQKQLFVEQHKHYLDEIIEQISEFSKRVILADANLDKVLSAYNKHRDKPIREQAENIIHLFTLTNLGAPAAFKYFDTTIDRKRYTSTKEVLDATLIHQSITGLYETRIDLSQLGGDGGPAPGSSGGTLNIEDEYRLHETSKEPDVPLGSTWLSDFPQAWAETGGMGLAVRQAPLIIPLKATSTPVSIKQYPMSQEARLGIKPHIQRLLDQGILVPCQSPWNTPLLPVKKPGTNDYRPVQDLREVNKRVEDIHPTVPNPYNLLSGLPPSHQWYTVLDLKDAFFCLRLHPTSQPLFAFEWRDPEMGISGQLTWTRLPQGFKNSPTLFNEALHRDLADFRIQHPDLILLQYVDDLLLAATSEQDCQRGTRALLQTLGNLGYRASAKKAQICQKQVKYLGYLLKEGQRWLTEARKETVMGQPTPKTPRQLREFLGKAGFCRLFIPGFAEMAAPLYPLTKPGTLFNWGPDQQKAYQEIKQALLTAPALGLPDLTKPFELFVDEKQGYAKGVLTQKLGPWRRPVAYLSKKLDPVAAGWPPCLRMVAAIAVLTKDAGKLTMGQPLVILAPHAVEALVKQPPDRWLSNARMTHYQAMLLDTDRVQFGPVVALNPATLLPLPEKEAPHDCLEILAETHGTRPDLTDQPIPDADYTWYTDGSSFLQEGQRRAGAAVTTETEVIWARALPAGTSAQRAELIALTQALKMAEGKKLNVYTDSRYAFATAHVHGEIYRRRGWLTSEGREIKNKNEILALLKALFLPKRLSIIHCPGHQKGNSAEARGNRMADQAAREAAMKAVLETSTLLAGKRTADGSEFEKRTADGSEFESPKKKAKVE

SEQ ID NO: 6765 - protein, 2095 aa, synthetic construct
MPAAKRVKLDGGDKKYSIGLDIGTNSVGWAVITDEYKVPSKKFKVLGNTDRHSIKKNLIGALLFDSGETAEATRLKRTARRRYTRRKNRICYLQEIFSNEMAKVDDSFFHRLEESFLVEEDKKHERHPIFGNIVDEVAYHEKYPTIYHLRKKLVDSTDKADLRLIYLALAHMIKFRGHFLIEGDLNPDNSDVDKLFIQLVQTYNQLFEENPINASGVDAKAILSARLSKSRRLENLIAQLPGEKKNGLFGNLIALSLGLTPNFKSNFDLAEDAKLQLSKDTYDDDLDNLLAQIGDQYADLFLAAKNLSDAILLSDILRVNTEITKAPLSASMIKRYDEHHQDLTLLKALVRQQLPEKYKEIFFDQSKNGYAGYIDGGASQEEFYKFIKPILEKMDGTEELLVKLNREDLLRKQRTFDNGSIPHQIHLGELHAILRRQEDFYPFLKDNREKIEKILTFRIPYYVGPLARGNSRFAWMTRKSEETITPWNFEEVVDKGASAQSFIERMTNFDKNLPNEKVLPKHSLLYEYFTVYNELTKVKYVTEGMRKPAFLSGEQKKAIVDLLFKTNRKVTVKQLKEDYFKKIECFDSVEISGVEDRFNASLGTYHDLLKIIKDKDFLDNEENEDILEDIVLTLTLFEDREMIEERLKTYAHLFDDKVMKQLKRRRYTGWGRLSRKLINGIRDKQSGKTILDFLKSDGFANRNFMQLIHDDSLTFKEDIQKAQVSGQGDSLHEHIANLAGSPAIKKGILQTVKVVDELVKVMGRHKPENIVIEMARENQTTQKGQKNSRERMKRIEEGIKELGSQILKEHPVENTQLQNEKLYLYYLQNGRDMYVDQELDINRLSDYDVDHIVPQSFLKDDSIDNKVLTRSDKARGKSDNVPSEEVVKKMKNYWRQLLNAKLITQRKFDNLTKAERGGLSELDKAGFIKRQLVETRQITKHVAQILDSRMNTKYDENDKLIREVKVITLKSKLVSDFRKDFQFYKVREINNYHHAHDAYLNAVVGTALIKKYPKLESEFVYGDYKVYDVRKMIAKSEQEIGKATAKYFFYSNIMNFFKTEITLANGEIRKRPLIETNGETGEIVWDKGRDFATVRKVLSMPQVNIVKKTEVQTGGFSKESILPKRNSDKLIARKKDWDPKKYGGFDSPTVAYSVLVVAKVEKGKSKKLKSVKELLGITIMERSSFEKNPIDFLEAKGYKEVKKDLIIKLPKYSLFELENGRKRMLASAGELQKGNELALPSKYVNFLYLASHYEKLKGSPEDNEQKQLFVEQHKHYLDEIIEQISEFSKRVILADANLDKVLSAYNKHRDKPIREQAENIIHLFTLTNLGAPAAFKYFDTTIDRKRYTSTKEVLDATLIHQSITGLYETRIDLSQLGGDGGEAAAKPAPGGTAPLEEEYRLFLEAPIQNVTLLEQWKREIPKVWAEINPPGLASTQAPIHVQLLSTALPVRVRQYPITLEAKRSLRETIRKFRAAGILRPVHSPWNTPLLPVRKSGTSEYRMVQDLREVNKRVETIHPTVPNPYTLLSLLPPDRIWYSVLDLKDAFFCIPLAPESQLIFAFEWADAEEGESGQLTWTRLPQGFKNSPTLFNEALNRDLQGFRLDHPSVSLLQYVDDLLIAADTQAACLSATRDLLMTLAELGYRVSGKKAQLCQEEVTYLGFKIHKGSRSLSNSRTQAILQIPVPKTKRQVREFLGKIGYCRLFIPGFAELAQPLYAATRPGNDPLVWGEKEEEAFQSLKLALTQPPALALPSLDKPFQLFVEETSGAAKGVLTQALGPWKRPVAYLSKRLDPVAAGWPRCLRAIAAAALLTREASKLTFGQDIEITSSHNLESLLRSPPDKWLTNARITQYQVLLLDPPRVRFKQTAALNPATLLPETDDTLPIHHCLDTLDSLTSTRPDLTDQPLAQAEATLFTDGSSYIRDGKRYAGAAVVTLDSVIWAEPLPIGTSAQKAELIALTKALEWSKDKSVNIYTDSRYAFATLHVHGMIYRERGWLTAGGKAIKNAPEILALLTAVWLPKRVAVMHCKGHQKDDAPTSTGNRRADEVAREVAIRPLSTQATISAGKRTADGSEFEKRTADGSEFESPKKKAKVE

SEQ ID NO: 6766 - protein, 2084 aa, synthetic construct
MPAAKRVKLDGGDKKYSIGLDIGTNSVGWAVITDEYKVPSKKFKVLGNTDRHSIKKNLIGALLFDSGETAEATRLKRTARRRYTRRKNRICYLQEIFSNEMAKVDDSFFHRLEESFLVEEDKKHERHPIFGNIVDEVAYHEKYPTIYHLRKKLVDSTDKADLRLIYLALAHMIKFRGHFLIEGDLNPDNSDVDKLFIQLVQTYNQLFEENPINASGVDAKAILSARLSKSRRLENLIAQLPGEKKNGLFGNLIALSLGLTPNFKSNFDLAEDAKLQLSKDTYDDDLDNLLAQIGDQYADLFLAAKNLSDAILLSDILRVNTEITKAPLSASMIKRYDEHHQDLTLLKALVRQQLPEKYKEIFFDQSKNGYAGYIDGGASQEEFYKFIKPILEKMDGTEELLVKLNREDLLRKQRTFDNGSIPHQIHLGELHAILRRQEDFYPFLKDNREKIEKILTFRIPYYVGPLARGNSRFAWMTRKSEETITPWNFEEVVDKGASAQSFIERMTNFDKNLPNEKVLPKHSLLYEYFTVYNELTKVKYVTEGMRKPAFLSGEQKKAIVDLLFKTNRKVTVKQLKEDYFKKIECFDSVEISGVEDRFNASLGTYHDLLKIIKDKDFLDNEENEDILEDIVLTLTLFEDREMIEERLKTYAHLFDDKVMKQLKRRRYTGWGRLSRKLINGIRDKQSGKTILDFLKSDGFANRNFMQLIHDDSLTFKEDIQKAQVSGQGDSLHEHIANLAGSPAIKKGILQTVKVVDELVKVMGRHKPENIVIEMARENQTTQKGQKNSRERMKRIEEGIKELGSQILKEHPVENTQLQNEKLYLYYLQNGRDMYVDQELDINRLSDYDVDHIVPQSFLKDDSIDNKVLTRSDKARGKSDNVPSEEVVKKMKNYWRQLLNAKLITQRKFDNLTKAERGGLSELDKAGFIKRQLVETRQITKHVAQILDSRMNTKYDENDKLIREVKVITLKSKLVSDFRKDFQFYKVREINNYHHAHDAYLNAVVGTALIKKYPKLESEFVYGDYKVYDVRKMIAKSEQEIGKATAKYFFYSNIMNFFKTEITLANGEIRKRPLIETNGETGEIVWDKGRDFATVRKVLSMPQVNIVKKTEVQTGGFSKESILPKRNSDKLIARKKDWDPKKYGGFDSPTVAYSVLVVAKVEKGKSKKLKSVKELLGITIMERSSFEKNPIDFLEAKGYKEVKKDLIIKLPKYSLFELENGRKRMLASAGELQKGNELALPSKYVNFLYLASHYEKLKGSPEDNEQKQLFVEQHKHYLDEIIEQISEFSKRVILADANLDKVLSAYNKHRDKPIREQAENIIHLFTLTNLGAPAAFKYFDTTIDRKRYTSTKEVLDATLIHQSITGLYETRIDLSQLGGDGGEAAAKPAPGGVPWILKKPLELTIKLDLEEQQGTLLNNSILSKKGKEELKQLFEKYSALWQSWENQVGHRRIRPHKIATGTVKPTPQKQYHINPKAKPDIQIVINDLLKQGVLIQKESTMNTPVYPVPKPNGRWRMVLDYRAVNKVTPLIAVQNQHSYGILGSLFKGRYKTTIDLSNGFWAHPIVPEDYWITAFTWQGKQYCWTVLPQGFLNSPGLFNGDVVDLLQGIPNVEVYVDDVYISHDSEKEHLEYLDILFNRLKEAGYIISLKKSNIANSIVDFLGFQITNEGRGLTDTFKEKLENITAPTTLKQLQSILGLLNFARNFIPDFTELIAPLYALIPKSPKNYVPWQIEHSTTLETLITKLNGAEYLQGRKGDKTLIMKVNASYTTGYIRYYNEGEKKPISYVSIVFSKTELKFTELEKLLTTVHKGLLKALDLSMGQNIHVYSPIVSMQNIQKTPQTAKKALASRWLSWLSYLEDPRIRFFYDPQMPALKDLPAVDTGKDNKKHPSNFQHIFYTDGSAITSPTKEGHLNAGMGIVYFINKDGNLQKQQEWSISLGNHTAQFAEIAAFEFALKKCLPLGGNILVVTDSNYVAKAYNEELDVWASNGFVNNRKKPLKHISKWKSVADLKRLRPDVVVTHEPGHQKLDSSPHAYGNNLADQLATQASFKVHAGKRTADGSEFEKRTADGSEFESPKKKAKVE

SEQ ID NO: 6767 - protein, 2084 aa, synthetic construct
MPAAKRVKLDGGDKKYSIGLDIGTNSVGWAVITDEYKVPSKKFKVLGNTDRHSIKKNLIGALLFDSGETAEATRLKRTARRRYTRRKNRICYLQEIFSNEMAKVDDSFFHRLEESFLVEEDKKHERHPIFGNIVDEVAYHEKYPTIYHLRKKLVDSTDKADLRLIYLALAHMIKFRGHFLIEGDLNPDNSDVDKLFIQLVQTYNQLFEENPINASGVDAKAILSARLSKSRRLENLIAQLPGEKKNGLFGNLIALSLGLTPNFKSNFDLAEDAKLQLSKDTYDDDLDNLLAQIGDQYADLFLAAKNLSDAILLSDILRVNTEITKAPLSASMIKRYDEHHQDLTLLKALVRQQLPEKYKEIFFDQSKNGYAGYIDGGASQEEFYKFIKPILEKMDGTEELLVKLNREDLLRKQRTFDNGSIPHQIHLGELHAILRRQEDFYPFLKDNREKIEKILTFRIPYYVGPLARGNSRFAWMTRKSEETITPWNFEEVVDKGASAQSFIERMTNFDKNLPNEKVLPKHSLLYEYFTVYNELTKVKYVTEGMRKPAFLSGEQKKAIVDLLFKTNRKVTVKQLKEDYFKKIECFDSVEISGVEDRFNASLGTYHDLLKIIKDKDFLDNEENEDILEDIVLTLTLFEDREMIEERLKTYAHLFDDKVMKQLKRRRYTGWGRLSRKLINGIRDKQSGKTILDFLKSDGFANRNFMQLIHDDSLTFKEDIQKAQVSGQGDSLHEHIANLAGSPAIKKGILQTVKVVDELVKVMGRHKPENIVIEMARENQTTQKGQKNSRERMKRIEEGIKELGSQILKEHPVENTQLQNEKLYLYYLQNGRDMYVDQELDINRLSDYDVDHIVPQSFLKDDSIDNKVLTRSDKARGKSDNVPSEEVVKKMKNYWRQLLNAKLITQRKFDNLTKAERGGLSELDKAGFIKRQLVETRQITKHVAQILDSRMNTKYDENDKLIREVKVITLKSKLVSDFRKDFQFYKVREINNYHHAHDAYLNAVVGTALIKKYPKLESEFVYGDYKVYDVRKMIAKSEQEIGKATAKYFFYSNIMNFFKTEITLANGEIRKRPLIETNGETGEIVWDKGRDFATVRKVLSMPQVNIVKKTEVQTGGFSKESILPKRNSDKLIARKKDWDPKKYGGFDSPTVAYSVLVVAKVEKGKSKKLKSVKELLGITIMERSSFEKNPIDFLEAKGYKEVKKDLIIKLPKYSLFELENGRKRMLASAGELQKGNELALPSKYVNFLYLASHYEKLKGSPEDNEQKQLFVEQHKHYLDEIIEQISEFSKRVILADANLDKVLSAYNKHRDKPIREQAENIIHLFTLTNLGAPAAFKYFDTTIDRKRYTSTKEVLDATLIHQSITGLYETRIDLSQLGGDGGEAAAKPAPGGVPWLTQQPLQLTILVPLQEYQEKILSKTALPEDQKQQLKTLFVKYDNLWQHWENQVGHRKIRPHNIATGDYPPRPQKQYPINPKAKPSIQIVIDDLLKQGVLTPQNSTMNTPVYPVPKPDGRWRMVLDYREVNKTIPLTAAQNQHSAGILATIVRQKYKTTLDLANGFWAHPITPESYWLTAFTWQGKQYCWTRLPQGFLNSPALFNADVVDLLKEIPNVQVYVDDIYLSHDDPKEHVQQLEKVFQILLQAGYVVSLKKSEIGQKTVEFLGFNITKEGRGLTDTFKTKLLNITPPKDLKQLQSILGKLNFARNFIPNFAELVQPLYNLIAPAKGKYIEWSEENTKQLNMVIEALNTASNLEERLPEQRLVIKVNTSPSAGYVRYYNETGKKPIMYLNYVFSKAELKFSMLEKLLTTMHKALIKAMDLAMGQEILVYSPIVSMTKIQKTPLPERKALPIRWITWMTYLEDPRIQFHYDKTLPELKHIPDVYTSSQSPVKHPSQYEGVFYTDGSAIKSPDPTKSNNAGMGIVHATYKPEYQVLNQWSIPLGNHTAQMAEIAAVEFACKKALKIPGPVLVITDSFYVAESANKELPYWKSNGFVNNKKKPLKHISKWKSIAECLSMKPDITIQHEKGISLQIPVFILKGNALADKLATQGSYVVNAGKRTADGSEFEKRTADGSEFESPKKKAKVE

SEQ ID NO: 6768 - protein, 2173 aa, synthetic construct
MPAAKRVKLDGGDKKYSIGLDIGTNSVGWAVITDEYKVPSKKFKVLGNTDRHSIKKNLIGALLFDSGETAEATRLKRTARRRYTRRKNRICYLQEIFSNEMAKVDDSFFHRLEESFLVEEDKKHERHPIFGNIVDEVAYHEKYPTIYHLRKKLVDSTDKADLRLIYLALAHMIKFRGHFLIEGDLNPDNSDVDKLFIQLVQTYNQLFEENPINASGVDAKAILSARLSKSRRLENLIAQLPGEKKNGLFGNLIALSLGLTPNFKSNFDLAEDAKLQLSKDTYDDDLDNLLAQIGDQYADLFLAAKNLSDAILLSDILRVNTEITKAPLSASMIKRYDEHHQDLTLLKALVRQQLPEKYKEIFFDQSKNGYAGYIDGGASQEEFYKFIKPILEKMDGTEELLVKLNREDLLRKQRTFDNGSIPHQIHLGELHAILRRQEDFYPFLKDNREKIEKILTFRIPYYVGPLARGNSRFAWMTRKSEETITPWNFEEVVDKGASAQSFIERMTNFDKNLPNEKVLPKHSLLYEYFTVYNELTKVKYVTEGMRKPAFLSGEQKKAIVDLLFKTNRKVTVKQLKEDYFKKIECFDSVEISGVEDRFNASLGTYHDLLKIIKDKDFLDNEENEDILEDIVLTLTLFEDREMIEERLKTYAHLFDDKVMKQLKRRRYTGWGRLSRKLINGIRDKQSGKTILDFLKSDGFANRNFMQLIHDDSLTFKEDIQKAQVSGQGDSLHEHIANLAGSPAIKKGILQTVKVVDELVKVMGRHKPENIVIEMARENQTTQKGQKNSRERMKRIEEGIKELGSQILKEHPVENTQLQNEKLYLYYLQNGRDMYVDQELDINRLSDYDVDHIVPQSFLKDDSIDNKVLTRSDKARGKSDNVPSEEVVKKMKNYWRQLLNAKLITQRKFDNLTKAERGGLSELDKAGFIKRQLVETRQITKHVAQILDSRMNTKYDENDKLIREVKVITLKSKLVSDFRKDFQFYKVREINNYHHAHDAYLNAVVGTALIKKYPKLESEFVYGDYKVYDVRKMIAKSEQEIGKATAKYFFYSNIMNFFKTEITLANGEIRKRPLIETNGETGEIVWDKGRDFATVRKVLSMPQVNIVKKTEVQTGGFSKESILPKRNSDKLIARKKDWDPKKYGGFDSPTVAYSVLVVAKVEKGKSKKLKSVKELLGITIMERSSFEKNPIDFLEAKGYKEVKKDLIIKLPKYSLFELENGRKRMLASAGELQKGNELALPSKYVNFLYLASHYEKLKGSPEDNEQKQLFVEQHKHYLDEIIEQISEFSKRVILADANLDKVLSAYNKHRDKPIREQAENIIHLFTLTNLGAPAAFKYFDTTIDRKRYTSTKEVLDATLIHQSITGLYETRIDLSQLGGDGGEAAAKPAPGGMNPLQLLQPLPAEIKGTKLLAHWNSGATITCIPESFLEDEQPIKKTLIKTIHGEKQQNVYYVTFKVKGRKVEAEVIASPYEYILLSPTDVPWLTQQPLQLTILVPLQEYQEKILSKTALPEDQKQQLKTLFVKYDNLWQHWENQVGHRKIRPHNIATGDYPPRPQKQYPINPKAKPSIQIVIDDLLKQGVLTPQNSTMNTPVYPVPKPDGRWRMVLDYREVNKTIPLTAAQNQHSAGILATIVRQKYKTTLDLANGFWAHPITPESYWLTAFTWQGKQYCWTRLPQGFLNSPALFNADVVDLLKEIPNVQVYVDDIYLSHDDPKEHVQQLEKVFQILLQAGYVVSLKKSEIGQKTVEFLGFNITKEGRGLTDTFKTKLLNITPPKDLKQLQSILGKLNFARNFIPNFAELVQPLYNLIAPAKGKYIEWSEENTKQLNMVIEALNTASNLEERLPEQRLVIKVNTSPSAGYVRYYNETGKKPIMYLNYVFSKAELKFSMLEKLLTTMHKALIKAMDLAMGQEILVYSPIVSMTKIQKTPLPERKALPIRWITWMTYLEDPRIQFHYDKTLPELKHIPDVYTSSQSPVKHPSQYEGVFYTDGSAIKSPDPTKSNNAGMGIVHATYKPEYQVLNQWSIPLGNHTAQMAEIAAVEFACKKALKIPGPVLVITDSFYVAESANKELPYWKSNGFVNNKKKPLKHISKWKSIAECLSMKPDITIQHEKGISLQIPVFILKGNALADKLATQGSYVVNAGKRTADGSEFEKRTADGSEFESPKKKAKVE

SEQ ID NO: 6769 - protein, 2091 aa, synthetic construct
MPAAKRVKLDGGDKKYSIGLDIGTNSVGWAVITDEYKVPSKKFKVLGNTDRHSIKKNLIGALLFDSGETAEATRLKRTARRRYTRRKNRICYLQEIFSNEMAKVDDSFFHRLEESFLVEEDKKHERHPIFGNIVDEVAYHEKYPTIYHLRKKLVDSTDKADLRLIYLALAHMIKFRGHFLIEGDLNPDNSDVDKLFIQLVQTYNQLFEENPINASGVDAKAILSARLSKSRRLENLIAQLPGEKKNGLFGNLIALSLGLTPNFKSNFDLAEDAKLQLSKDTYDDDLDNLLAQIGDQYADLFLAAKNLSDAILLSDILRVNTEITKAPLSASMIKRYDEHHQDLTLLKALVRQQLPEKYKEIFFDQSKNGYAGYIDGGASQEEFYKFIKPILEKMDGTEELLVKLNREDLLRKQRTFDNGSIPHQIHLGELHAILRRQEDFYPFLKDNREKIEKILTFRIPYYVGPLARGNSRFAWMTRKSEETITPWNFEEVVDKGASAQSFIERMTNFDKNLPNEKVLPKHSLLYEYFTVYNELTKVKYVTEGMRKPAFLSGEQKKAIVDLLFKTNRKVTVKQLKEDYFKKIECFDSVEISGVEDRFNASLGTYHDLLKIIKDKDFLDNEENEDILEDIVLTLTLFEDREMIEERLKTYAHLFDDKVMKQLKRRRYTGWGRLSRKLINGIRDKQSGKTILDFLKSDGFANRNFMQLIHDDSLTFKEDIQKAQVSGQGDSLHEHIANLAGSPAIKKGILQTVKVVDELVKVMGRHKPENIVIEMARENQTTQKGQKNSRERMKRIEEGIKELGSQILKEHPVENTQLQNEKLYLYYLQNGRDMYVDQELDINRLSDYDVDHIVPQSFLKDDSIDNKVLTRSDKARGKSDNVPSEEVVKKMKNYWRQLLNAKLITQRKFDNLTKAERGGLSELDKAGFIKRQLVETRQITKHVAQILDSRMNTKYDENDKLIREVKVITLKSKLVSDFRKDFQFYKVREINNYHHAHDAYLNAVVGTALIKKYPKLESEFVYGDYKVYDVRKMIAKSEQEIGKATAKYFFYSNIMNFFKTEITLANGEIRKRPLIETNGETGEIVWDKGRDFATVRKVLSMPQVNIVKKTEVQTGGFSKESILPKRNSDKLIARKKDWDPKKYGGFDSPTVAYSVLVVAKVEKGKSKKLKSVKELLGITIMERSSFEKNPIDFLEAKGYKEVKKDLIIKLPKYSLFELENGRKRMLASAGELQKGNELALPSKYVNFLYLASHYEKLKGSPEDNEQKQLFVEQHKHYLDEIIEQISEFSKRVILADANLDKVLSAYNKHRDKPIREQAENIIHLFTLTNLGAPAAFKYFDTTIDRKRYTSTKEVLDATLIHQSITGLYETRIDLSQLGGDGGEAAAKPAPGGVLNLEEEYRLHEKPVPSSIDPSWLQLFPTVWAERAGMGLANQVPPVVVELRSGASPVAVRQYPMSKEAREGIRPHIQKFLDLGVLVPCRSPWNTPLLPVKKPGTNDYRPVQDLREINKRVQDIHPTVPNPYNLLSSLPPSYTWYSVLDLKDAFFCLRLHPNSQPLFAFEWKDPEKGNTGQLTWTRLPQGFKNSPTLFNEALHRDLAPFRALNPQVVLLQYVDDLLVAAPTYEDCKKGTQKLLQELSKLGYRVSAKKAQLCQREVTYLGYLLKEGKRWLTPARKATVMKIPVPTTPRQVREFLGKAGFCRLFIPGFASLAAPLYPLTKPSIPFIWTEEHQQAFDHIKKALLSAPALALPDLTKPFTLYIDERAGVARGVLTQTLGPWRRPVAYLSKKLDPVASGWPTCLKAVAAVALLLKDADKLTLGQNVTVIASHSLESIVRQPPDRWMTNARMTHYQSLLLNERVSFAPPAVLNPATLLPVESEATPVHRCSEILAEETGTRRDLEDQPLPGVPTWYTDGSSFITEGKRRAGAPIVDGKRTVWASSLPEGTSAQKAELVALTQALRLAEGKNINIYTDSRYAFATAHIHGAIYKQRGWLTSAGKDIKNKEEILALLEAIHLPRRVAIIHCPGHQRGSNPVATGNRRADEAAKQAALSTRVLAGTTKPAGKRTADGSEFEKRTADGSEFESPKKKAKVE

SEQ ID NO: 6770 - protein, 2124 aa, synthetic construct
MPAAKRVKLDGGDKKYSIGLDIGTNSVGWAVITDEYKVPSKKFKVLGNTDRHSIKKNLIGALLFDSGETAEATRLKRTARRRYTRRKNRICYLQEIFSNEMAKVDDSFFHRLEESFLVEEDKKHERHPIFGNIVDEVAYHEKYPTIYHLRKKLVDSTDKADLRLIYLALAHMIKFRGHFLIEGDLNPDNSDVDKLFIQLVQTYNQLFEENPINASGVDAKAILSARLSKSRRLENLIAQLPGEKKNGLFGNLIALSLGLTPNFKSNFDLAEDAKLQLSKDTYDDDLDNLLAQIGDQYADLFLAAKNLSDAILLSDILRVNTEITKAPLSASMIKRYDEHHQDLTLLKALVRQQLPEKYKEIFFDQSKNGYAGYIDGGASQEEFYKFIKPILEKMDGTEELLVKLNREDLLRKQRTFDNGSIPHQIHLGELHAILRRQEDFYPFLKDNREKIEKILTFRIPYYVGPLARGNSRFAWMTRKSEETITPWNFEEVVDKGASAQSFIERMTNFDKNLPNEKVLPKHSLLYEYFTVYNELTKVKYVTEGMRKPAFLSGEQKKAIVDLLFKTNRKVTVKQLKEDYFKKIECFDSVEISGVEDRFNASLGTYHDLLKIIKDKDFLDNEENEDILEDIVLTLTLFEDREMIEERLKTYAHLFDDKVMKQLKRRRYTGWGRLSRKLINGIRDKQSGKTILDFLKSDGFANRNFMQLIHDDSLTFKEDIQKAQVSGQGDSLHEHIANLAGSPAIKKGILQTVKVVDELVKVMGRHKPENIVIEMARENQTTQKGQKNSRERMKRIEEGIKELGSQILKEHPVENTQLQNEKLYLYYLQNGRDMYVDQELDINRLSDYDVDHIVPQSFLKDDSIDNKVLTRSDKARGKSDNVPSEEVVKKMKNYWRQLLNAKLITQRKFDNLTKAERGGLSELDKAGFIKRQLVETRQITKHVAQILDSRMNTKYDENDKLIREVKVITLKSKLVSDFRKDFQFYKVREINNYHHAHDAYLNAVVGTALIKKYPKLESEFVYGDYKVYDVRKMIAKSEQEIGKATAKYFFYSNIMNFFKTEITLANGEIRKRPLIETNGETGEIVWDKGRDFATVRKVLSMPQVNIVKKTEVQTGGFSKESILPKRNSDKLIARKKDWDPKKYGGFDSPTVAYSVLVVAKVEKGKSKKLKSVKELLGITIMERSSFEKNPIDFLEAKGYKEVKKDLIIKLPKYSLFELENGRKRMLASAGELQKGNELALPSKYVNFLYLASHYEKLKGSPEDNEQKQLFVEQHKHYLDEIIEQISEFSKRVILADANLDKVLSAYNKHRDKPIREQAENIIHLFTLTNLGAPAAFKYFDTTIDRKRYTSTKEVLDATLIHQSITGLYETRIDLSQLGGDGGEAAAKPAPGGLLGRDLLTKLKAQIQFSTEGPQVTWEDRPAMCLVLNLEEEYRLHEKPVPPSIDPSWLQLFPMVWAEKAGMGLANQVPPVVVELKSDASPVAVRQYPMSKEAREGIRPHIQRFLDLGILVPCQSPWNTPLLPVKKPGTNDYRPVQDLREVNKRVQDIHPTVPNPYNLLSSLPPSHTWYSVLDLKDAFFCLKLHPNSQPLFAFEWRDPEKGNTGQLTWTRLPQGFKNSPTLFNEALHRDLASFRALNPQVVMLQYVDDLLVAAPTYRDCKEGTRRLLQELSKLGYRVSAKKAQLCREEVTYLGYLLKGGKRWLTPARKATVMKIPTPTTPRQVREFLGTAGFCRLWIPGFASLAAPLYPLTRPKVPFTWTEAHQEAFGRIKEALLSAPALALPDLTKPFALYVDEKEGVARGVLTQTLGPWRRPVAYLSKKLDPVASGWPTCLKAIAAVALLLKDADKLTLGQNVLVIAPHNLESIVRQPPDRWMTNARMTHYQSLLLNERVSFAPPAILNPATLLPVESDDTPIHICSEILAEETGTRPDLRDQPLPGVPAWYTDGSSFIMDGRRQAGAAIVDNKRTVWASNLPEGTSAQKAELIALTQALRLAEGKSINIYTDSRYAFATAHVHGAIYKQRGWLTSAGKDIKNKEEILALLEAIHLPKRVAIIHCPGHQRGTDPVATGNRKADEAAKQAAQSTRILTETTKNAGKRTADGSEFEKRTADGSEFESPKKKAKVE

SEQ ID NO: 6771 - protein, 2124 aa, synthetic construct
MPAAKRVKLDGGDKKYSIGLDIGTNSVGWAVITDEYKVPSKKFKVLGNTDRHSIKKNLIGALLFDSGETAEATRLKRTARRRYTRRKNRICYLQEIFSNEMAKVDDSFFHRLEESFLVEEDKKHERHPIFGNIVDEVAYHEKYPTIYHLRKKLVDSTDKADLRLIYLALAHMIKFRGHFLIEGDLNPDNSDVDKLFIQLVQTYNQLFEENPINASGVDAKAILSARLSKSRRLENLIAQLPGEKKNGLFGNLIALSLGLTPNFKSNFDLAEDAKLQLSKDTYDDDLDNLLAQIGDQYADLFLAAKNLSDAILLSDILRVNTEITKAPLSASMIKRYDEHHQDLTLLKALVRQQLPEKYKEIFFDQSKNGYAGYIDGGASQEEFYKFIKPILEKMDGTEELLVKLNREDLLRKQRTFDNGSIPHQIHLGELHAILRRQEDFYPFLKDNREKIEKILTFRIPYYVGPLARGNSRFAWMTRKSEETITPWNFEEVVDKGASAQSFIERMTNFDKNLPNEKVLPKHSLLYEYFTVYNELTKVKYVTEGMRKPAFLSGEQKKAIVDLLFKTNRKVTVKQLKEDYFKKIECFDSVEISGVEDRFNASLGTYHDLLKIIKDKDFLDNEENEDILEDIVLTLTLFEDREMIEERLKTYAHLFDDKVMKQLKRRRYTGWGRLSRKLINGIRDKQSGKTILDFLKSDGFANRNFMQLIHDDSLTFKEDIQKAQVSGQGDSLHEHIANLAGSPAIKKGILQTVKVVDELVKVMGRHKPENIVIEMARENQTTQKGQKNSRERMKRIEEGIKELGSQILKEHPVENTQLQNEKLYLYYLQNGRDMYVDQELDINRLSDYDVDHIVPQSFLKDDSIDNKVLTRSDKARGKSDNVPSEEVVKKMKNYWRQLLNAKLITQRKFDNLTKAERGGLSELDKAGFIKRQLVETRQITKHVAQILDSRMNTKYDENDKLIREVKVITLKSKLVSDFRKDFQFYKVREINNYHHAHDAYLNAVVGTALIKKYPKLESEFVYGDYKVYDVRKMIAKSEQEIGKATAKYFFYSNIMNFFKTEITLANGEIRKRPLIETNGETGEIVWDKGRDFATVRKVLSMPQVNIVKKTEVQTGGFSKESILPKRNSDKLIARKKDWDPKKYGGFDSPTVAYSVLVVAKVEKGKSKKLKSVKELLGITIMERSSFEKNPIDFLEAKGYKEVKKDLIIKLPKYSLFELENGRKRMLASAGELQKGNELALPSKYVNFLYLASHYEKLKGSPEDNEQKQLFVEQHKHYLDEIIEQISEFSKRVILADANLDKVLSAYNKHRDKPIREQAENIIHLFTLTNLGAPAAFKYFDTTIDRKRYTSTKEVLDATLIHQSITGLYETRIDLSQLGGDGGEAAAKPAPGGLLGRDLLTKLKAQIQFSTEGPQVTWEDRPAMCLVLNLEEEYRLHEKPVPPSIDPSWLQLFPMVWAEKAGMGLANQVPPVVVELKSDASPVAVRQYPMSKEAREGIRPHIQRFLDLGILVPCQSPWNTPLLPVKKPGTNDYRPVQDLREVNKRVQDIHPTVPNPYNLLSSLPPSHTWYSVLDLKDAFFCLKLHPNSQPLFAFEWRDPEKGNTGQLTWTRLPQGFKNSPTLFNEALHRDLASFRALNPQVVMLQYVDDLLVAAPTYRDCKEGTRRLLQELSKLGYRVSAKKAQLCREEVTYLGYLLKGGKRWLTPARKATVMKIPTPTTPRQVREFLGKAGFCRLFIPGFASLAAPLYPLTRPKVPFTWTEAHQEAFGRIKEALLSAPALALPDLTKPFALYVDEKEGVARGVLTQTLGPWRRPVAYLSKKLDPVASGWPTCLKAIAAVALLLKDADKLTLGQNVLVIAPHNLESIVRQPPDRWMTNARMTHYQSLLLNERVSFAPPAILNPATLLPVESDDTPIHICSEILAEETGTRPDLRDQPLPGVPAWYTDGSSFIMDGRRQAGAAIVDNKRTVWASNLPEGTSAQKAELIALTQALRLAEGKSINIYTDSRYAFATAHVHGAIYKQRGWLTSAGKDIKNKEEILALLEAIHLPKRVAIIHCPGHQRGTDPVATGNRKADEAAKQAAQSTRILTETTKNAGKRTADGSEFEKRTADGSEFESPKKKAKVE

SEQ ID NO: 6772 - protein, 2215 aa, synthetic construct
MPAAKRVKLDGGDKKYSIGLDIGTNSVGWAVITDEYKVPSKKFKVLGNTDRHSIKKNLIGALLFDSGETAEATRLKRTARRRYTRRKNRICYLQEIFSNEMAKVDDSFFHRLEESFLVEEDKKHERHPIFGNIVDEVAYHEKYPTIYHLRKKLVDSTDKADLRLIYLALAHMIKFRGHFLIEGDLNPDNSDVDKLFIQLVQTYNQLFEENPINASGVDAKAILSARLSKSRRLENLIAQLPGEKKNGLFGNLIALSLGLTPNFKSNFDLAEDAKLQLSKDTYDDDLDNLLAQIGDQYADLFLAAKNLSDAILLSDILRVNTEITKAPLSASMIKRYDEHHQDLTLLKALVRQQLPEKYKEIFFDQSKNGYAGYIDGGASQEEFYKFIKPILEKMDGTEELLVKLNREDLLRKQRTFDNGSIPHQIHLGELHAILRRQEDFYPFLKDNREKIEKILTFRIPYYVGPLARGNSRFAWMTRKSEETITPWNFEEVVDKGASAQSFIERMTNFDKNLPNEKVLPKHSLLYEYFTVYNELTKVKYVTEGMRKPAFLSGEQKKAIVDLLFKTNRKVTVKQLKEDYFKKIECFDSVEISGVEDRFNASLGTYHDLLKIIKDKDFLDNEENEDILEDIVLTLTLFEDREMIEERLKTYAHLFDDKVMKQLKRRRYTGWGRLSRKLINGIRDKQSGKTILDFLKSDGFANRNFMQLIHDDSLTFKEDIQKAQVSGQGDSLHEHIANLAGSPAIKKGILQTVKVVDELVKVMGRHKPENIVIEMARENQTTQKGQKNSRERMKRIEEGIKELGSQILKEHPVENTQLQNEKLYLYYLQNGRDMYVDQELDINRLSDYDVDHIVPQSFLKDDSIDNKVLTRSDKARGKSDNVPSEEVVKKMKNYWRQLLNAKLITQRKFDNLTKAERGGLSELDKAGFIKRQLVETRQITKHVAQILDSRMNTKYDENDKLIREVKVITLKSKLVSDFRKDFQFYKVREINNYHHAHDAYLNAVVGTALIKKYPKLESEFVYGDYKVYDVRKMIAKSEQEIGKATAKYFFYSNIMNFFKTEITLANGEIRKRPLIETNGETGEIVWDKGRDFATVRKVLSMPQVNIVKKTEVQTGGFSKESILPKRNSDKLIARKKDWDPKKYGGFDSPTVAYSVLVVAKVEKGKSKKLKSVKELLGITIMERSSFEKNPIDFLEAKGYKEVKKDLIIKLPKYSLFELENGRKRMLASAGELQKGNELALPSKYVNFLYLASHYEKLKGSPEDNEQKQLFVEQHKHYLDEIIEQISEFSKRVILADANLDKVLSAYNKHRDKPIREQAENIIHLFTLTNLGAPAAFKYFDTTIDRKRYTSTKEVLDATLIHQSITGLYETRIDLSQLGGDGGEAAAKPAPGGTLGDQGSRGSDPLPEPRVTLTVEGIPTEFLVNTGAEHSVLTKPMGKMGSKRTVVAGATGSKVYPWTTKRLLKIGQKQVTHSFLVIPECPAPLLGRDLLTKLKAQIQFSTEGPQVTWEDRPAMCLVLNLEEEYRLHEKPVPPSIDPSWLQLFPMVWAEKAGMGLANQVPPVVVELKSDASPVAVRQYPMSKEAREGIRPHIQRFLDLGILVPCQSPWNTPLLPVKKPGTNDYRPVQDLREVNKRVQDIHPTVPNPYNLLSSLPPSHTWYSVLDLKDAFFCLKLHPNSQPLFAFEWRDPEKGNTGQLTWTRLPQGFKNSPTLFNEALHRDLASFRALNPQVVMLQYVDDLLVAAPTYRDCKEGTRRLLQELSKLGYRVSAKKAQLCREEVTYLGYLLKGGKRWLTPARKATVMKIPTPTTPRQVREFLGTAGFCRLWIPGFASLAAPLYPLTRPKVPFTWTEAHQEAFGRIKEALLSAPALALPDLTKPFALYVDEKEGVARGVLTQTLGPWRRPVAYLSKKLDPVASGWPTCLKAIAAVALLLKDADKLTLGQNVLVIAPHNLESIVRQPPDRWMTNARMTHYQSLLLNERVSFAPPAILNPATLLPVESDDTPIHICSEILAEETGTRPDLRDQPLPGVPAWYTDGSSFIMDGRRQAGAAIVDNKRTVWASNLPEGTSAQKAELIALTQALRLAEGKSINIYTDSRYAFATAHVHGAIYKQRGWLTSAGKDIKNKEEILALLEAIHLPKRVAIIHCPGHQRGTDPVATGNRKADEAAKQAAQSTRILTETTKNAGKRTADGSEFEKRTADGSEFESPKKKAKVE

SEQ ID NO: 6773 - protein, 2093 aa, synthetic construct
MPAAKRVKLDGGDKKYSIGLDIGTNSVGWAVITDEYKVPSKKFKVLGNTDRHSIKKNLIGALLFDSGETAEATRLKRTARRRYTRRKNRICYLQEIFSNEMAKVDDSFFHRLEESFLVEEDKKHERHPIFGNIVDEVAYHEKYPTIYHLRKKLVDSTDKADLRLIYLALAHMIKFRGHFLIEGDLNPDNSDVDKLFIQLVQTYNQLFEENPINASGVDAKAILSARLSKSRRLENLIAQLPGEKKNGLFGNLIALSLGLTPNFKSNFDLAEDAKLQLSKDTYDDDLDNLLAQIGDQYADLFLAAKNLSDAILLSDILRVNTEITKAPLSASMIKRYDEHHQDLTLLKALVRQQLPEKYKEIFFDQSKNGYAGYIDGGASQEEFYKFIKPILEKMDGTEELLVKLNREDLLRKQRTFDNGSIPHQIHLGELHAILRRQEDFYPFLKDNREKIEKILTFRIPYYVGPLARGNSRFAWMTRKSEETITPWNFEEVVDKGASAQSFIERMTNFDKNLPNEKVLPKHSLLYEYFTVYNELTKVKYVTEGMRKPAFLSGEQKKAIVDLLFKTNRKVTVKQLKEDYFKKIECFDSVEISGVEDRFNASLGTYHDLLKIIKDKDFLDNEENEDILEDIVLTLTLFEDREMIEERLKTYAHLFDDKVMKQLKRRRYTGWGRLSRKLINGIRDKQSGKTILDFLKSDGFANRNFMQLIHDDSLTFKEDIQKAQVSGQGDSLHEHIANLAGSPAIKKGILQTVKVVDELVKVMGRHKPENIVIEMARENQTTQKGQKNSRERMKRIEEGIKELGSQILKEHPVENTQLQNEKLYLYYLQNGRDMYVDQELDINRLSDYDVDHIVPQSFLKDDSIDNKVLTRSDKARGKSDNVPSEEVVKKMKNYWRQLLNAKLITQRKFDNLTKAERGGLSELDKAGFIKRQLVETRQITKHVAQILDSRMNTKYDENDKLIREVKVITLKSKLVSDFRKDFQFYKVREINNYHHAHDAYLNAVVGTALIKKYPKLESEFVYGDYKVYDVRKMIAKSEQEIGKATAKYFFYSNIMNFFKTEITLANGEIRKRPLIETNGETGEIVWDKGRDFATVRKVLSMPQVNIVKKTEVQTGGFSKESILPKRNSDKLIARKKDWDPKKYGGFDSPTVAYSVLVVAKVEKGKSKKLKSVKELLGITIMERSSFEKNPIDFLEAKGYKEVKKDLIIKLPKYSLFELENGRKRMLASAGELQKGNELALPSKYVNFLYLASHYEKLKGSPEDNEQKQLFVEQHKHYLDEIIEQISEFSKRVILADANLDKVLSAYNKHRDKPIREQAENIIHLFTLTNLGAPAAFKYFDTTIDRKRYTSTKEVLDATLIHQSITGLYETRIDLSQLGGDGGEAAAKPAPGGTLNLEDEYRLYETSAEPEVSPGSTWLSDFPQAWAETGGMGLAVRQAPLIIPLKATSTPVSIKQYPMSQEAKLGIKPHIQRLLDQGILVPCQSPWNTPLLPVKKPGTNDYRPVQDLREVNKRVEDIHPTVPNPYNLLSGLPPSHRWYTVLDLKDAFFCLRLHPTSQPLFAFEWRDPGMGISGQLTWTRLPQGFKNSPTLFNEALHRDLADFRIQHPDLILLQYVDDILLAATSELDCQQGTRALLLTLGNLGYRASAKKAQLCQKQVKYLGYLLKEGQRWLTEARKETVMGQPTPKTPRQLREFLGKAGFCRLFIPGFAEMAAPLYPLTKPGTLFNWGPDQQKAYQEIKQALLTAPALGLPDLTKPFELFVDEKQGYAKGVLTQKLGPWRRPVAYLSKKLDPVAAGWPPCLRMVAAIAVLRKDAGKLTMGQPLVILAPHAVEALVKQPPDRWLSNARMTHYQAMLLDTDRVQFGPVVALNPATLLPLPEEGAPHDCLEILAETHGTRPDLTDQPIPDADHTWYTDGSSFLQEGQRKAGAAVTTETEVIWARALPAGTSAQRAELIALTQALKMAEGKRLNVYTDSRYAFATAHIHGEIYRRRGWLTSEGREIKNKSEILALLKALFLPKRLSIIHCLGHQKGDSAEARGNRLADQAAREAAIKTPPDTSTLLAGKRTADGSEFEKRTADGSEFESPKKKAKVE

SEQ ID NO: 6774 - protein, 2093 aa, synthetic construct
MPAAKRVKLDGGDKKYSIGLDIGTNSVGWAVITDEYKVPSKKFKVLGNTDRHSIKKNLIGALLFDSGETAEATRLKRTARRRYTRRKNRICYLQEIFSNEMAKVDDSFFHRLEESFLVEEDKKHERHPIFGNIVDEVAYHEKYPTIYHLRKKLVDSTDKADLRLIYLALAHMIKFRGHFLIEGDLNPDNSDVDKLFIQLVQTYNQLFEENPINASGVDAKAILSARLSKSRRLENLIAQLPGEKKNGLFGNLIALSLGLTPNFKSNFDLAEDAKLQLSKDTYDDDLDNLLAQIGDQYADLFLAAKNLSDAILLSDILRVNTEITKAPLSASMIKRYDEHHQDLTLLKALVRQQLPEKYKEIFFDQSKNGYAGYIDGGASQEEFYKFIKPILEKMDGTEELLVKLNREDLLRKQRTFDNGSIPHQIHLGELHAILRRQEDFYPFLKDNREKIEKILTFRIPYYVGPLARGNSRFAWMTRKSEETITPWNFEEVVDKGASAQSFIERMTNFDKNLPNEKVLPKHSLLYEYFTVYNELTKVKYVTEGMRKPAFLSGEQKKAIVDLLFKTNRKVTVKQLKEDYFKKIECFDSVEISGVEDRFNASLGTYHDLLKIIKDKDFLDNEENEDILEDIVLTLTLFEDREMIEERLKTYAHLFDDKVMKQLKRRRYTGWGRLSRKLINGIRDKQSGKTILDFLKSDGFANRNFMQLIHDDSLTFKEDIQKAQVSGQGDSLHEHIANLAGSPAIKKGILQTVKVVDELVKVMGRHKPENIVIEMARENQTTQKGQKNSRERMKRIEEGIKELGSQILKEHPVENTQLQNEKLYLYYLQNGRDMYVDQELDINRLSDYDVDHIVPQSFLKDDSIDNKVLTRSDKARGKSDNVPSEEVVKKMKNYWRQLLNAKLITQRKFDNLTKAERGGLSELDKAGFIKRQLVETRQITKHVAQILDSRMNTKYDENDKLIREVKVITLKSKLVSDFRKDFQFYKVREINNYHHAHDAYLNAVVGTALIKKYPKLESEFVYGDYKVYDVRKMIAKSEQEIGKATAKYFFYSNIMNFFKTEITLANGEIRKRPLIETNGETGEIVWDKGRDFATVRKVLSMPQVNIVKKTEVQTGGFSKESILPKRNSDKLIARKKDWDPKKYGGFDSPTVAYSVLVVAKVEKGKSKKLKSVKELLGITIMERSSFEKNPIDFLEAKGYKEVKKDLIIKLPKYSLFELENGRKRMLASAGELQKGNELALPSKYVNFLYLASHYEKLKGSPEDNEQKQLFVEQHKHYLDEIIEQISEFSKRVILADANLDKVLSAYNKHRDKPIREQAENIIHLFTLTNLGAPAAFKYFDTTIDRKRYTSTKEVLDATLIHQSITGLYETRIDLSQLGGDGGEAAAKPAPGGTLGIEDEYRLHETSTEPDVSLGSTWLSDFPQAWAETGGMGLAVRQAPLIIPLKATSTPVSIQQYPMSHEARLGIKPHIQRLLDQGILVPCQSPWNTPLLPVKKPGTNDYRPVQDLREVNKRVEDIHPTVPNPYNLLSGLPPSHQWYTVLDLKDAFFCLRLHPTSQPLFAFEWRDPGMGISGQLTWTRLPQGFKNSPTLFNEALHRDLADFRIQHPDLILLQYVDDILLAATSELDCQQGTRALLQTLGDLGYRASAKKAQICQKQVKYLGYLLREGQRWLTEARKETVMGQPVPKTPRQLREFLGTAGFCRLWIPGFAEMAAPLYPLTKPGTLFSWGPDQQKAYQEIKQALLTAPALGLPDLTKPFELFVDEKQGYAKGVLTQKLGPWRRPVAYLSKKLDPVAAGWPPCLRMVAAIAVLTKDAGKLTMGQPLVILAPHAVEALVKQPPDRWLSNARMTHYQAMLLDTDRVQFGPVVALNPATLLPLPEEGAPHDCLEILAETHGTRPDLTDQPIPDADHTWYTDGSSFLQEGQRKAGAAVTTETEVIWAGALPAGTSAQRAELIALTQALKMAEGKRLNVYTDSRYAFATAHIHGEIYRRRGWLTSEGREIKNKSEILALLKALFLPKRLSIIHCLGHQKGDSAEARGNRLADQAAREAAIKTPPDTSTLLAGKRTADGSEFEKRTADGSEFESPKKKAKVE

SEQ ID NO: 6775 - protein, 2093 aa, synthetic construct
MPAAKRVKLDGGDKKYSIGLDIGTNSVGWAVITDEYKVPSKKFKVLGNTDRHSIKKNLIGALLFDSGETAEATRLKRTARRRYTRRKNRICYLQEIFSNEMAKVDDSFFHRLEESFLVEEDKKHERHPIFGNIVDEVAYHEKYPTIYHLRKKLVDSTDKADLRLIYLALAHMIKFRGHFLIEGDLNPDNSDVDKLFIQLVQTYNQLFEENPINASGVDAKAILSARLSKSRRLENLIAQLPGEKKNGLFGNLIALSLGLTPNFKSNFDLAEDAKLQLSKDTYDDDLDNLLAQIGDQYADLFLAAKNLSDAILLSDILRVNTEITKAPLSASMIKRYDEHHQDLTLLKALVRQQLPEKYKEIFFDQSKNGYAGYIDGGASQEEFYKFIKPILEKMDGTEELLVKLNREDLLRKQRTFDNGSIPHQIHLGELHAILRRQEDFYPFLKDNREKIEKILTFRIPYYVGPLARGNSRFAWMTRKSEETITPWNFEEVVDKGASAQSFIERMTNFDKNLPNEKVLPKHSLLYEYFTVYNELTKVKYVTEGMRKPAFLSGEQKKAIVDLLFKTNRKVTVKQLKEDYFKKIECFDSVEISGVEDRFNASLGTYHDLLKIIKDKDFLDNEENEDILEDIVLTLTLFEDREMIEERLKTYAHLFDDKVMKQLKRRRYTGWGRLSRKLINGIRDKQSGKTILDFLKSDGFANRNFMQLIHDDSLTFKEDIQKAQVSGQGDSLHEHIANLAGSPAIKKGILQTVKVVDELVKVMGRHKPENIVIEMARENQTTQKGQKNSRERMKRIEEGIKELGSQILKEHPVENTQLQNEKLYLYYLQNGRDMYVDQELDINRLSDYDVDHIVPQSFLKDDSIDNKVLTRSDKARGKSDNVPSEEVVKKMKNYWRQLLNAKLITQRKFDNLTKAERGGLSELDKAGFIKRQLVETRQITKHVAQILDSRMNTKYDENDKLIREVKVITLKSKLVSDFRKDFQFYKVREINNYHHAHDAYLNAVVGTALIKKYPKLESEFVYGDYKVYDVRKMIAKSEQEIGKATAKYFFYSNIMNFFKTEITLANGEIRKRPLIETNGETGEIVWDKGRDFATVRKVLSMPQVNIVKKTEVQTGGFSKESILPKRNSDKLIARKKDWDPKKYGGFDSPTVAYSVLVVAKVEKGKSKKLKSVKELLGITIMERSSFEKNPIDFLEAKGYKEVKKDLIIKLPKYSLFELENGRKRMLASAGELQKGNELALPSKYVNFLYLASHYEKLKGSPEDNEQKQLFVEQHKHYLDEIIEQISEFSKRVILADANLDKVLSAYNKHRDKPIREQAENIIHLFTLTNLGAPAAFKYFDTTIDRKRYTSTKEVLDATLIHQSITGLYETRIDLSQLGGDGGEAAAKPAPGGTLNIEDEYRLHETSKEPDVSLGSTWLSDFPQAWAETGGMGLAVRQAPLIIPLKATSTPVSIKQYPMSQEARLGIKPHIQRLLDQGILVPCQSPWNTPLLPVKKPGTNDYRPVQDLREVNKRVEDIHPTVPNPYNLLSGLPPSHQWYTVLDLKDAFFCLRLHPTSQPLFAFEWRDPEMGISGQLTWTRLPQGFKNSPTLFNEALHRDLAGFRIQHPDLILLQYVDDLLLAATSELDCQQGTRALLQTLGDLGYRASAKKAQICQKQVKYLGYLLKEGQRWLTEARKETVMGQPIPKTPRQLREFLGTAGFCRLWIPGFAEMAAPLYPLTKPGTLFNWGPDQQKAFQEIKQALLTAPALGLPDLTKPFELFVDEKQGYAKGVLTQKLGPWRRPVAYLSKKLDPVAAGWPPCLRMVAAIAVLTKDAGKLTMGQPLVILAPHAVEALVKQPPDRWLSNARMTHYQALLLDTDRVQFGPVVALNPATLLPLPEEGLQHDCLDILAEAHGTRSDLMDQPLPDADHTWYTDGSSFLQEGQRKAGAAVTTETEVIWARALPAGTSAQRAELIALTQALKMAEGKKLNVYTDSRYAFATAHIHGEIYRRRGWLTSEGKEIKNKDEILALLKALFLPKRLSIIHCPGHQKGNSAEARGNRMADQAAREVATRETPETSTLLAGKRTADGSEFEKRTADGSEFESPKKKAKVE

SEQ ID NO: 6776 - protein, 2093 aa, synthetic construct
MPAAKRVKLDGGDKKYSIGLDIGTNSVGWAVITDEYKVPSKKFKVLGNTDRHSIKKNLIGALLFDSGETAEATRLKRTARRRYTRRKNRICYLQEIFSNEMAKVDDSFFHRLEESFLVEEDKKHERHPIFGNIVDEVAYHEKYPTIYHLRKKLVDSTDKADLRLIYLALAHMIKFRGHFLIEGDLNPDNSDVDKLFIQLVQTYNQLFEENPINASGVDAKAILSARLSKSRRLENLIAQLPGEKKNGLFGNLIALSLGLTPNFKSNFDLAEDAKLQLSKDTYDDDLDNLLAQIGDQYADLFLAAKNLSDAILLSDILRVNTEITKAPLSASMIKRYDEHHQDLTLLKALVRQQLPEKYKEIFFDQSKNGYAGYIDGGASQEEFYKFIKPILEKMDGTEELLVKLNREDLLRKQRTFDNGSIPHQIHLGELHAILRRQEDFYPFLKDNREKIEKILTFRIPYYVGPLARGNSRFAWMTRKSEETITPWNFEEVVDKGASAQSFIERMTNFDKNLPNEKVLPKHSLLYEYFTVYNELTKVKYVTEGMRKPAFLSGEQKKAIVDLLFKTNRKVTVKQLKEDYFKKIECFDSVEISGVEDRFNASLGTYHDLLKIIKDKDFLDNEENEDILEDIVLTLTLFEDREMIEERLKTYAHLFDDKVMKQLKRRRYTGWGRLSRKLINGIRDKQSGKTILDFLKSDGFANRNFMQLIHDDSLTFKEDIQKAQVSGQGDSLHEHIANLAGSPAIKKGILQTVKVVDELVKVMGRHKPENIVIEMARENQTTQKGQKNSRERMKRIEEGIKELGSQILKEHPVENTQLQNEKLYLYYLQNGRDMYVDQELDINRLSDYDVDHIVPQSFLKDDSIDNKVLTRSDKARGKSDNVPSEEVVKKMKNYWRQLLNAKLITQRKFDNLTKAERGGLSELDKAGFIKRQLVETRQITKHVAQILDSRMNTKYDENDKLIREVKVITLKSKLVSDFRKDFQFYKVREINNYHHAHDAYLNAVVGTALIKKYPKLESEFVYGDYKVYDVRKMIAKSEQEIGKATAKYFFYSNIMNFFKTEITLANGEIRKRPLIETNGETGEIVWDKGRDFATVRKVLSMPQVNIVKKTEVQTGGFSKESILPKRNSDKLIARKKDWDPKKYGGFDSPTVAYSVLVVAKVEKGKSKKLKSVKELLGITIMERSSFEKNPIDFLEAKGYKEVKKDLIIKLPKYSLFELENGRKRMLASAGELQKGNELALPSKYVNFLYLASHYEKLKGSPEDNEQKQLFVEQHKHYLDEIIEQISEFSKRVILADANLDKVLSAYNKHRDKPIREQAENIIHLFTLTNLGAPAAFKYFDTTIDRKRYTSTKEVLDATLIHQSITGLYETRIDLSQLGGDGGEAAAKPAPGGTLNIEDEYRLHETSKGPDVPLGSTWLSDFPQAWAETGGMGLAVRQAPLIIPLKATSTPVSIKQYPMSQEARLGIKPHIQRLLDQGILVPCQSPWNTPLLPVKKPGTNDYRPVQDLREVNKRVEDIHPTVPNPYNLLSGLPPSHQWYTVLDLKDAFFCLRLHPTSQSLFAFEWRDPEMGISGQLTWTRLPQGFKNSPTLFNEALHRDLADFRIQHPDLILLQYVDDLLLAATSELDCQQGTRALLQTLGDLGYRASAKKAQICQKQVKYLGYLLKEGQRWLTEARKETVMGQPTPKTPRQLREFLGTAGFCRLWIPGFAEMAAPLYPLTKPGTLFEWGPDQQKAYQEIKQALLTAPALGLPDLTKPFELFVDEKQGYAKGVLTQKLGPWRRPVAYLSKKLDPVAAGWPPCLRMVAAIAVLTKDAGKLTMGQPLVILAPHAVEALVKQPPDRWLSNARMTHYQALLLDTDRVQFGPIVALNPATLLPLPEEGLQHDCLDILAEAHGTRPDLTDQPLPDADHTWYTDGSSFLQEGQRKAGAAVTTETEVVWAKALPAGTSAQRAELIALTQALKMAEGKKLNVYTDSRYAFATAHIHGEIYRRRGWLTSEGKEIKNKDEILALLKALFLPKRLSIIHCPGHQKGNRAEARGNRMADQAAREVATRETPETSTLLAGKRTADGSEFEKRTADGSEFESPKKKAKVE

SEQ ID NO: 6777 - protein, 2113 aa, synthetic construct
MPAAKRVKLDGGDKKYSIGLDIGTNSVGWAVITDEYKVPSKKFKVLGNTDRHSIKKNLIGALLFDSGETAEATRLKRTARRRYTRRKNRICYLQEIFSNEMAKVDDSFFHRLEESFLVEEDKKHERHPIFGNIVDEVAYHEKYPTIYHLRKKLVDSTDKADLRLIYLALAHMIKFRGHFLIEGDLNPDNSDVDKLFIQLVQTYNQLFEENPINASGVDAKAILSARLSKSRRLENLIAQLPGEKKNGLFGNLIALSLGLTPNFKSNFDLAEDAKLQLSKDTYDDDLDNLLAQIGDQYADLFLAAKNLSDAILLSDILRVNTEITKAPLSASMIKRYDEHHQDLTLLKALVRQQLPEKYKEIFFDQSKNGYAGYIDGGASQEEFYKFIKPILEKMDGTEELLVKLNREDLLRKQRTFDNGSIPHQIHLGELHAILRRQEDFYPFLKDNREKIEKILTFRIPYYVGPLARGNSRFAWMTRKSEETITPWNFEEVVDKGASAQSFIERMTNFDKNLPNEKVLPKHSLLYEYFTVYNELTKVKYVTEGMRKPAFLSGEQKKAIVDLLFKTNRKVTVKQLKEDYFKKIECFDSVEISGVEDRFNASLGTYHDLLKIIKDKDFLDNEENEDILEDIVLTLTLFEDREMIEERLKTYAHLFDDKVMKQLKRRRYTGWGRLSRKLINGIRDKQSGKTILDFLKSDGFANRNFMQLIHDDSLTFKEDIQKAQVSGQGDSLHEHIANLAGSPAIKKGILQTVKVVDELVKVMGRHKPENIVIEMARENQTTQKGQKNSRERMKRIEEGIKELGSQILKEHPVENTQLQNEKLYLYYLQNGRDMYVDQELDINRLSDYDVDHIVPQSFLKDDSIDNKVLTRSDKARGKSDNVPSEEVVKKMKNYWRQLLNAKLITQRKFDNLTKAERGGLSELDKAGFIKRQLVETRQITKHVAQILDSRMNTKYDENDKLIREVKVITLKSKLVSDFRKDFQFYKVREINNYHHAHDAYLNAVVGTALIKKYPKLESEFVYGDYKVYDVRKMIAKSEQEIGKATAKYFFYSNIMNFFKTEITLANGEIRKRPLIETNGETGEIVWDKGRDFATVRKVLSMPQVNIVKKTEVQTGGFSKESILPKRNSDKLIARKKDWDPKKYGGFDSPTVAYSVLVVAKVEKGKSKKLKSVKELLGITIMERSSFEKNPIDFLEAKGYKEVKKDLIIKLPKYSLFELENGRKRMLASAGELQKGNELALPSKYVNFLYLASHYEKLKGSPEDNEQKQLFVEQHKHYLDEIIEQISEFSKRVILADANLDKVLSAYNKHRDKPIREQAENIIHLFTLTNLGAPAAFKYFDTTIDRKRYTSTKEVLDATLIHQSITGLYETRIDLSQLGGDGGEAAAKPAPGGTLNIEDEYRLHETSKEPDVSLGSTWLSDFPQAWAETGGMGLAVRQAPLIIPLKATSTPVSIKQYPMSQEARLGIKPHIQRLLDQGILVPCQSPWNTPLLPVKKPGTNDYRPVQDLREVNKRVEDIHPTVPNPYNLLSGLPPSHQWYTVLDLKDAFFCLRLHPTSQPLFAFEWRDPEMGISGQLTWTRLPQGFKNSPTLFNEALHRDLADFRIQHPDLILLQYVDDLLLAATSELDCQQGTRALLQTLGNLGYRASAKKAQICQKQVKYLGYLLKEGQRWLTEARKETVMGQPTPKTPRQLREFLGKAGFCRLFIPGFAEMAAPLYPLTKPGTLFNWGPDQQKAYQEIKQALLTAPALGLPDLTKPFELFVDEKQGYAKGVLTQKLGPWRRPVAYLSKKLDPVAAGWPPCLRMVAAIAVLTKDAGKLTMGQPLVILAPHAVEALVKQPPDRWLSNARMTHYQALLLDTDRVQFGPVVALNPATLLPLPEEGLQHNCLDILAEAHGTRPDLTDQPLPDADHTWYTDGSSLLQEGQRKAGAAVTTETEVIWAKALPAGTSAQRAELIALTQALKMAEGKKLNVYTDSRYAFATAHIHGEIYRRRGWLTSEGKEIKNKDEILALLKALFLPKRLSIIHCPGHQKGHSAEARGNRMADQAARKAAITETPDTSTLLIENSSPSGGSKRTADGSEFEAGKRTADGSEFEKRTADGSEFESPKKKAKVE

SEQ ID NO: 6778 - protein, 2113 aa, synthetic construct; identical to SEQ ID NO: 6777

SEQ ID NO: 6779 - protein, 2021 aa, synthetic construct
MPAAKRVKLDGGDKKYSIGLDIGTNSVGWAVITDEYKVPSKKFKVLGNTDRHSIKKNLIGALLFDSGETAEATRLKRTARRRYTRRKNRICYLQEIFSNEMAKVDDSFFHRLEESFLVEEDKKHERHPIFGNIVDEVAYHEKYPTIYHLRKKLVDSTDKADLRLIYLALAHMIKFRGHFLIEGDLNPDNSDVDKLFIQLVQTYNQLFEENPINASGVDAKAILSARLSKSRRLENLIAQLPGEKKNGLFGNLIALSLGLTPNFKSNFDLAEDAKLQLSKDTYDDDLDNLLAQIGDQYADLFLAAKNLSDAILLSDILRVNTEITKAPLSASMIKRYDEHHQDLTLLKALVRQQLPEKYKEIFFDQSKNGYAGYIDGGASQEEFYKFIKPILEKMDGTEELLVKLNREDLLRKQRTFDNGSIPHQIHLGELHAILRRQEDFYPFLKDNREKIEKILTFRIPYYVGPLARGNSRFAWMTRKSEETITPWNFEEVVDKGASAQSFIERMTNFDKNLPNEKVLPKHSLLYEYFTVYNELTKVKYVTEGMRKPAFLSGEQKKAIVDLLFKTNRKVTVKQLKEDYFKKIECFDSVEISGVEDRFNASLGTYHDLLKIIKDKDFLDNEENEDILEDIVLTLTLFEDREMIEERLKTYAHLFDDKVMKQLKRRRYTGWGRLSRKLINGIRDKQSGKTILDFLKSDGFANRNFMQLIHDDSLTFKEDIQKAQVSGQGDSLHEHIANLAGSPAIKKGILQTVKVVDELVKVMGRHKPENIVIEMARENQTTQKGQKNSRERMKRIEEGIKELGSQILKEHPVENTQLQNEKLYLYYLQNGRDMYVDQELDINRLSDYDVDHIVPQSFLKDDSIDNKVLTRSDKARGKSDNVPSEEVVKKMKNYWRQLLNAKLITQRKFDNLTKAERGGLSELDKAGFIKRQLVETRQITKHVAQILDSRMNTKYDENDKLIREVKVITLKSKLVSDFRKDFQFYKVREINNYHHAHDAYLNAVVGTALIKKYPKLESEFVYGDYKVYDVRKMIAKSEQEIGKATAKYFFYSNIMNFFKTEITLANGEIRKRPLIETNGETGEIVWDKGRDFATVRKVLSMPQVNIVKKTEVQTGGFSKESILPKRNSDKLIARKKDWDPKKYGGFDSPTVAYSVLVVAKVEKGKSKKLKSVKELLGITIMERSSFEKNPIDFLEAKGYKEVKKDLIIKLPKYSLFELENGRKRMLASAGELQKGNELALPSKYVNFLYLASHYEKLKGSPEDNEQKQLFVEQHKHYLDEIIEQISEFSKRVILADANLDKVLSAYNKHRDKPIREQAENIIHLFTLTNLGAPAAFKYFDTTIDRKRYTSTKEVLDATLIHQSITGLYETRIDLSQLGGDGGEAAAKPAPGGGRDIMKDIKVRLMTDSPDDSQDLMIGAIESNLFADQISWKSDQPVWLNQWPLKQEKLQALQQLVTEQLQLGHLEESNSPWNTPVFVIKKKSGKWRLLQDLRAVNATMHDMGALQPGLPSPVAVPKGWEIIIIDLQDCFFNIKLHPEDCKRFAFSVPSPNFKRPYQRFQWKVLPQGMKNSPTLCQKFVDKAILTVRDKYQDSYIVHYMDDILLAHPSRSIVDEILTSMIQALNKHGLVVSTEKIQKYDNLKYLGTHIQGDSVSYQKLQIRTDKLRTLNDFQKLLGNINWIRPFLKLTTGELKPLFEILNGDSNPISTRKLTPEACKALQLMNERLSTARVKRLDLSQPWSLCILKTEYTPTACLWQDGVVEWIHLPHISPKVITPYDIFCTQLIIKGRHRSKELFSKDPDYIVVPYTKVQFDLLLQEKEDWPISLLGFLGEVHFHLPKDPLLTFTLQTAIIFPHMTSTTPLEKGIVIFTDGSANGRSVTYIQGREPIIKENTQNTAQQAEIVAVITAFEEVSQPFNLYTDSKYVTGLFPEIETATLSPRTKIYTELKHLQRLIHKRQEKFYIGHIRGHTGLPGPLAQGNAYADSLTRILTAGKRTADGSEFEKRTADGSEFESPKKKAKVE

SEQ ID NO: 6780 - protein, 2084 aa, synthetic construct
MPAAKRVKLDGGDKKYSIGLDIGTNSVGWAVITDEYKVPSKKFKVLGNTDRHSIKKNLIGALLFDSGETAEATRLKRTARRRYTRRKNRICYLQEIFSNEMAKVDDSFFHRLEESFLVEEDKKHERHPIFGNIVDEVAYHEKYPTIYHLRKKLVDSTDKADLRLIYLALAHMIKFRGHFLIEGDLNPDNSDVDKLFIQLVQTYNQLFEENPINASGVDAKAILSARLSKSRRLENLIAQLPGEKKNGLFGNLIALSLGLTPNFKSNFDLAEDAKLQLSKDTYDDDLDNLLAQIGDQYADLFLAAKNLSDAILLSDILRVNTEITKAPLSASMIKRYDEHHQDLTLLKALVRQQLPEKYKEIFFDQSKNGYAGYIDGGASQEEFYKFIKPILEKMDGTEELLVKLNREDLLRKQRTFDNGSIPHQIHLGELHAILRRQEDFYPFLKDNREKIEKILTFRIPYYVGPLARGNSRFAWMTRKSEETITPWNFEEVVDKGASAQSFIERMTNFDKNLPNEKVLPKHSLLYEYFTVYNELTKVKYVTEGMRKPAFLSGEQKKAIVDLLFKTNRKVTVKQLKEDYFKKIECFDSVEISGVEDRFNASLGTYHDLLKIIKDKDFLDNEENEDILEDIVLTLTLFEDREMIEERLKTYAHLFDDKVMKQLKRRRYTGWGRLSRKLINGIRDKQSGKTILDFLKSDGFANRNFMQLIHDDSLTFKEDIQKAQVSGQGDSLHEHIANLAGSPAIKKGILQTVKVVDELVKVMGRHKPENIVIEMARENQTTQKGQKNSRERMKRIEEGIKELGSQILKEHPVENTQLQNEKLYLYYLQNGRDMYVDQELDINRLSDYDVDHIVPQSFLKDDSIDNKVLTRSDKARGKSDNVPSEEVVKKMKNYWRQLLNAKLITQRKFDNLTKAERGGLSELDKAGFIKRQLVETRQITKHVAQILDSRMNTKYDENDKLIREVKVITLKSKLVSDFRKDFQFYKVREINNYHHAHDAYLNAVVGTALIKKYPKLESEFVYGDYKVYDVRKMIAKSEQEIGKATAKYFFYSNIMNFFKTEITLANGEIRKRPLIETNGETGEIVWDKGRDFATVRKVLSMPQVNIVKKTEVQTGGFSKESILPKRNSDKLIARKKDWDPKKYGGFDSPTVAYSVLVVAKVEKGKSKKLKSVKELLGITIMERSSFEKNPIDFLEAKGYKEVKKDLIIKLPKYSLFELENGRKRMLASAGELQKGNELALPSKYVNFLYLASHYEKLKGSPEDNEQKQLFVEQHKHYLDEIIEQISEFSKRVILADANLDKVLSAYNKHRDKPIREQAENIIHLFTLTNLGAPAAFKYFDTTIDRKRYTSTKEVLDATLIHQSITGLYETRIDLSQLGGDGGEAAAKPAPGGIPWLMKKPLQLTTLVPLQEYEERLLKQTMLTGSYKEKLQSLFLKYDALWQHWENQVGHRRIKPHHIATGTVNPRPQKQYPINPKAKASIQTVINDLLKQGVLIQQNSIMNTPVYPVPKPDGKWRMVLDYREVNKTIPLIAAQNQHSAGILSSIFRGKYKTTLDLSNGFWAHSITPESYWLTAFTWLGQQYCWTRLPQGFLNSPALFNADVVDLLKEVPNVQVYVDDIYISHDDPREHLEQLEKVFSLLLNAGYVVSLKKSEIAQHEVEFLGFNITKEGRGLTETFKQKLLNITPPRDLKQLQSILGKLNFARNFIPNFSELVKPLYNIIATAPGKYITWTTDNSQQLQNIISMLNSAENLEERNPEVRLIMKVNTSPSAGYIRFYNEFAKRPIMYLNYVYTKAEVKFTNTEKLLTTIHKGLIKALDLGMGQEILVYSPIVSMTKIQKTPLPERKALPIRWITWMSYLEDPRIQFHYDKTLPELQQVPTVTDDIIAKIKHPSEFSMVFYTDGSAIKHPNVNKSHNAGMGIAQVQFKPEFTVINTWSIPLGDHTAQLAEVAAVEFACKKALKIDGPVLIVTDSFYVAESVNKELPYWQSNGFFNNKKKPLKHVSKWKSIADCIQLKPDIIIIHEKGHQPTASTFHTEGNNLADKLATQGSYVVNAGKRTADGSEFEKRTADGSEFESPKKKAKVE

SEQ ID NO: 6781 - protein, 2173 aa, synthetic construct
MPAAKRVKLDGGDKKYSIGLDIGTNSVGWAVITDEYKVPSKKFKVLGNTDRHSIKKNLIGALLFDSGETAEATRLKRTARRRYTRRKNRICYLQEIFSNEMAKVDDSFFHRLEESFLVEEDKKHERHPIFGNIVDEVAYHEKYPTIYHLRKKLVDSTDKADLRLIYLALAHMIKFRGHFLIEGDLNPDNSDVDKLFIQLVQTYNQLFEENPINASGVDAKAILSARLSKSRRLENLIAQLPGEKKNGLFGNLIALSLGLTPNFKSNFDLAEDAKLQLSKDTYDDDLDNLLAQIGDQYADLFLAAKNLSDAILLSDILRVNTEITKAPLSASMIKRYDEHHQDLTLLKALVRQQLPEKYKEIFFDQSKNGYAGYIDGGASQEEFYKFIKPILEKMDGTEELLVKLNREDLLRKQRTFDNGSIPHQIHLGELHAILRRQEDFYPFLKDNREKIEKILTFRIPYYVGPLARGNSRFAWMTRKSEETITPWNFEEVVDKGASAQSFIERMTNFDKNLPNEKVLPKHSLLYEYFTVYNELTKVKYVTEGMRKPAFLSGEQKKAIVDLLFKTNRKVTVKQLKEDYFKKIECFDSVEISGVEDRFNASLGTYHDLLKIIKDKDFLDNEENEDILEDIVLTLTLFEDREMIEERLKTYAHLFDDKVMKQLKRRRYTGWGRLSRKLINGIRDKQSGKTILDFLKSDGFANRNFMQLIHDDSLTFKEDIQKAQVSGQGDSLHEHIANLAGSPAIKKGILQTVKVVDELVKVMGRHKPENIVIEMARENQTTQKGQKNSRERMKRIEEGIKELGSQILKEHPVENTQLQNEKLYLYYLQNGRDMYVDQELDINRLSDYDVDHIVPQSFLKDDSIDNKVLTRSDKARGKSDNVPSEEVVKKMKNYWRQLLNAKLITQRKFDNLTKAERGGLSELDKAGFIKRQLVETRQITKHVAQILDSRMNTKYDENDKLIREVKVITLKSKLVSDFRKDFQFYKVREINNYHHAHDAYLNAVVGTALIKKYPKLESEFVYGDYKVYDVRKMIAKSEQEIGKATAKYFFYSNIMNFFKTEITLANGEIRKRPLIETNGETGEIVWDKGRDFATVRKVLSMPQVNIVKKTEVQTGGFSKESILPKRNSDKLIARKKDWDPKKYGGFDSPTVAYSVLVVAKVEKGKSKKLKSVKELLGITIMERSSFEKNPIDFLEAKGYKEVKKDLIIKLPKYSLFELENGRKRMLASAGELQKGNELALPSKYVNFLYLASHYEKLKGSPEDNEQKQLFVEQHKHYLDEIIEQISEFSKRVILADANLDKVLSAYNKHRDKPIREQAENIIHLFTLTNLGAPAAFKYFDTTIDRKRYTSTKEVLDATLIHQSITGLYETRIDLSQLGGDGGEAAAKPAPGGMDPLQLLQPLEAEIKGTKLKAHWNSGATITCVPQAFLEEEVPIKNIWIKTIHGEKEQPVYYLTFKIQGRKVEAEVISSPYDYILVSPSDIPWLMKKPLQLTTLVPLQEYEERLLKQTMLTGSYKEKLQSLFLKYDALWQHWENQVGHRRIKPHHIATGTVNPRPQKQYPINPKAKASIQTVINDLLKQGVLIQQNSIMNTPVYPVPKPDGKWRMVLDYREVNKTIPLIAAQNQHSAGILSSIFRGKYKTTLDLSNGFWAHSITPESYWLTAFTWLGQQYCWTRLPQGFLNSPALFNADVVDLLKEVPNVQVYVDDIYISHDDPREHLEQLEKVFSLLLNAGYVVSLKKSEIAQHEVEFLGFNITKEGRGLTETFKQKLLNITPPRDLKQLQSILGKLNFARNFIPNFSELVKPLYNIIATAPGKYITWTTDNSQQLQNIISMLNSAENLEERNPEVRLIMKVNTSPSAGYIRFYNEFAKRPIMYLNYVYTKAEVKFTNTEKLLTTIHKGLIKALDLGMGQEILVYSPIVSMTKIQKTPLPERKALPIRWITWMSYLEDPRIQFHYDKTLPELQQVPTVTDDIIAKIKHPSEFSMVFYTDGSAIKHPNVNKSHNAGMGIAQVQFKPEFTVINTWSIPLGDHTAQLAEVAAVEFACKKALKIDGPVLIVTDSFYVAESVNKELPYWQSNGFFNNKKKPLKHVSKWKSIADCIQLKPDIIIIHEKGHQPTASTFHTEGNNLADKLATQGSYVVNAGKRTADGSEFEKRTADGSEFESPKKKAKVE

SEQ ID NO: 6782 - protein, 2091 aa, synthetic construct
MPAAKRVKLDGGDKKYSIGLDIGTNSVGWAVITDEYKVPSKKFKVLGNTDRHSIKKNLIGALLFDSGETAEATRLKRTARRRYTRRKNRICYLQEIFSNEMAKVDDSFFHRLEESFLVEEDKKHERHPIFGNIVDEVAYHEKYPTIYHLRKKLVDSTDKADLRLIYLALAHMIKFRGHFLIEGDLNPDNSDVDKLFIQLVQTYNQLFEENPINASGVDAKAILSARLSKSRRLENLIAQLPGEKKNGLFGNLIALSLGLTPNFKSNFDLAEDAKLQLSKDTYDDDLDNLLAQIGDQYADLFLAAKNLSDAILLSDILRVNTEITKAPLSASMIKRYDEHHQDLTLLKALVRQQLPEKYKEIFFDQSKNGYAGYIDGGASQEEFYKFIKPILEKMDGTEELLVKLNREDLLRKQRTFDNGSIPHQIHLGELHAILRRQEDFYPFLKDNREKIEKILTFRIPYYVGPLARGNSRFAWMTRKSEETITPWNFEEVVDKGASAQSFIERMTNFDKNLPNEKVLPKHSLLYEYFTVYNELTKVKYVTEGMRKPAFLSGEQKKAIVDLLFKTNRKVTVKQLKEDYFKKIECFDSVEISGVEDRFNASLGTYHDLLKIIKDKDFLDNEENEDILEDIVLTLTLFEDREMIEERLKTYAHLFDDKVMKQLKRRRYTGWGRLSRKLINGIRDKQSGKTILDFLKSDGFANRNFMQLIHDDSLTFKEDIQKAQVSGQGDSLHEHIANLAGSPAIKKGILQTVKVVDELVKVMGRHKPENIVIEMARENQTTQKGQKNSRERMKRIEEGIKELGSQILKEHPVENTQLQNEKLYLYYLQNGRDMYVDQELDINRLSDYDVDHIVPQSFLKDDSIDNKVLTRSDKARGKSDNVPSEEVVKKMKNYWRQLLNAKLITQRKFDNLTKAERGGLSELDKAGFIKRQLVETRQITKHVAQILDSRMNTKYDENDKLIREVKVITLKSKLVSDFRKDFQFYKVREINNYHHAHDAYLNAVVGTALIKKYPKLESEFVYGDYKVYDVRKMIAKSEQEIGKATAKYFFYSNIMNFFKTEITLANGEIRKRPLIETNGETGEIVWDKGRDFATVRKVLSMPQVNIVKKTEVQTGGFSKESILPKRNSDKLIARKKDWDPKKYGGFDSPTVAYSVLVVAKVEKGKSKKLKSVKELLGITIMERSSFEKNPIDFLEAKGYKEVKKDLIIKLPKYSLFELENGRKRMLASAGELQKGNELALPSKYVNFLYLASHYEKLKGSPEDNEQKQLFVEQHKHYLDEIIEQISEFSKRVILADANLDKVLSAYNKHRDKPIREQAENIIHLFTLTNLGAPAAFKYFDTTIDRKRYTSTKEVLDATLIHQSITGLYETRIDLSQLGGDGGEAAAKPAPGGVLNLEEEYRLHEKPVPSSIDPSWLQLFPTVWAERAGMGLANQVPPVVVELRSGASPVAVRQYPMSKEAREGIRPHIQRFLDLGVLVPCQSPWNTPLLPVKKPGTNDYRPVQDLREINKRVQDIHPTVPNPYNLLSSLPPSHTWYSVLDLKDAFFCLKLHPNSQPLFAFEWRDPEKGNTGQLTWTRLPQGFKNSPTLFNEALHRDLAPFRALNPQVVLLQYVDDLLVAAPTYRDCKEGTQKLLQELSKLGYRVSAKKAQLCQKEVTYLGYLLKEGKRWLTPARKATVMKIPPPTTPRQVREFLGTAGFCRLWIPGFASLAAPLYPLTKPSIPFIWTEEHQKAFDRIKEALLSAPALALPDLTKPFTLYVDERAGVARGVLTQTLGPWRRPVAYLSKKLDPVASGWPTCLKAVAAVALLLKDADKLTLGQNVTVIASHSLESIVRQPPDRWMTNARMTHYQSLLLNERVSFAPPAVLNPATLLPVESEATPVHRCSEILAEETGTRRDLKDQPLPGVPAWYTDGSSFIAEGKRRAGAAIVDGKRTVWASSLPEGTSAQKAELVALTQALRLAEGKDINIYTDSRYAFATAHIHGAIYKQRGWLTSAGKDIKNKEEILALLEAIHLPKRVAIIHCPGHQKGNDPVATGNRRADEAAKQAALSTRVLAETTKPAGKRTADGSEFEKRTADGSEFESPKKKAKVE

SEQ ID NO: 6783 - protein, 2091 aa, synthetic construct; identical to SEQ ID NO: 4515

SEQ ID NO: 6784 - protein, 2095 aa, synthetic construct
MPAAKRVKLDGGDKKYSIGLDIGTNSVGWAVITDEYKVPSKKFKVLGNTDRHSIKKNLIGALLFDSGETAEATRLKRTARRRYTRRKNRICYLQEIFSNEMAKVDDSFFHRLEESFLVEEDKKHERHPIFGNIVDEVAYHEKYPTIYHLRKKLVDSTDKADLRLIYLALAHMIKFRGHFLIEGDLNPDNSDVDKLFIQLVQTYNQLFEENPINASGVDAKAILSARLSKSRRLENLIAQLPGEKKNGLFGNLIALSLGLTPNFKSNFDLAEDAKLQLSKDTYDDDLDNLLAQIGDQYADLFLAAKNLSDAILLSDILRVNTEITKAPLSASMIKRYDEHHQDLTLLKALVRQQLPEKYKEIFFDQSKNGYAGYIDGGASQEEFYKFIKPILEKMDGTEELLVKLNREDLLRKQRTFDNGSIPHQIHLGELHAILRRQEDFYPFLKDNREKIEKILTFRIPYYVGPLARGNSRFAWMTRKSEETITPWNFEEVVDKGASAQSFIERMTNFDKNLPNEKVLPKHSLLYEYFTVYNELTKVKYVTEGMRKPAFLSGEQKKAIVDLLFKTNRKVTVKQLKEDYFKKIECFDSVEISGVEDRFNASLGTYHDLLKIIKDKDFLDNEENEDILEDIVLTLTLFEDREMIEERLKTYAHLFDDKVMKQLKRRRYTGWGRLSRKLINGIRDKQSGKTILDFLKSDGFANRNFMQLIHDDSLTFKEDIQKAQVSGQGDSLHEHIANLAGSPAIKKGILQTVKVVDELVKVMGRHKPENIVIEMARENQTTQKGQKNSRERMKRIEEGIKELGSQILKEHPVENTQLQNEKLYLYYLQNGRDMYVDQELDINRLSDYDVDHIVPQSFLKDDSIDNKVLTRSDKARGKSDNVPSEEVVKKMKNYWRQLLNAKLITQRKFDNLTKAERGGLSELDKAGFIKRQLVETRQITKHVAQILDSRMNTKYDENDKLIREVKVITLKSKLVSDFRKDFQFYKVREINNYHHAHDAYLNAVVGTALIKKYPKLESEFVYGDYKVYDVRKMIAKSEQEIGKATAKYFFYSNIMNFFKTEITLANGEIRKRPLIETNGETGEIVWDKGRDFATVRKVLSMPQVNIVKKTEVQTGGFSKESILPKRNSDKLIARKKDWDPKKYGGFDSPTVAYSVLVVAKVEKGKSKKLKSVKELLGITIMERSSFEKNPIDFLEAKGYKEVKKDLIIKLPKYSLFELENGRKRMLASAGELQKGNELALPSKYVNFLYLASHYEKLKGSPEDNEQKQLFVEQHKHYLDEIIEQISEFSKRVILADANLDKVLSAYNKHRDKPIREQAENIIHLFTLTNLGAPAAFKYFDTTIDRKRYTSTKEVLDATLIHQSITGLYETRIDLSQLGGDGGPAPEAAAKGGTAPLEEEYRLFLEAPIQNVTLLEQWKREIPKVWAEINPPGLASTQAPIHVQLLSTALPVRVRQYPITLEAKRSLRETIRKFRAAGILRPVHSPWNTPLLPVRKSGTSEYRMVQDLREVNKRVETIHPTVPNPYTLLSLLPPDRIWYSVLDLKDAFFCIPLAPESQLIFAFEWADAEEGESGQLTWTRLPQGFKNSPTLFNEALNRDLQGFRLDHPSVSLLQYVDDLLIAADTQAACLSATRDLLMTLAELGYRVSGKKAQLCQEEVTYLGFKIHKGSRSLSNSRTQAILQIPVPKTKRQVREFLGTIGYCRLWIPGFAELAQPLYAATRPGNDPLVWGEKEEEAFQSLKLALTQPPALALPSLDKPFQLFVEETSGAAKGVLTQALGPWKRPVAYLSKRLDPVAAGWPRCLRAIAAAALLTREASKLTFGQDIEITSSHNLESLLRSPPDKWLTNARITQYQVLLLDPPRVRFKQTAALNPATLLPETDDTLPIHHCLDTLDSLTSTRPDLTDQPLAQAEATLFTDGSSYIRDGKRYAGAAVVTLDSVIWAEPLPIGTSAQKAELIALTKALEWSKDKSVNIYTDSRYAFATLHVHGMIYRERGWLTAGGKAIKNAPEILALLTAVWLPKRVAVMHCKGHQKDDAPTSTGNRRADEVAREVAIRPLSTQATISAGKRTADGSEFEKRTADGSEFESPKKKAKVE

SEQ ID NO: 6785 - protein, 2092 aa, synthetic construct
MPAAKRVKLDGGDKKYSIGLDIGTNSVGWAVITDEYKVPSKKFKVLGNTDRHSIKKNLIGALLFDSGETAEATRLKRTARRRYTRRKNRICYLQEIFSNEMAKVDDSFFHRLEESFLVEEDKKHERHPIFGNIVDEVAYHEKYPTIYHLRKKLVDSTDKADLRLIYLALAHMIKFRGHFLIEGDLNPDNSDVDKLFIQLVQTYNQLFEENPINASGVDAKAILSARLSKSRRLENLIAQLPGEKKNGLFGNLIALSLGLTPNFKSNFDLAEDAKLQLSKDTYDDDLDNLLAQIGDQYADLFLAAKNLSDAILLSDILRVNTEITKAPLSASMIKRYDEHHQDLTLLKALVRQQLPEKYKEIFFDQSKNGYAGYIDGGASQEEFYKFIKPILEKMDGTEELLVKLNREDLLRKQRTFDNGSIPHQIHLGELHAILRRQEDFYPFLKDNREKIEKILTFRIPYYVGPLARGNSRFAWMTRKSEETITPWNFEEVVDKGASAQSFIERMTNFDKNLPNEKVLPKHSLLYEYFTVYNELTKVKYVTEGMRKPAFLSGEQKKAIVDLLFKTNRKVTVKQLKEDYFKKIECFDSVEISGVEDRFNASLGTYHDLLKIIKDKDFLDNEENEDILEDIVLTLTLFEDREMIEERLKTYAHLFDDKVMKQLKRRRYTGWGRLSRKLINGIRDKQSGKTILDFLKSDGFANRNFMQLIHDDSLTFKEDIQKAQVSGQGDSLHEHIANLAGSPAIKKGILQTVKVVDELVKVMGRHKPENIVIEMARENQTTQKGQKNSRERMKRIEEGIKELGSQILKEHPVENTQLQNEKLYLYYLQNGRDMYVDQELDINRLSDYDVDHIVPQSFLKDDSIDNKVLTRSDKARGKSDNVPSEEVVKKMKNYWRQLLNAKLITQRKFDNLTKAERGGLSELDKAGFIKRQLVETRQITKHVAQILDSRMNTKYDENDKLIREVKVITLKSKLVSDFRKDFQFYKVREINNYHHAHDAYLNAVVGTALIKKYPKLESEFVYGDYKVYDVRKMIAKSEQEIGKATAKYFFYSNIMNFFKTEITLANGEIRKRPLIETNGETGEIVWDKGRDFATVRKVLSMPQVNIVKKTEVQTGGFSKESILPKRNSDKLIARKKDWDPKKYGGFDSPTVAYSVLVVAKVEKGKSKKLKSVKELLGITIMERSSFEKNPIDFLEAKGYKEVKKDLIIKLPKYSLFELENGRKRMLASAGELQKGNELALPSKYVNFLYLASHYEKLKGSPEDNEQKQLFVEQHKHYLDEIIEQISEFSKRVILADANLDKVLSAYNKHRDKPIREQAENIIHLFTLTNLGAPAAFKYFDTTIDRKRYTSTKEVLDATLIHQSITGLYETRIDLSQLGGDGGPAPEAAAKGGTLQLEEEYRLFEPESTQKQEMDIWLKNFPQAWAETGGMGTAHCQAPVLIQLKATATPISIRQYPMPHEAYQGIKPHIRRMLDQGILKPCQSPWNTPLLPVKKPGTEDYRPVQDLREVNKRVEDIHPTVPNPYNLLSTLPPSHPWYTVLDLKDAFFCLRLHSESQLLFAFEWRDPEIGLSGQLTWTRLPQGFKNSPTLFNEALHSDLADFRVRYPALVLLQYVDDLLLAAATRTECLEGTKALLETLGNKGYRASAKKAQICLQEVTYLGYSLKDGQRWLTKARKEAILSIPVPKNSRQVREFLGTAGYCRLWIPGFAELAAPLYPLTRPGTLFQWGTEQQLAFEDIKKALLSSPALGLPDITKPFELFIDENSGFAKGVLVQKLGPWKRPVAYLSKKLDTVASGWPPCLRMVAAIAILVKDAGKLTLGQPLTILTSHPVEALVRQPPNKWLSNARMTHYQAMLLDAERVHFGPTVSLNPATLLPLPSGGNHHDCLQILAETHGTRPDLTDQPLPDADLTWYTDGSSFIRNGEREAGAAVTTESEVIWAAPLPPGTSAQRAELIALTQALKMAEGKKLTVYTDSRYAFATTHVHGEIYRRRGWLTSEGKEIKNKNEILALLEALFLPKRLSIIHCPGHQKGDSPQAKGNRLADDTAKKAATETHSSLTVLPAGKRTADGSEFEKRTADGSEFESPKKKAKVE

SEQ ID NO: 6786 - protein, 2124 aa, synthetic construct
MPAAKRVKLDGGDKKYSIGLDIGTNSVGWAVITDEYKVPSKKFKVLGNTDRHSIKKNLIGALLFDSGETAEATRLKRTARRRYTRRKNRICYLQEIFSNEMAKVDDSFFHRLEESFLVEEDKKHERHPIFGNIVDEVAYHEKYPTIYHLRKKLVDSTDKADLRLIYLALAHMIKFRGHFLIEGDLNPDNSDVDKLFIQLVQTYNQLFEENPINASGVDAKAILSARLSKSRRLENLIAQLPGEKKNGLFGNLIALSLGLTPNFKSNFDLAEDAKLQLSKDTYDDDLDNLLAQIGDQYADLFLAAKNLSDAILLSDILRVNTEITKAPLSASMIKRYDEHHQDLTLLKALVRQQLPEKYKEIFFDQSKNGYAGYIDGGASQEEFYKFIKPILEKMDGTEELLVKLNREDLLRKQRTFDNGSIPHQIHLGELHAILRRQEDFYPFLKDNREKIEKILTFRIPYYVGPLARGNSRFAWMTRKSEETITPWNFEEVVDKGASAQSFIERMTNFDKNLPNEKVLPKHSLLYEYFTVYNELTKVKYVTEGMRKPAFLSGEQKKAIVDLLFKTNRKVTVKQLKEDYFKKIECFDSVEISGVEDRFNASLGTYHDLLKIIKDKDFLDNEENEDILEDIVLTLTLFEDREMIEERLKTYAHLFDDKVMKQLKRRRYTGWGRLSRKLINGIRDKQSGKTILDFLKSDGFANRNFMQLIHDDSLTFKEDIQKAQVSGQGDSLHEHIANLAGSPAIKKGILQTVKVVDELVKVMGRHKPENIVIEMARENQTTQKGQKNSRERMKRIEEGIKELGSQILKEHPVENTQLQNEKLYLYYLQNGRDMYVDQELDINRLSDYDVDHIVPQSFLKDDSIDNKVLTRSDKARGKSDNVPSEEVVKKMKNYWRQLLNAKLITQRKFDNLTKAERGGLSELDKAGFIKRQLVETRQITKHVAQILDSRMNTKYDENDKLIREVKVITLKSKLVSDFRKDFQFYKVREINNYHHAHDAYLNAVVGTALIKKYPKLESEFVYGDYKVYDVRKMIAKSEQEIGKATAKYFFYSNIMNFFKTEITLANGEIRKRPLIETNGETGEIVWDKGRDFATVRKVLSMPQVNIVKKTEVQTGGFSKESILPKRNSDKLIARKKDWDPKKYGGFDSPTVAYSVLVVAKVEKGKSKKLKSVKELLGITIMERSSFEKNPIDFLEAKGYKEVKKDLIIKLPKYSLFELENGRKRMLASAGELQKGNELALPSKYVNFLYLASHYEKLKGSPEDNEQKQLFVEQHKHYLDEIIEQISEFSKRVILADANLDKVLSAYNKHRDKPIREQAENIIHLFTLTNLGAPAAFKYFDTTIDRKRYTSTKEVLDATLIHQSITGLYETRIDLSQLGGDGGPAPEAAAKGGLLGRDLLTKLKAQIQFSTEGPQVTWEDRPAMCLVLNLEEEYRLHEKPVPPSIDPSWLQLFPMVWAEKAGMGLANQVPPVVVELKSDASPVAVRQYPMSKEAREGIRPHIQRFLDLGILVPCQSPWNTPLLPVKKPGTNDYRPVQDLREVNKRVQDIHPTVPNPYNLLSSLPPSHTWYSVLDLKDAFFCLKLHPNSQPLFAFEWRDPEKGNTGQLTWTRLPQGFKNSPTLFNEALHRDLASFRALNPQVVMLQYVDDLLVAAPTYRDCKEGTRRLLQELSKLGYRVSAKKAQLCREEVTYLGYLLKGGKRWLTPARKATVMKIPTPTTPRQVREFLGTAGFCRLWIPGFASLAAPLYPLTRPKVPFTWTEAHQEAFGRIKEALLSAPALALPDLTKPFALYVDEKEGVARGVLTQTLGPWRRPVAYLSKKLDPVASGWPTCLKAIAAVALLLKDADKLTLGQNVLVIAPHNLESIVRQPPDRWMTNARMTHYQSLLLNERVSFAPPAILNPATLLPVESDDTPIHICSEILAEETGTRPDLRDQPLPGVPAWYTDGSSFIMDGRRQAGAAIVDNKRTVWASNLPEGTSAQKAELIALTQALRLAEGKSINIYTDSRYAFATAHVHGAIYKQRGWLTSAGKDIKNKEEILALLEAIHLPKRVAIIHCPGHQRGTDPVATGNRKADEAAKQAAQSTRILTETTKNAGKRTADGSEFEKRTADGSEFESPKKKAKVE

SEQ ID NO: 6787 - protein, 2215 aa, synthetic construct
MPAAKRVKLDGGDKKYSIGLDIGTNSVGWAVITDEYKVPSKKFKVLGNTDRHSIKKNLIGALLFDSGETAEATRLKRTARRRYTRRKNRICYLQEIFSNEMAKVDDSFFHRLEESFLVEEDKKHERHPIFGNIVDEVAYHEKYPTIYHLRKKLVDSTDKADLRLIYLALAHMIKFRGHFLIEGDLNPDNSDVDKLFIQLVQTYNQLFEENPINASGVDAKAILSARLSKSRRLENLIAQLPGEKKNGLFGNLIALSLGLTPNFKSNFDLAEDAKLQLSKDTYDDDLDNLLAQIGDQYADLFLAAKNLSDAILLSDILRVNTEITKAPLSASMIKRYDEHHQDLTLLKALVRQQLPEKYKEIFFDQSKNGYAGYIDGGASQEEFYKFIKPILEKMDGTEELLVKLNREDLLRKQRTFDNGSIPHQIHLGELHAILRRQEDFYPFLKDNREKIEKILTFRIPYYVGPLARGNSRFAWMTRKSEETITPWNFEEVVDKGASAQSFIERMTNFDKNLPNEKVLPKHSLLYEYFTVYNELTKVKYVTEGMRKPAFLSGEQKKAIVDLLFKTNRKVTVKQLKEDYFKKIECFDSVEISGVEDRFNASLGTYHDLLKIIKDKDFLDNEENEDILEDIVLTLTLFEDREMIEERLKTYAHLFDDKVMKQLKRRRYTGWGRLSRKLINGIRDKQSGKTILDFLKSDGFANRNFMQLIHDDSLTFKEDIQKAQVSGQGDSLHEHIANLAGSPAIKKGILQTVKVVDELVKVMGRHKPENIVIEMARENQTTQKGQKNSRERMKRIEEGIKELGSQILKEHPVENTQLQNEKLYLYYLQNGRDMYVDQELDINRLSDYDVDHIVPQSFLKDDSIDNKVLTRSDKARGKSDNVPSEEVVKKMKNYWRQLLNAKLITQRKFDNLTKAERGGLSELDKAGFIKRQLVETRQITKHVAQILDSRMNTKYDENDKLIREVKVITLKSKLVSDFRKDFQFYKVREINNYHHAHDAYLNAVVGTALIKKYPKLESEFVYGDYKVYDVRKMIAKSEQEIGKATAKYFFYSNIMNFFKTEITLANGEIRKRPLIETNGETGEIVWDKGRDFATVRKVLSMPQVNIVKKTEVQTGGFSKESILPKRNSDKLIARKKDWDPKKYGGFDSPTVAYSVLVVAKVEKGKSKKLKSVKELLGITIMERSSFEKNPIDFLEAKGYKEVKKDLIIKLPKYSLFELENGRKRMLASAGELQKGNELALPSKYVNFLYLASHYEKLKGSPEDNEQKQLFVEQHKHYLDEIIEQISEFSKRVILADANLDKVLSAYNKHRDKPIREQAENIIHLFTLTNLGAPAAFKYFDTTIDRKRYTSTKEVLDATLIHQSITGLYETRIDLSQLGGDGGPAPEAAAKGGTLGDQGSRGSDPLPEPRVTLTVEGIPTEFLVNTGAEHSVLTKPMGKMGSKRTVVAGATGSKVYPWTTKRLLKIGQKQVTHSFLVIPECPAPLLGRDLLTKLKAQIQFSTEGPQVTWEDRPAMCLVLNLEEEYRLHEKPVPPSIDPSWLQLFPMVWAEKAGMGLANQVPPVVVELKSDASPVAVRQYPMSKEAREGIRPHIQRFLDLGILVPCQSPWNTPLLPVKKPGTNDYRPVQDLREVNKRVQDIHPTVPNPYNLLSSLPPSHTWYSVLDLKDAFFCLKLHPNSQPLFAFEWRDPEKGNTGQLTWTRLPQGFKNSPTLFNEALHRDLASFRALNPQVVMLQYVDDLLVAAPTYRDCKEGTRRLLQELSKLGYRVSAKKAQLCREEVTYLGYLLKGGKRWLTPARKATVMKIPTPTTPRQVREFLGKAGFCRLFIPGFASLAAPLYPLTRPKVPFTWTEAHQEAFGRIKEALLSAPALALPDLTKPFALYVDEKEGVARGVLTQTLGPWRRPVAYLSKKLDPVASGWPTCLKAIAAVALLLKDADKLTLGQNVLVIAPHNLESIVRQPPDRWMTNARMTHYQSLLLNERVSFAPPAILNPATLLPVESDDTPIHICSEILAEETGTRPDLRDQPLPGVPAWYTDGSSFIMDGRRQAGAAIVDNKRTVWASNLPEGTSAQKAELIALTQALRLAEGKSINIYTDSRYAFATAHVHGAIYKQRGWLTSAGKDIKNKEEILALLEAIHLPKRVAIIHCPGHQRGTDPVATGNRKADEAAKQAAQSTRILTETTKNAGKRTADGSEFEKRTADGSEFESPKKKAKVE

SEQ ID NO: 6788 - protein, 2093 aa, synthetic construct; identical to SEQ ID NO: 4516

SEQ ID NO: 6789 - protein, 2093 aa, synthetic construct
MPAAKRVKLDGGDKKYSIGLDIGTNSVGWAVITDEYKVPSKKFKVLGNTDRHSIKKNLIGALLFDSGETAEATRLKRTARRRYTRRKNRICYLQEIFSNEMAKVDDSFFHRLEESFLVEEDKKHERHPIFGNIVDEVAYHEKYPTIYHLRKKLVDSTDKADLRLIYLALAHMIKFRGHFLIEGDLNPDNSDVDKLFIQLVQTYNQLFEENPINASGVDAKAILSARLSKSRRLENLIAQLPGEKKNGLFGNLIALSLGLTPNFKSNFDLAEDAKLQLSKDTYDDDLDNLLAQIGDQYADLFLAAKNLSDAILLSDILRVNTEITKAPLSASMIKRYDEHHQDLTLLKALVRQQLPEKYKEIFFDQSKNGYAGYIDGGASQEEFYKFIKPILEKMDGTEELLVKLNREDLLRKQRTFDNGSIPHQIHLGELHAILRRQEDFYPFLKDNREKIEKILTFRIPYYVGPLARGNSRFAWMTRKSEETITPWNFEEVVDKGASAQSFIERMTNFDKNLPNEKVLPKHSLLYEYFTVYNELTKVKYVTEGMRKPAFLSGEQKKAIVDLLFKTNRKVTVKQLKEDYFKKIECFDSVEISGVEDRFNASLGTYHDLLKIIKDKDFLDNEENEDILEDIVLTLTLFEDREMIEERLKTYAHLFDDKVMKQLKRRRYTGWGRLSRKLINGIRDKQSGKTILDFLKSDGFANRNFMQLIHDDSLTFKEDIQKAQVSGQGDSLHEHIANLAGSPAIKKGILQTVKVVDELVKVMGRHKPENIVIEMARENQTTQKGQKNSRERMKRIEEGIKELGSQILKEHPVENTQLQNEKLYLYYLQNGRDMYVDQELDINRLSDYDVDHIVPQSFLKDDSIDNKVLTRSDKARGKSDNVPSEEVVKKMKNYWRQLLNAKLITQRKFDNLTKAERGGLSELDKAGFIKRQLVETRQITKHVAQILDSRMNTKYDENDKLIREVKVITLKSKLVSDFRKDFQFYKVREINNYHHAHDAYLNAVVGTALIKKYPKLESEFVYGDYKVYDVRKMIAKSEQEIGKATAKYFFYSNIMNFFKTEITLANGEIRKRPLIETNGETGEIVWDKGRDFATVRKVLSMPQVNIVKKTEVQTGGFSKESILPKRNSDKLIARKKDWDPKKYGGFDSPTVAYSVLVVAKVEKGKSKKLKSVKELLGITIMERSSFEKNPIDFLEAKGYKEVKKDLIIKLPKYSLFELENGRKRMLASAGELQKGNELALPSKYVNFLYLASHYEKLKGSPEDNEQKQLFVEQHKHYLDEIIEQISEFSKRVILADANLDKVLSAYNKHRDKPIREQAENIIHLFTLTNLGAPAAFKYFDTTIDRKRYTSTKEVLDATLIHQSITGLYETRIDLSQLGGDGGPAPEAAAKGGTLNIEDEYRLHETSKEPDVSLGSTWLSDFPQAWAETGGMGLAVRQAPLIIPLKATSTPVSIKQYPMSQEARLGIKPHIQRLLDQGILVPCQSPWNTPLLPVKKPGTNDYRPVQDLREVNKRVEDIHPTVPNPYNLLSGLPPSHQWYTVLDLKDAFFCLRLHPTSQPLFAFEWRDPEMGISGQLTWTRLPQGFKNSPTLFNEALHRDLAGFRIQHPDLILLQYVDDLLLAATSELDCQQGTRALLQTLGDLGYRASAKKAQICQKQVKYLGYLLKEGQRWLTEARKETVMGQPIPKTPRQLREFLGTAGFCRLWIPGFAEMAAPLYPLTKPGTLFNWGPDQQKAFQEIKQALLTAPALGLPDLTKPFELFVDEKQGYAKGVLTQKLGPWRRPVAYLSKKLDPVAAGWPPCLRMVAAIAVLTKDAGKLTMGQPLVILAPHAVEALVKQPPDRWLSNARMTHYQALLLDTDRVQFGPVVALNPATLLPLPEEGLQHDCLDILAEAHGTRSDLMDQPLPDADHTWYTDGSSFLQEGQRKAGAAVTTETEVIWARALPAGTSAQRAELIALTQALKMAEGKKLNVYTDSRYAFATAHIHGEIYRRRGWLTSEGKEIKNKDEILALLKALFLPKRLSIIHCPGHQKGNSAEARGNRMADQAAREVATRETPETSTLLAGKRTADGSEFEKRTADGSEFESPKKKAKVE

SEQ ID NO: 6790 - protein, 2113 aa, synthetic construct
MPAAKRVKLDGGDKKYSIGLDIGTNSVGWAVITDEYKVPSKKFKVLGNTDRHSIKKNLIGALLFDSGETAEATRLKRTARRRYTRRKNRICYLQEIFSNEMAKVDDSFFHRLEESFLVEEDKKHERHPIFGNIVDEVAYHEKYPTIYHLRKKLVDSTDKADLRLIYLALAHMIKFRGHFLIEGDLNPDNSDVDKLFIQLVQTYNQLFEENPINASGVDAKAILSARLSKSRRLENLIAQLPGEKKNGLFGNLIALSLGLTPNFKSNFDLAEDAKLQLSKDTYDDDLDNLLAQIGDQYADLFLAAKNLSDAILLSDILRVNTEITKAPLSASMIKRYDEHHQDLTLLKALVRQQLPEKYKEIFFDQSKNGYAGYIDGGASQEEFYKFIKPILEKMDGTEELLVKLNREDLLRKQRTFDNGSIPHQIHLGELHAILRRQEDFYPFLKDNREKIEKILTFRIPYYVGPLARGNSRFAWMTRKSEETITPWNFEEVVDKGASAQSFIERMTNFDKNLPNEKVLPKHSLLYEYFTVYNELTKVKYVTEGMRKPAFLSGEQKKAIVDLLFKTNRKVTVKQLKEDYFKKIECFDSVEISGVEDRFNASLGTYHDLLKIIKDKDFLDNEENEDILEDIVLTLTLFEDREMIEERLKTYAHLFDDKVMKQLKRRRYTGWGRLSRKLINGIRDKQSGKTILDFLKSDGFANRNFMQLIHDDSLTFKEDIQKAQVSGQGDSLHEHIANLAGSPAIKKGILQTVKVVDELVKVMGRHKPENIVIEMARENQTTQKGQKNSRERMKRIEEGIKELGSQILKEHPVENTQLQNEKLYLYYLQNGRDMYVDQELDINRLSDYDVDHIVPQSFLKDDSIDNKVLTRSDKARGKSDNVPSEEVVKKMKNYWRQLLNAKLITQRKFDNLTKAERGGLSELDKAGFIKRQLVETRQITKHVAQILDSRMNTKYDENDKLIREVKVITLKSKLVSDFRKDFQFYKVREINNYHHAHDAYLNAVVGTALIKKYPKLESEFVYGDYKVYDVRKMIAKSEQEIGKATAKYFFYSNIMNFFKTEITLANGEIRKRPLIETNGETGEIVWDKGRDFATVRKVLSMPQVNIVKKTEVQTGGFSKESILPKRNSDKLIARKKDWDPKKYGGFDSPTVAYSVLVVAKVEKGKSKKLKSVKELLGITIMERSSFEKNPIDFLEAKGYKEVKKDLIIKLPKYSLFELENGRKRMLASAGELQKGNELALPSKYVNFLYLASHYEKLKGSPEDNEQKQLFVEQHKHYLDEIIEQISEFSKRVILADANLDKVLSAYNKHRDKPIREQAENIIHLFTLTNLGAPAAFKYFDTTIDRKRYTSTKEVLDATLIHQSITGLYETRIDLSQLGGDGGPAPEAAAKGGVQEISDSRPMLHIYLNGRRFLGLLDTGADKTCIAGRDWPANWPIHQTESSLQGLGMACGVARSSQPLRWQHEDKSGIIHPFVIPTLPFTLWGRDIMKDIKVRLMTDSPDDSQDLMIGAIESNLFADQISWKSDQPVWLNQWPLKQEKLQALQQLVTEQLQLGHLEESNSPWNTPVFVIKKKSGKWRLLQDLRAVNATMHDMGALQPGLPSPVAVPKGWEIIIIDLQDCFFNIKLHPEDCKRFAFSVPSPNFKRPYQRFQWKVLPQGMKNSPTLCQKFVDKAILTVRDKYQDSYIVHYMDDILLAHPSRSIVDEILTSMIQALNKHGLVVSTEKIQKYDNLKYLGTHIQGDSVSYQKLQIRTDKLRTLNDFQKLLGNINWIRPFLKLTTGELKPLFEILNPDSNPISTRKLTPEACKALQLMNERLSTARVKRLDLSQPWSLCILKTEYTPTACLWQDGVVEWIHLPHISPKVITPYDIFCTQLIIKGRHRSKELFSKDPDYIVVPYTKVQFDLLLQEKEDWPISLLGFLGEVHFHLPKDPLLTFTLQTAIIFPHMTSTTPLEKGIVIFTDGSANGRSVTYIQGREPIIKENTQNTAQQAEIVAVITAFEEVSQPFNLYTDSKYVTGLFPEIETATLSPRTKIYTELKHLQRLIHKRQEKFYIGHIRGHTGLPGPLAQGNAYADSLTRILTAAGKRTADGSEFEKRTADGSEFESPKKKAKVE

SEQ ID NO: 6791 - protein, 2085 aa, synthetic construct
MPAAKRVKLDGGDKKYSIGLDIGTNSVGWAVITDEYKVPSKKFKVLGNTDRHSIKKNLIGALLFDSGETAEATRLKRTARRRYTRRKNRICYLQEIFSNEMAKVDDSFFHRLEESFLVEEDKKHERHPIFGNIVDEVAYHEKYPTIYHLRKKLVDSTDKADLRLIYLALAHMIKFRGHFLIEGDLNPDNSDVDKLFIQLVQTYNQLFEENPINASGVDAKAILSARLSKSRRLENLIAQLPGEKKNGLFGNLIALSLGLTPNFKSNFDLAEDAKLQLSKDTYDDDLDNLLAQIGDQYADLFLAAKNLSDAILLSDILRVNTEITKAPLSASMIKRYDEHHQDLTLLKALVRQQLPEKYKEIFFDQSKNGYAGYIDGGASQEEFYKFIKPILEKMDGTEELLVKLNREDLLRKQRTFDNGSIPHQIHLGELHAILRRQEDFYPFLKDNREKIEKILTFRIPYYVGPLARGNSRFAWMTRKSEETITPWNFEEVVDKGASAQSFIERMTNFDKNLPNEKVLPKHSLLYEYFTVYNELTKVKYVTEGMRKPAFLSGEQKKAIVDLLFKTNRKVTVKQLKEDYFKKIECFDSVEISGVEDRFNASLGTYHDLLKIIKDKDFLDNEENEDILEDIVLTLTLFEDREMIEERLKTYAHLFDDKVMKQLKRRRYTGWGRLSRKLINGIRDKQSGKTILDFLKSDGFANRNFMQLIHDDSLTFKEDIQKAQVSGQGDSLHEHIANLAGSPAIKKGILQTVKVVDELVKVMGRHKPENIVIEMARENQTTQKGQKNSRERMKRIEEGIKELGSQILKEHPVENTQLQNEKLYLYYLQNGRDMYVDQELDINRLSDYDVDHIVPQSFLKDDSIDNKVLTRSDKARGKSDNVPSEEVVKKMKNYWRQLLNAKLITQRKFDNLTKAERGGLSELDKAGFIKRQLVETRQITKHVAQILDSRMNTKYDENDKLIREVKVITLKSKLVSDFRKDFQFYKVREINNYHHAHDAYLNAVVGTALIKKYPKLESEFVYGDYKVYDVRKMIAKSEQEIGKATAKYFFYSNIMNFFKTEITLANGEIRKRPLIETNGETGEIVWDKGRDFATVRKVLSMPQVNIVKKTEVQTGGFSKESILPKRNSDKLIARKKDWDPKKYGGFDSPTVAYSVLVVAKVEKGKSKKLKSVKELLGITIMERSSFEKNPIDFLEAKGYKEVKKDLIIKLPKYSLFELENGRKRMLASAGELQKGNELALPSKYVNFLYLASHYEKLKGSPEDNEQKQLFVEQHKHYLDEIIEQISEFSKRVILADANLDKVLSAYNKHRDKPIREQAENIIHLFTLTNLGAPAAFKYFDTTIDRKRYTSTKEVLDATLIHQSITGLYETRIDLSQLGGDGGPAPEAAAKGGLDDEYRLYSPLVKPDQNIQFWLEQFPQAWAETAGMGLAKQVPPQVIQLKASATPVSVRQYPLSKEAQEGIRPHVQRLIQQGILVPVQSPWNTPLLPVRKPGTNDYRPVQDLREVNKRVQDIHPTVPNPYNLLCALPPQRSWYTVLDLKDAFFCLRLHPTSQPLFAFEWRDPGTGRTGQLTWTRLPQGFKNSPTIFNEALHRDLANFRIQHPQVTLLQYVDDLLLAGATKQDCLEGTKALLLELSDLGYRASAKKAQICRREVTYLGYSLRDGQRWLTEARKKTVVQIPAPTTAKQVREFLGKAGFCRLFIPGFATLAAPLYPLTKPKGEFSWAPEHQKAFDAIKKALLSAPALALPDVTKPFTLYVDERKGVARGVLTQTLGPWRRPVAYLSKKLDPVASGWPVCLKAIAAVAILVKDADKLTLGQNITVIAPHALENIVRQPPDRWMTNARMTHYQSLLLTERVTFAPPAALNPATLLPEETDEPVTHDCHQLLIEETGVRKDLTDIPLTGEVLTWFTDGSSYVVEGKRMAGAAVVDGTRTIWASSLPEGTSAQKAELMALTQALRLAEGKSINIYTDSRYAFATAHVHGAIYKQRGWLTSAGREIKNKEEILSLLEALHLPKRLAIIHCPGHQKAKDPISRGNQMADRVAKQAAQGVNLLPAGKRTADGSEFEKRTADGSEFESPKKKAKVE

SEQ ID NO: 6792 - protein, 2087 aa, synthetic construct
MPAAKRVKLDGGDKKYSIGLDIGTNSVGWAVITDEYKVPSKKFKVLGNTDRHSIKKNLIGALLFDSGETAEATRLKRTARRRYTRRKNRICYLQEIFSNEMAKVDDSFFHRLEESFLVEEDKKHERHPIFGNIVDEVAYHEKYPTIYHLRKKLVDSTDKADLRLIYLALAHMIKFRGHFLIEGDLNPDNSDVDKLFIQLVQTYNQLFEENPINASGVDAKAILSARLSKSRRLENLIAQLPGEKKNGLFGNLIALSLGLTPNFKSNFDLAEDAKLQLSKDTYDDDLDNLLAQIGDQYADLFLAAKNLSDAILLSDILRVNTEITKAPLSASMIKRYDEHHQDLTLLKALVRQQLPEKYKEIFFDQSKNGYAGYIDGGASQEEFYKFIKPILEKMDGTEELLVKLNREDLLRKQRTFDNGSIPHQIHLGELHAILRRQEDFYPFLKDNREKIEKILTFRIPYYVGPLARGNSRFAWMTRKSEETITPWNFEEVVDKGASAQSFIERMTNFDKNLPNEKVLPKHSLLYEYFTVYNELTKVKYVTEGMRKPAFLSGEQKKAIVDLLFKTNRKVTVKQLKEDYFKKIECFDSVEISGVEDRFNASLGTYHDLLKIIKDKDFLDNEENEDILEDIVLTLTLFEDREMIEERLKTYAHLFDDKVMKQLKRRRYTGWGRLSRKLINGIRDKQSGKTILDFLKSDGFANRNFMQLIHDDSLTFKEDIQKAQVSGQGDSLHEHIANLAGSPAIKKGILQTVKVVDELVKVMGRHKPENIVIEMARENQTTQKGQKNSRERMKRIEEGIKELGSQILKEHPVENTQLQNEKLYLYYLQNGRDMYVDQELDINRLSDYDVDHIVPQSFLKDDSIDNKVLTRSDKARGKSDNVPSEEVVKKMKNYWRQLLNAKLITQRKFDNLTKAERGGLSELDKAGFIKRQLVETRQITKHVAQILDSRMNTKYDENDKLIREVKVITLKSKLVSDFRKDFQFYKVREINNYHHAHDAYLNAVVGTALIKKYPKLESEFVYGDYKVYDVRKMIAKSEQEIGKATAKYFFYSNIMNFFKTEITLANGEIRKRPLIETNGETGEIVWDKGRDFATVRKVLSMPQVNIVKKTEVQTGGFSKESILPKRNSDKLIARKKDWDPKKYGGFDSPTVAYSVLVVAKVEKGKSKKLKSVKELLGITIMERSSFEKNPIDFLEAKGYKEVKKDLIIKLPKYSLFELENGRKRMLASAGELQKGNELALPSKYVNFLYLASHYEKLKGSPEDNEQKQLFVEQHKHYLDEIIEQISEFSKRVILADANLDKVLSAYNKHRDKPIREQAENIIHLFTLTNLGAPAAFKYFDTTIDRKRYTSTKEVLDATLIHQSITGLYETRIDLSQLGGDGGPAPEAAAKGGTLQLDDEYRLYSPLVKPDQNIQFWLEQFPQAWAETAGMGLAKQVPPQVIQLKASATPVSVRQYPLSKEAQEGIRPHVQRLIQQGILVPVQSPWNTPLLPVRKPGTNDYRPVQDLREVNKRVQDIHPTVPNPYNLLCALPPQRSWYTVLDLKDAFFCLRLHPTSQPLFAFEWRDPGTGRTGQLTWTRLPQGFKNSPTIFDEALHRDLANFRIQHPQVTLLQYVDDLLLAGATKQDCLEGTKALLLELSDLGYRASAKKAQICRREVTYLGYSLRDGQRWLTEARKKTVVQIPAPTTAKQVREFLGTAGFCRLWIPGFATLAAPLYPLTKEKGEFSWAPEHQKAFDAIKKALLSAPALALPDVTKPFTLYVDERKGVARGVLTQTLGPWRRPVAYLSKKLDPVASGWPVCLKAIAAVAILVKDADKLTLGQNITVIAPHALENIVRQPPDRWMTNARMTHYQSLLLTERVTFAPPAALNPATLLPEETDEPVTHDCHQLLIEETGVRKDLTDIPLTGEVLTWFTDGSSYVVEGKRMAGAAVVDGTRTIWASSLPEGTSAQKAELMALTQALRLAEGKSINIYTDSRYAFATAHVHGAIYKQRGLLTSAGREIKNKEEILSLLEALHLPKRLAIIHCPGHQKAKDPISRGNQMADRVAKQAAQGVNLLAGKRTADGSEFEKRTADGSEFESPKKKAKVE

SEQ ID NO: 6793 - protein, 2085 aa, synthetic construct; identical to SEQ ID NO: 6791

SEQ ID NO: 6794 - protein, 2087 aa, synthetic construct; identical to SEQ ID NO: 6792

SEQ ID NO: 6795 - protein, 2091 aa, synthetic construct
MPAAKRVKLDGGDKKYSIGLDIGTNSVGWAVITDEYKVPSKKFKVLGNTDRHSIKKNLIGALLFDSGETAEATRLKRTARRRYTRRKNRICYLQEIFSNEMAKVDDSFFHRLEESFLVEEDKKHERHPIFGNIVDEVAYHEKYPTIYHLRKKLVDSTDKADLRLIYLALAHMIKFRGHFLIEGDLNPDNSDVDKLFIQLVQTYNQLFEENPINASGVDAKAILSARLSKSRRLENLIAQLPGEKKNGLFGNLIALSLGLTPNFKSNFDLAEDAKLQLSKDTYDDDLDNLLAQIGDQYADLFLAAKNLSDAILLSDILRVNTEITKAPLSASMIKRYDEHHQDLTLLKALVRQQLPEKYKEIFFDQSKNGYAGYIDGGASQEEFYKFIKPILEKMDGTEELLVKLNREDLLRKQRTFDNGSIPHQIHLGELHAILRRQEDFYPFLKDNREKIEKILTFRIPYYVGPLARGNSRFAWMTRKSEETITPWNFEEVVDKGASAQSFIERMTNFDKNLPNEKVLPKHSLLYEYFTVYNELTKVKYVTEGMRKPAFLSGEQKKAIVDLLFKTNRKVTVKQLKEDYFKKIECFDSVEISGVEDRFNASLGTYHDLLKIIKDKDFLDNEENEDILEDIVLTLTLFEDREMIEERLKTYAHLFDDKVMKQLKRRRYTGWGRLSRKLINGIRDKQSGKTILDFLKSDGFANRNFMQLIHDDSLTFKEDIQKAQVSGQGDSLHEHIANLAGSPAIKKGILQTVKVVDELVKVMGRHKPENIVIEMARENQTTQKGQKNSRERMKRIEEGIKELGSQILKEHPVENTQLQNEKLYLYYLQNGRDMYVDQELDINRLSDYDVDHIVPQSFLKDDSIDNKVLTRSDKARGKSDNVPSEEVVKKMKNYWRQLLNAKLITQRKFDNLTKAERGGLSELDKAGFIKRQLVETRQITKHVAQILDSRMNTKYDENDKLIREVKVITLKSKLVSDFRKDFQFYKVREINNYHHAHDAYLNAVVGTALIKKYPKLESEFVYGDYKVYDVRKMIAKSEQEIGKATAKYFFYSNIMNFFKTEITLANGEIRKRPLIETNGETGEIVWDKGRDFATVRKVLSMPQVNIVKKTEVQTGGFSKESILPKRNSDKLIARKKDWDPKKYGGFDSPTVAYSVLVVAKVEKGKSKKLKSVKELLGITIMERSSFEKNPIDFLEAKGYKEVKKDLIIKLPKYSLFELENGRKRMLASAGELQKGNELALPSKYVNFLYLASHYEKLKGSPEDNEQKQLFVEQHKHYLDEIIEQISEFSKRVILADANLDKVLSAYNKHRDKPIREQAENIIHLFTLTNLGAPAAFKYFDTTIDRKRYTSTKEVLDATLIHQSITGLYETRIDLSQLGGDGGPAPEAAAKGGVLNLEEEYRLHEKPVPSSIDPSWLQLFPTVWAERAGMGLANQVPPVVVELRSGASPVAVRQYPMSKEAREGIRPHIQRFLDLGVLVPCQSPWNTPLLPVKKPGTNDYRPVQDLREINKRVQDIHPTVPNPYNLLSSLPPSHTWYSVLDLKDAFFCLKLHPNSQPLFAFEWRDPEKGNTGQLTWTRLPQGFKNSPTLFDEALHRDLAPFRALNPQVVLLQYVDDLLVAAPTYRDCKEGTQKLLQELSKLGYRVSAKKAQLCQKEVTYLGYLLKEGKRWLTPARKATVMKIPPPTTPRQVREFLGTAGFCRLWIPGFASLAAPLYPLTKESIPFIWTEEHQKAFDRIKEALLSAPALALPDLTKPFTLYVDERAGVARGVLTQTLGPWRRPVAYLSKKLDPVASGWPTCLKAVAAVALLLKDADKLTLGQNVTVIASHSLESIVRQPPDRWMTNARMTHYQSLLLNERVSFAPPAVLNPATLLPVESEATPVHRCSEILAEETGTRRDLKDQPLPGVPAWYTDGSSFIAEGKRRAGAAIVDGKRTVWASSLPEGTSAQKAELVALTQALRLAEGKDINIYTDSRYAFATAHIHGAIYKQRGLLTSAGKDIKNKEEILALLEAIHLPKRVAIIHCPGHQKGNDPVATGNRRADEAAKQAALSTRVLAETTKPAGKRTADGSEFEKRTADGSEFESPKKKAKVE

SEQ ID NO: 6796 - protein, 2093 aa, synthetic construct
MPAAKRVKLDGGDKKYSIGLDIGTNSVGWAVITDEYKVPSKKFKVLGNTDRHSIKKNLIGALLFDSGETAEATRLKRTARRRYTRRKNRICYLQEIFSNEMAKVDDSFFHRLEESFLVEEDKKHERHPIFGNIVDEVAYHEKYPTIYHLRKKLVDSTDKADLRLIYLALAHMIKFRGHFLIEGDLNPDNSDVDKLFIQLVQTYNQLFEENPINASGVDAKAILSARLSKSRRLENLIAQLPGEKKNGLFGNLIALSLGLTPNFKSNFDLAEDAKLQLSKDTYDDDLDNLLAQIGDQYADLFLAAKNLSDAILLSDILRVNTEITKAPLSASMIKRYDEHHQDLTLLKALVRQQLPEKYKEIFFDQSKNGYAGYIDGGASQEEFYKFIKPILEKMDGTEELLVKLNREDLLRKQRTFDNGSIPHQIHLGELHAILRRQEDFYPFLKDNREKIEKILTFRIPYYVGPLARGNSRFAWMTRKSEETITPWNFEEVVDKGASAQSFIERMTNFDKNLPNEKVLPKHSLLYEYFTVYNELTKVKYVTEGMRKPAFLSGEQKKAIVDLLFKTNRKVTVKQLKEDYFKKIECFDSVEISGVEDRFNASLGTYHDLLKIIKDKDFLDNEENEDILEDIVLTLTLFEDREMIEERLKTYAHLFDDKVMKQLKRRRYTGWGRLSRKLINGIRDKQSGKTILDFLKSDGFANRNFMQLIHDDSLTFKEDIQKAQVSGQGDSLHEHIANLAGSPAIKKGILQTVKVVDELVKVMGRHKPENIVIEMARENQTTQKGQKNSRERMKRIEEGIKELGSQILKEHPVENTQLQNEKLYLYYLQNGRDMYVDQELDINRLSDYDVDHIVPQSFLKDDSIDNKVLTRSDKARGKSDNVPSEEVVKKMKNYWRQLLNAKLITQRKFDNLTKAERGGLSELDKAGFIKRQLVETRQITKHVAQILDSRMNTKYDENDKLIREVKVITLKSKLVSDFRKDFQFYKVREINNYHHAHDAYLNAVVGTALIKKYPKLESEFVYGDYKVYDVRKMIAKSEQEIGKATAKYFFYSNIMNFFKTEITLANGEIRKRPLIETNGETGEIVWDKGRDFATVRKVLSMPQVNIVKKTEVQTGGFSKESILPKRNSDKLIARKKDWDPKKYGGFDSPTVAYSVLVVAKVEKGKSKKLKSVKELLGITIMERSSFEKNPIDFLEAKGYKEVKKDLIIKLPKYSLFELENGRKRMLASAGELQKGNELALPSKYVNFLYLASHYEKLKGSPEDNEQKQLFVEQHKHYLDEIIEQISEFSKRVILADANLDKVLSAYNKHRDKPIREQAENIIHLFTLTNLGAPAAFKYFDTTIDRKRYTSTKEVLDATLIHQSITGLYETRIDLSQLGGDGGPAPEAAAKGGTLNIEDEYRLHETSKEPDVPLGSTWLSDFPQAWAETGGMGLAVRQAPLIIPLKATSTPVSIKQYPMSQEARLGIKPHIQRLLDQGILVPCQSPWNTPLLPVKKPGTNDYRPVQDLREVNKRVEDIHPTVPNPYNLLSGLPPSHQWYTVLDLKDAFFCLRLHPTSQPLFAFEWRDPEMGISGQLTWTRLPQGFKNSPTLFNEALHRDLADFRIQHPDLILLQYVDDLLLAATSEQDCQRGTRALLQTLGNLGYRASAKKAQICQKQVKYLGYLLKEGQRWLTEARKETVMGQPTPKTPRQLREFLGTAGFCRLWIPGFAEMAAPLYPLTKPGTLFNWGPDQQKAYQEIKQALLTAPALGLPDLTKPFELFVDEKQGYAKGVLTQKLGPWRRPVAYLSKKLDPVAAGWPPCLRMVAAIAVLTKDAGKLTMGQPLVILAPHAVEALVKQPPDRWLSNARMTHYQAMLLDTDRVQFGPVVALNPATLLPLPEKEAPHDCLEILAETHGTRPDLTDQPIPDADYTWYTDGSSFLQEGQRRAGAAVTTETEVIWARALPAGTSAQRAELIALTQALKMAEGKKLNVYTDSRYAFATAHVHGEIYRRRGWLTSEGREIKNKNEILALLKALFLPKRLSIIHCPGHQKGNSAEARGNRMADQAAREAAMKAVLETSTLLAGKRTADGSEFEKRTADGSEFESPKKKAKVE

SEQ ID NO: 6797 - protein, 2093 aa, synthetic construct
MPAAKRVKLDGGDKKYSIGLDIGTNSVGWAVITDEYKVPSKKFKVLGNTDRHSIKKNLIGALLFDSGETAEATRLKRTARRRYTRRKNRICYLQEIFSNEMAKVDDSFFHRLEESFLVEEDKKHERHPIFGNIVDEVAYHEKYPTIYHLRKKLVDSTDKADLRLIYLALAHMIKFRGHFLIEGDLNPDNSDVDKLFIQLVQTYNQLFEENPINASGVDAKAILSARLSKSRRLENLIAQLPGEKKNGLFGNLIALSLGLTPNFKSNFDLAEDAKLQLSKDTYDDDLDNLLAQIGDQYADLFLAAKNLSDAILLSDILRVNTEITKAPLSASMIKRYDEHHQDLTLLKALVRQQLPEKYKEIFFDQSKNGYAGYIDGGASQEEFYKFIKPILEKMDGTEELLVKLNREDLLRKQRTFDNGSIPHQIHLGELHAILRRQEDFYPFLKDNREKIEKILTFRIPYYVGPLARGNSRFAWMTRKSEETITPWNFEEVVDKGASAQSFIERMTNFDKNLPNEKVLPKHSLLYEYFTVYNELTKVKYVTEGMRKPAFLSGEQKKAIVDLLFKTNRKVTVKQLKEDYFKKIECFDSVEISGVEDRFNASLGTYHDLLKIIKDKDFLDNEENEDILEDIVLTLTLFEDREMIEERLKTYAHLFDDKVMKQLKRRRYTGWGRLSRKLINGIRDKQSGKTILDFLKSDGFANRNFMQLIHDDSLTFKEDIQKAQVSGQGDSLHEHIANLAGSPAIKKGILQTVKVVDELVKVMGRHKPENIVIEMARENQTTQKGQKNSRERMKRIEEGIKELGSQILKEHPVENTQLQNEKLYLYYLQNGRDMYVDQELDINRLSDYDVDHIVPQSFLKDDSIDNKVLTRSDKARGKSDNVPSEEVVKKMKNYWRQLLNAKLITQRKFDNLTKAERGGLSELDKAGFIKRQLVETRQITKHVAQILDSRMNTKYDENDKLIREVKVITLKSKLVSDFRKDFQFYKVREINNYHHAHDAYLNAVVGTALIKKYPKLESEFVYGDYKVYDVRKMIAKSEQEIGKATAKYFFYSNIMNFFKTEITLANGEIRKRPLIETNGETGEIVWDKGRDFATVRKVLSMPQVNIVKKTEVQTGGFSKESILPKRNSDKLIARKKDWDPKKYGGFDSPTVAYSVLVVAKVEKGKSKKLKSVKELLGITIMERSSFEKNPIDFLEAKGYKEVKKDLIIKLPKYSLFELENGRKRMLASAGELQKGNELALPSKYVNFLYLASHYEKLKGSPEDNEQKQLFVEQHKHYLDEIIEQISEFSKRVILADANLDKVLSAYNKHRDKPIREQAENIIHLFTLTNLGAPAAFKYFDTTIDRKRYTSTKEVLDATLIHQSITGLYETRIDLSQLGGDGGPAPEAAAKGGTLNIEDEYRLHETSKEPDVPLGSTWLSDFPQAWAETGGMGLAVRQAPLIIPLKATSTPVSIKQYPMSQEARLGIKPHIQRLLDQGILVPCQSPWNTPLLPVKKPGTNDYRPVQDLREVNKRVEDIHPTVPNPYNLLSGLPPSHQWYTVLDLKDAFFCLRLHPTSQPLFAFEWRDPEMGISGQLTWTRLPQGFKNSPTLFNEALHRDLADFRIQHPDLILLQYVDDLLLAATSEQDCQRGTRALLQTLGNLGYRASAKKAQICQKQVKYLGYLLKEGQRWLTEARKETVMGQPTPKTPRQLREFLGKAGFCRLFIPGFAEMAAPLYPLTKPGTLFNWGPDQQKAYQEIKQALLTAPALGLPDLTKPFELFVDEKQGYAKGVLTQKLGPWRRPVAYLSKKLDPVAAGWPPCLRMVAAIAVLTKDAGKLTMGQPLVILAPHAVEALVKQPPDRWLSNARMTHYQAMLLDTDRVQFGPVVALNPATLLPLPEKEAPHDCLEILAETHGTRPDLTDQPIPDADYTWYTDGSSFLQEGQRRAGAAVTTETEVIWARALPAGTSAQRAELIALTQALKMAEGKKLNVYTDSRYAFATAHVHGEIYRRRGWLTSEGREIKNKNEILALLKALFLPKRLSIIHCPGHQKGNSAEARGNRMADQAAREAAMKAVLETSTLLAGKRTADGSEFEKRTADGSEFESPKKKAKVE

SEQ ID NO: 6798 - protein, 2096 aa, synthetic construct
MPAAKRVKLDGGDKKYSIGLDIGTNSVGWAVITDEYKVPSKKFKVLGNTDRHSIKKNLIGALLFDSGETAEATRLKRTARRRYTRRKNRICYLQEIFSNEMAKVDDSFFHRLEESFLVEEDKKHERHPIFGNIVDEVAYHEKYPTIYHLRKKLVDSTDKADLRLIYLALAHMIKFRGHFLIEGDLNPDNSDVDKLFIQLVQTYNQLFEENPINASGVDAKAILSARLSKSRRLENLIAQLPGEKKNGLFGNLIALSLGLTPNFKSNFDLAEDAKLQLSKDTYDDDLDNLLAQIGDQYADLFLAAKNLSDAILLSDILRVNTEITKAPLSASMIKRYDEHHQDLTLLKALVRQQLPEKYKEIFFDQSKNGYAGYIDGGASQEEFYKFIKPILEKMDGTEELLVKLNREDLLRKQRTFDNGSIPHQIHLGELHAILRRQEDFYPFLKDNREKIEKILTFRIPYYVGPLARGNSRFAWMTRKSEETITPWNFEEVVDKGASAQSFIERMTNFDKNLPNEKVLPKHSLLYEYFTVYNELTKVKYVTEGMRKPAFLSGEQKKAIVDLLFKTNRKVTVKQLKEDYFKKIECFDSVEISGVEDRFNASLGTYHDLLKIIKDKDFLDNEENEDILEDIVLTLTLFEDREMIEERLKTYAHLFDDKVMKQLKRRRYTGWGRLSRKLINGIRDKQSGKTILDFLKSDGFANRNFMQLIHDDSLTFKEDIQKAQVSGQGDSLHEHIANLAGSPAIKKGILQTVKVVDELVKVMGRHKPENIVIEMARENQTTQKGQKNSRERMKRIEEGIKELGSQILKEHPVENTQLQNEKLYLYYLQNGRDMYVDQELDINRLSDYDVDHIVPQSFLKDDSIDNKVLTRSDKARGKSDNVPSEEVVKKMKNYWRQLLNAKLITQRKFDNLTKAERGGLSELDKAGFIKRQLVETRQITKHVAQILDSRMNTKYDENDKLIREVKVITLKSKLVSDFRKDFQFYKVREINNYHHAHDAYLNAVVGTALIKKYPKLESEFVYGDYKVYDVRKMIAKSEQEIGKATAKYFFYSNIMNFFKTEITLANGEIRKRPLIETNGETGEIVWDKGRDFATVRKVLSMPQVNIVKKTEVQTGGFSKESILPKRNSDKLIARKKDWDPKKYGGFDSPTVAYSVLVVAKVEKGKSKKLKSVKELLGITIMERSSFEKNPIDFLEAKGYKEVKKDLIIKLPKYSLFELENGRKRMLASAGELQKGNELALPSKYVNFLYLASHYEKLKGSPEDNEQKQLFVEQHKHYLDEIIEQISEFSKRVILADANLDKVLSAYNKHRDKPIREQAENIIHLFTLTNLGAPAAFKYFDTTIDRKRYTSTKEVLDATLIHQSITGLYETRIDLSQLGGDGGGGSGGGGSSGGTAPLEEEYRLFLEAPIQNVTLLEQWKREIPKVWAEINPPGLASTQAPIHVQLLSTALPVRVRQYPITLEAKRSLRETIRKFRAAGILRPVHSPWNTPLLPVRKSGTSEYRMVQDLREVNKRVETIHPTVPNPYTLLSLLPPDRIWYSVLDLKDAFFCIPLAPESQLIFAFEWADAEEGESGQLTWTRLPQGFKNSPTLFNEALNRDLQGFRLDHPSVSLLQYVDDLLIAADTQAACLSATRDLLMTLAELGYRVSGKKAQLCQEEVTYLGFKIHKGSRSLSNSRTQAILQIPVPKTKRQVREFLGKIGYCRLFIPGFAELAQPLYAATRPGNDPLVWGEKEEEAFQSLKLALTQPPALALPSLDKPFQLFVEETSGAAKGVLTQALGPWKRPVAYLSKRLDPVAAGWPRCLRAIAAAALLTREASKLTFGQDIEITSSHNLESLLRSPPDKWLTNARITQYQVLLLDPPRVRFKQTAALNPATLLPETDDTLPIHHCLDTLDSLTSTRPDLTDQPLAQAEATLFTDGSSYIRDGKRYAGAAVVTLDSVIWAEPLPIGTSAQKAELIALTKALEWSKDKSVNIYTDSRYAFATLHVHGMIYRERGWLTAGGKAIKNAPEILALLTAVWLPKRVAVMHCKGHQKDDAPTSTGNRRADEVAREVAIRPLSTQATISAGKRTADGSEFEKRTADGSEFESPKKKAKVE

SEQ ID NO: 6799 - protein, 2100 aa, synthetic construct
MPAAKRVKLDGGDKKYSIGLDIGTNSVGWAVITDEYKVPSKKFKVLGNTDRHSIKKNLIGALLFDSGETAEATRLKRTARRRYTRRKNRICYLQEIFSNEMAKVDDSFFHRLEESFLVEEDKKHERHPIFGNIVDEVAYHEKYPTIYHLRKKLVDSTDKADLRLIYLALAHMIKFRGHFLIEGDLNPDNSDVDKLFIQLVQTYNQLFEENPINASGVDAKAILSARLSKSRRLENLIAQLPGEKKNGLFGNLIALSLGLTPNFKSNFDLAEDAKLQLSKDTYDDDLDNLLAQIGDQYADLFLAAKNLSDAILLSDILRVNTEITKAPLSASMIKRYDEHHQDLTLLKALVRQQLPEKYKEIFFDQSKNGYAGYIDGGASQEEFYKFIKPILEKMDGTEELLVKLNREDLLRKQRTFDNGSIPHQIHLGELHAILRRQEDFYPFLKDNREKIEKILTFRIPYYVGPLARGNSRFAWMTRKSEETITPWNFEEVVDKGASAQSFIERMTNFDKNLPNEKVLPKHSLLYEYFTVYNELTKVKYVTEGMRKPAFLSGEQKKAIVDLLFKTNRKVTVKQLKEDYFKKIECFDSVEISGVEDRFNASLGTYHDLLKIIKDKDFLDNEENEDILEDIVLTLTLFEDREMIEERLKTYAHLFDDKVMKQLKRRRYTGWGRLSRKLINGIRDKQSGKTILDFLKSDGFANRNFMQLIHDDSLTFKEDIQKAQVSGQGDSLHEHIANLAGSPAIKKGILQTVKVVDELVKVMGRHKPENIVIEMARENQTTQKGQKNSRERMKRIEEGIKELGSQILKEHPVENTQLQNEKLYLYYLQNGRDMYVDQELDINRLSDYDVDHIVPQSFLKDDSIDNKVLTRSDKARGKSDNVPSEEVVKKMKNYWRQLLNAKLITQRKFDNLTKAERGGLSELDKAGFIKRQLVETRQITKHVAQILDSRMNTKYDENDKLIREVKVITLKSKLVSDFRKDFQFYKVREINNYHHAHDAYLNAVVGTALIKKYPKLESEFVYGDYKVYDVRKMIAKSEQEIGKATAKYFFYSNIMNFFKTEITLANGEIRKRPLIETNGETGEIVWDKGRDFATVRKVLSMPQVNIVKKTEVQTGGFSKESILPKRNSDKLIARKKDWDPKKYGGFDSPTVAYSVLVVAKVEKGKSKKLKSVKELLGITIMERSSFEKNPIDFLEAKGYKEVKKDLIIKLPKYSLFELENGRKRMLASAGELQKGNELALPSKYVNFLYLASHYEKLKGSPEDNEQKQLFVEQHKHYLDEIIEQISEFSKRVILADANLDKVLSAYNKHRDKPIREQAENIIHLFTLTNLGAPAAFKYFDTTIDRKRYTSTKEVLDATLIHQSITGLYETRIDLSQLGGDGGGGSGGGGSSGGTVSLQDEHRLFDIPVTTSLPDVWLQDFPQAWAETGGLGRAKCQAPIIIDLKPTAVPVSIKQYPMSLEAHMGIRQHIIKFLELGVLRPCRSPWNTPLLPVKKPGTQDYRPVQDLREINKRTVDIHPTVPNPYNLLSTLKPDYSWYTVLDLKDAFFCLPLAPQSQELFAFEWKDPERGISGQLTWTRLPQGFKNSPTLFDEALHRDLTDFRTQHPEVTLLQYVDDLLLAAPTKKACTQGTRHLLQELGEKGYRASAKKAQICQTKVTYLGYILSEGKRWLTPGRIETVARIPPPRNPREVREFLGTAGFCRLWIPGFAELAAPLYALTKESTPFTWQTEHQLAFEALKKALLSAPALGLPDTSKPFTLFLDERQGIAKGVLTQKLGPWKRPVAYLSKKLDPVAAGWPPCLRIMAATAMLVKDSAKLTLGQPLTVITPHTLEAIVRQPPDRWITNARLTHYQALLLDTDRVQFGPPVTLNPATLLPVPENQPSPHDCRQVLAETHGTREDLKDQELPDADHTWYTDGSSYLDSGTRRAGAAVVDGHNTIWAQSLPPGTSAQKAELIALTKALELSKGKKANIYTDSRYAFATAHTHGSIYERRGLLTSEGKEIKNKAEIIALLKALFLPQEVAIIHCPGHQKGQDPVAVGNRQADRVARQAAMAEVLTLATEPDNTSHITAGKRTADGSEFEKRTADGSEFESPKKKAKVE

SEQ ID NO: 6800 - protein, 1999 aa, synthetic construct
MPAAKRVKLDGGDKKYSIGLDIGTNSVGWAVITDEYKVPSKKFKVLGNTDRHSIKKNLIGALLFDSGETAEATRLKRTARRRYTRRKNRICYLQEIFSNEMAKVDDSFFHRLEESFLVEEDKKHERHPIFGNIVDEVAYHEKYPTIYHLRKKLVDSTDKADLRLIYLALAHMIKFRGHFLIEGDLNPDNSDVDKLFIQLVQTYNQLFEENPINASGVDAKAILSARLSKSRRLENLIAQLPGEKKNGLFGNLIALSLGLTPNFKSNFDLAEDAKLQLSKDTYDDDLDNLLAQIGDQYADLFLAAKNLSDAILLSDILRVNTEITKAPLSASMIKRYDEHHQDLTLLKALVRQQLPEKYKEIFFDQSKNGYAGYIDGGASQEEFYKFIKPILEKMDGTEELLVKLNREDLLRKQRTFDNGSIPHQIHLGELHAILRRQEDFYPFLKDNREKIEKILTFRIPYYVGPLARGNSRFAWMTRKSEETITPWNFEEVVDKGASAQSFIERMTNFDKNLPNEKVLPKHSLLYEYFTVYNELTKVKYVTEGMRKPAFLSGEQKKAIVDLLFKTNRKVTVKQLKEDYFKKIECFDSVEISGVEDRFNASLGTYHDLLKIIKDKDFLDNEENEDILEDIVLTLTLFEDREMIEERLKTYAHLFDDKVMKQLKRRRYTGWGRLSRKLINGIRDKQSGKTILDFLKSDGFANRNFMQLIHDDSLTFKEDIQKAQVSGQGDSLHEHIANLAGSPAIKKGILQTVKVVDELVKVMGRHKPENIVIEMARENQTTQKGQKNSRERMKRIEEGIKELGSQILKEHPVENTQLQNEKLYLYYLQNGRDMYVDQELDINRLSDYDVDHIVPQSFLKDDSIDNKVLTRSDKARGKSDNVPSEEVVKKMKNYWRQLLNAKLITQRKFDNLTKAERGGLSELDKAGFIKRQLVETRQITKHVAQILDSRMNTKYDENDKLIREVKVITLKSKLVSDFRKDFQFYKVREINNYHHAHDAYLNAVVGTALIKKYPKLESEFVYGDYKVYDVRKMIAKSEQEIGKATAKYFFYSNIMNFFKTEITLANGEIRKRPLIETNGETGEIVWDKGRDFATVRKVLSMPQVNIVKKTEVQTGGFSKESILPKRNSDKLIARKKDWDPKKYGGFDSPTVAYSVLVVAKVEKGKSKKLKSVKELLGITIMERSSFEKNPIDFLEAKGYKEVKKDLIIKLPKYSLFELENGRKRMLASAGELQKGNELALPSKYVNFLYLASHYEKLKGSPEDNEQKQLFVEQHKHYLDEIIEQISEFSKRVILADANLDKVLSAYNKHRDKPIREQAENIIHLFTLTNLGAPAAFKYFDTTIDRKRYTSTKEVLDATLIHQSITGLYETRIDLSQLGGDGGGGSGGGGSSGGGVLDTPPSHIGLEHLPPPPEVPQFPLNLERLQALQDLVHRSLEAGYISPWDGPGNNPVFPVRKPNGAWRFVHDLRATNALTKPIPALSPGPPDLTAPPTHPPHIICLDLKDAFFQIPVEDRFRFYLSFTLPSPGGLQPHRRFAWRVLPQGFINSPALFQRALQEPLRQVSAAFSQSLLVSYMDDILYASPTEEQRSQCYQALAARLRDLGFQVASEKTSQTPSPVPFLGQMVHEQIVTYQSLPTLQISSPISLHQLQAVLGDLQWVSRGTPTTRRPLQLLYSSLKRHHDPRAIIQLSPEQLQGIAELRQALSHNARSRYNEQEPLLAYVHLTRAGSTLVLFQKGAQFPLAYFQTPLTDNQASPWGLLLLLGCQYLQTQALSSYAKPILKYYHNLPKTSLDNWIQSSEDPRVQELLQLWPQISSQGIQPPGPWKTLITRAEVFLTPQFSPDPIPAALCLFSDGATGRGAYCLWKDHLLDFQAVPAPESAQKGELAGLLAGLAAAPPEPVNIWVDSKYLYSLLRTWVLGAWLQPDPVPSYALLYKSLLRHPAIVVGHVRSHSSASHPIASLNNYVDQLAGKRTADGSEFEKRTADGSEFESPKKKAKVE

SEQ ID NO: 6801 - protein, 2085 aa, synthetic construct
MPAAKRVKLDGGDKKYSIGLDIGTNSVGWAVITDEYKVPSKKFKVLGNTDRHSIKKNLIGALLFDSGETAEATRLKRTARRRYTRRKNRICYLQEIFSNEMAKVDDSFFHRLEESFLVEEDKKHERHPIFGNIVDEVAYHEKYPTIYHLRKKLVDSTDKADLRLIYLALAHMIKFRGHFLIEGDLNPDNSDVDKLFIQLVQTYNQLFEENPINASGVDAKAILSARLSKSRRLENLIAQLPGEKKNGLFGNLIALSLGLTPNFKSNFDLAEDAKLQLSKDTYDDDLDNLLAQIGDQYADLFLAAKNLSDAILLSDILRVNTEITKAPLSASMIKRYDEHHQDLTLLKALVRQQLPEKYKEIFFDQSKNGYAGYIDGGASQEEFYKFIKPILEKMDGTEELLVKLNREDLLRKQRTFDNGSIPHQIHLGELHAILRRQEDFYPFLKDNREKIEKILTFRIPYYVGPLARGNSRFAWMTRKSEETITPWNFEEVVDKGASAQSFIERMTNFDKNLPNEKVLPKHSLLYEYFTVYNELTKVKYVTEGMRKPAFLSGEQKKAIVDLLFKTNRKVTVKQLKEDYFKKIECFDSVEISGVEDRFNASLGTYHDLLKIIKDKDFLDNEENEDILEDIVLTLTLFEDREMIEERLKTYAHLFDDKVMKQLKRRRYTGWGRLSRKLINGIRDKQSGKTILDFLKSDGFANRNFMQLIHDDSLTFKEDIQKAQVSGQGDSLHEHIANLAGSPAIKKGILQTVKVVDELVKVMGRHKPENIVIEMARENQTTQKGQKNSRERMKRIEEGIKELGSQILKEHPVENTQLQNEKLYLYYLQNGRDMYVDQELDINRLSDYDVDHIVPQSFLKDDSIDNKVLTRSDKARGKSDNVPSEEVVKKMKNYWRQLLNAKLITQRKFDNLTKAERGGLSELDKAGFIKRQLVETRQITKHVAQILDSRMNTKYDENDKLIREVKVITLKSKLVSDFRKDFQFYKVREINNYHHAHDAYLNAVVGTALIKKYPKLESEFVYGDYKVYDVRKMIAKSEQEIGKATAKYFFYSNIMNFFKTEITLANGEIRKRPLIETNGETGEIVWDKGRDFATVRKVLSMPQVNIVKKTEVQTGGFSKESILPKRNSDKLIARKKDWDPKKYGGFDSPTVAYSVLVVAKVEKGKSKKLKSVKELLGITIMERSSFEKNPIDFLEAKGYKEVKKDLIIKLPKYSLFELENGRKRMLASAGELQKGNELALPSKYVNFLYLASHYEKLKGSPEDNEQKQLFVEQHKHYLDEIIEQISEFSKRVILADANLDKVLSAYNKHRDKPIREQAENIIHLFTLTNLGAPAAFKYFDTTIDRKRYTSTKEVLDATLIHQSITGLYETRIDLSQLGGDGGGGSGGGGSSGGVPWILKKPLELTIKLDLEEQQGTLLNNSILSKKGKEELKQLFEKYSALWQSWENQVGHRRIRPHKIATGTVKPTPQKQYHINPKAKPDIQIVINDLLKQGVLIQKESTMNTPVYPVPKPNGRWRMVLDYRAVNKVTPLIAVQNQHSYGILGSLFKGRYKTTIDLSNGFWAHPIVPEDYWITAFTWQGKQYCWTVLPQGFLNSPGLFTGDVVDLLQGIPNVEVYVDDVYISHDSEKEHLEYLDILFNRLKEAGYIISLKKSNIANSIVDFLGFQITNEGRGLTDTFKEKLENITAPTTLKQLQSILGLLNFARNFIPDFTELIAPLYALIPKSTKNYVPWQIEHSTTLETLITKLNGAEYLQGRKGDKTLIMKVNASYTTGYIRYYNEGEKKPISYVSIVFSKTELKFTELEKLLTTVHKGLLKALDLSMGQNIHVYSPIVSMQNIQKTPQTAKKALASRWLSWLSYLEDPRIRFFYDPQMPALKDLPAVDTGKDNKKHPSNFQHIFYTDGSAITSPTKEGHLNAGMGIVYFINKDGNLQKQQEWSISLGNHTAQFAEIAAFEFALKKCLPLGGNILVVTDSNYVAKAYNEELDVWASNGFVNNRKKPLKHISKWKSVADLKRLRPDVVVTHEPGHQKLDSSPHAYGNNLADQLATQASFKVHAGKRTADGSEFEKRTADGSEFESPKKKAKVE

SEQ ID NO: 6802 - protein, 2093 aa, synthetic construct
MPAAKRVKLDGGDKKYSIGLDIGTNSVGWAVITDEYKVPSKKFKVLGNTDRHSIKKNLIGALLFDSGETAEATRLKRTARRRYTRRKNRICYLQEIFSNEMAKVDDSFFHRLEESFLVEEDKKHERHPIFGNIVDEVAYHEKYPTIYHLRKKLVDSTDKADLRLIYLALAHMIKFRGHFLIEGDLNPDNSDVDKLFIQLVQTYNQLFEENPINASGVDAKAILSARLSKSRRLENLIAQLPGEKKNGLFGNLIALSLGLTPNFKSNFDLAEDAKLQLSKDTYDDDLDNLLAQIGDQYADLFLAAKNLSDAILLSDILRVNTEITKAPLSASMIKRYDEHHQDLTLLKALVRQQLPEKYKEIFFDQSKNGYAGYIDGGASQEEFYKFIKPILEKMDGTEELLVKLNREDLLRKQRTFDNGSIPHQIHLGELHAILRRQEDFYPFLKDNREKIEKILTFRIPYYVGPLARGNSRFAWMTRKSEETITPWNFEEVVDKGASAQSFIERMTNFDKNLPNEKVLPKHSLLYEYFTVYNELTKVKYVTEGMRKPAFLSGEQKKAIVDLLFKTNRKVTVKQLKEDYFKKIECFDSVEISGVEDRFNASLGTYHDLLKIIKDKDFLDNEENEDILEDIVLTLTLFEDREMIEERLKTYAHLFDDKVMKQLKRRRYTGWGRLSRKLINGIRDKQSGKTILDFLKSDGFANRNFMQLIHDDSLTFKEDIQKAQVSGQGDSLHEHIANLAGSPAIKKGILQTVKVVDELVKVMGRHKPENIVIEMARENQTTQKGQKNSRERMKRIEEGIKELGSQILKEHPVENTQLQNEKLYLYYLQNGRDMYVDQELDINRLSDYDVDHIVPQSFLKDDSIDNKVLTRSDKARGKSDNVPSEEVVKKMKNYWRQLLNAKLITQRKFDNLTKAERGGLSELDKAGFIKRQLVETRQITKHVAQILDSRMNTKYDENDKLIREVKVITLKSKLVSDFRKDFQFYKVREINNYHHAHDAYLNAVVGTALIKKYPKLESEFVYGDYKVYDVRKMIAKSEQEIGKATAKYFFYSNIMNFFKTEITLANGEIRKRPLIETNGETGEIVWDKGRDFATVRKVLSMPQVNIVKKTEVQTGGFSKESILPKRNSDKLIARKKDWDPKKYGGFDSPTVAYSVLVVAKVEKGKSKKLKSVKELLGITIMERSSFEKNPIDFLEAKGYKEVKKDLIIKLPKYSLFELENGRKRMLASAGELQKGNELALPSKYVNFLYLASHYEKLKGSPEDNEQKQLFVEQHKHYLDEIIEQISEFSKRVILADANLDKVLSAYNKHRDKPIREQAENIIHLFTLTNLGAPAAFKYFDTTIDRKRYTSTKEVLDATLIHQSITGLYETRIDLSQLGGDGGGGSGGGGSSGGTLQLEEEYRLFEPESTQKQEMDIWLKNFPQAWAETGGMGTAHCQAPVLIQLKATATPISIRQYPMPHEAYQGIKPHIRRMLDQGILKPCQSPWNTPLLPVKKPGTEDYRPVQDLREVNKRVEDIHPTVPNPYNLLSTLPPSHPWYTVLDLKDAFFCLRLHSESQLLFAFEWRDPEIGLSGQLTWTRLPQGFKNSPTLFNEALHSDLADFRVRYPALVLLQYVDDLLLAAATRTECLEGTKALLETLGNKGYRASAKKAQICLQEVTYLGYSLKDGQRWLTKARKEAILSIPVPKNSRQVREFLGTAGYCRLWIPGFAELAAPLYPLTRPGTLFQWGTEQQLAFEDIKKALLSSPALGLPDITKPFELFIDENSGFAKGVLVQKLGPWKRPVAYLSKKLDTVASGWPPCLRMVAAIAILVKDAGKLTLGQPLTILTSHPVEALVRQPPNKWLSNARMTHYQAMLLDAERVHFGPTVSLNPATLLPLPSGGNHHDCLQILAETHGTRPDLTDQPLPDADLTWYTDGSSFIRNGEREAGAAVTTESEVIWAAPLPPGTSAQRAELIALTQALKMAEGKKLTVYTDSRYAFATTHVHGEIYRRRGWLTSEGKEIKNKNEILALLEALFLPKRLSIIHCPGHQKGDSPQAKGNRLADDTAKKAATETHSSLTVLPAGKRTADGSEFEKRTADGSEFESPKKKAKVE

SEQ ID NO: 6803 - protein, 2125 aa, synthetic construct
MPAAKRVKLDGGDKKYSIGLDIGTNSVGWAVITDEYKVPSKKFKVLGNTDRHSIKKNLIGALLFDSGETAEATRLKRTARRRYTRRKNRICYLQEIFSNEMAKVDDSFFHRLEESFLVEEDKKHERHPIFGNIVDEVAYHEKYPTIYHLRKKLVDSTDKADLRLIYLALAHMIKFRGHFLIEGDLNPDNSDVDKLFIQLVQTYNQLFEENPINASGVDAKAILSARLSKSRRLENLIAQLPGEKKNGLFGNLIALSLGLTPNFKSNFDLAEDAKLQLSKDTYDDDLDNLLAQIGDQYADLFLAAKNLSDAILLSDILRVNTEITKAPLSASMIKRYDEHHQDLTLLKALVRQQLPEKYKEIFFDQSKNGYAGYIDGGASQEEFYKFIKPILEKMDGTEELLVKLNREDLLRKQRTFDNGSIPHQIHLGELHAILRRQEDFYPFLKDNREKIEKILTFRIPYYVGPLARGNSRFAWMTRKSEETITPWNFEEVVDKGASAQSFIERMTNFDKNLPNEKVLPKHSLLYEYFTVYNELTKVKYVTEGMRKPAFLSGEQKKAIVDLLFKTNRKVTVKQLKEDYFKKIECFDSVEISGVEDRFNASLGTYHDLLKIIKDKDFLDNEENEDILEDIVLTLTLFEDREMIEERLKTYAHLFDDKVMKQLKRRRYTGWGRLSRKLINGIRDKQSGKTILDFLKSDGFANRNFMQLIHDDSLTFKEDIQKAQVSGQGDSLHEHIANLAGSPAIKKGILQTVKVVDELVKVMGRHKPENIVIEMARENQTTQKGQKNSRERMKRIEEGIKELGSQILKEHPVENTQLQNEKLYLYYLQNGRDMYVDQELDINRLSDYDVDHIVPQSFLKDDSIDNKVLTRSDKARGKSDNVPSEEVVKKMKNYWRQLLNAKLITQRKFDNLTKAERGGLSELDKAGFIKRQLVETRQITKHVAQILDSRMNTKYDENDKLIREVKVITLKSKLVSDFRKDFQFYKVREINNYHHAHDAYLNAVVGTALIKKYPKLESEFVYGDYKVYDVRKMIAKSEQEIGKATAKYFFYSNIMNFFKTEITLANGEIRKRPLIETNGETGEIVWDKGRDFATVRKVLSMPQVNIVKKTEVQTGGFSKESILPKRNSDKLIARKKDWDPKKYGGFDSPTVAYSVLVVAKVEKGKSKKLKSVKELLGITIMERSSFEKNPIDFLEAKGYKEVKKDLIIKLPKYSLFELENGRKRMLASAGELQKGNELALPSKYVNFLYLASHYEKLKGSPEDNEQKQLFVEQHKHYLDEIIEQISEFSKRVILADANLDKVLSAYNKHRDKPIREQAENIIHLFTLTNLGAPAAFKYFDTTIDRKRYTSTKEVLDATLIHQSITGLYETRIDLSQLGGDGGGGSGGGGSSGGLLGRDLLTKLKAQIQFSTEGPQVTWEDRPAMCLVLNLEEEYRLHEKPVPPSIDPSWLQLFPMVWAEKAGMGLANQVPPVVVELKSDASPVAVRQYPMSKEAREGIRPHIQRFLDLGILVPCQSPWNTPLLPVKKPGTNDYRPVQDLREVNKRVQDIHPTVPNPYNLLSSLPPSHTWYSVLDLKDAFFCLKLHPNSQPLFAFEWRDPEKGNTGQLTWTRLPQGFKNSPTLFNEALHRDLASFRALNPQVVMLQYVDDLLVAAPTYRDCKEGTRRLLQELSKLGYRVSAKKAQLCREEVTYLGYLLKGGKRWLTPARKATVMKIPTPTTPRQVREFLGTAGFCRLWIPGFASLAAPLYPLTRPKVPFTWTEAHQEAFGRIKEALLSAPALALPDLTKPFALYVDEKEGVARGVLTQTLGPWRRPVAYLSKKLDPVASGWPTCLKAIAAVALLLKDADKLTLGQNVLVIAPHNLESIVRQPPDRWMTNARMTHYQSLLLNERVSFAPPAILNPATLLPVESDDTPIHICSEILAEETGTRPDLRDQPLPGVPAWYTDGSSFIMDGRRQAGAAIVDNKRTVWASNLPEGTSAQKAELIALTQALRLAEGKSINIYTDSRYAFATAHVHGAIYKQRGWLTSAGKDIKNKEEILALLEAIHLPKRVAIIHCPGHQRGTDPVATGNRKADEAAKQAAQSTRILTETTKNAGKRTADGSEFEKRTADGSEFESPKKKAKVE

SEQ ID NO: 6804 - protein, 2125 aa, synthetic construct
MPAAKRVKLDGGDKKYSIGLDIGTNSVGWAVITDEYKVPSKKFKVLGNTDRHSIKKNLIGALLFDSGETAEATRLKRTARRRYTRRKNRICYLQEIFSNEMAKVDDSFFHRLEESFLVEEDKKHERHPIFGNIVDEVAYHEKYPTIYHLRKKLVDSTDKADLRLIYLALAHMIKFRGHFLIEGDLNPDNSDVDKLFIQLVQTYNQLFEENPINASGVDAKAILSARLSKSRRLENLIAQLPGEKKNGLFGNLIALSLGLTPNFKSNFDLAEDAKLQLSKDTYDDDLDNLLAQIGDQYADLFLAAKNLSDAILLSDILRVNTEITKAPLSASMIKRYDEHHQDLTLLKALVRQQLPEKYKEIFFDQSKNGYAGYIDGGASQEEFYKFIKPILEKMDGTEELLVKLNREDLLRKQRTFDNGSIPHQIHLGELHAILRRQEDFYPFLKDNREKIEKILTFRIPYYVGPLARGNSRFAWMTRKSEETITPWNFEEVVDKGASAQSFIERMTNFDKNLPNEKVLPKHSLLYEYFTVYNELTKVKYVTEGMRKPAFLSGEQKKAIVDLLFKTNRKVTVKQLKEDYFKKIECFDSVEISGVEDRFNASLGTYHDLLKIIKDKDFLDNEENEDILEDIVLTLTLFEDREMIEERLKTYAHLFDDKVMKQLKRRRYTGWGRLSRKLINGIRDKQSGKTILDFLKSDGFANRNFMQLIHDDSLTFKEDIQKAQVSGQGDSLHEHIANLAGSPAIKKGILQTVKVVDELVKVMGRHKPENIVIEMARENQTTQKGQKNSRERMKRIEEGIKELGSQILKEHPVENTQLQNEKLYLYYLQNGRDMYVDQELDINRLSDYDVDHIVPQSFLKDDSIDNKVLTRSDKARGKSDNVPSEEVVKKMKNYWRQLLNAKLITQRKFDNLTKAERGGLSELDKAGFIKRQLVETRQITKHVAQILDSRMNTKYDENDKLIREVKVITLKSKLVSDFRKDFQFYKVREINNYHHAHDAYLNAVVGTALIKKYPKLESEFVYGDYKVYDVRKMIAKSEQEIGKATAKYFFYSNIMNFFKTEITLANGEIRKRPLIETNGETGEIVWDKGRDFATVRKVLSMPQVNIVKKTEVQTGGFSKESILPKRNSDKLIARKKDWDPKKYGGFDSPTVAYSVLVVAKVEKGKSKKLKSVKELLGITIMERSSFEKNPIDFLEAKGYKEVKKDLIIKLPKYSLFELENGRKRMLASAGELQKGNELALPSKYVNFLYLASHYEKLKGSPEDNEQKQLFVEQHKHYLDEIIEQISEFSKRVILADANLDKVLSAYNKHRDKPIREQAENIIHLFTLTNLGAPAAFKYFDTTIDRKRYTSTKEVLDATLIHQSITGLYETRIDLSQLGGDGGGGSGGGGSSGGLLGRDLLTKLKAQIQFSTEGPQVTWEDRPAMCLVLNLEEEYRLHEKPVPPSIDPSWLQLFPMVWAEKAGMGLANQVPPVVVELKSDASPVAVRQYPMSKEAREGIRPHIQRFLDLGILVPCQSPWNTPLLPVKKPGTNDYRPVQDLREVNKRVQDIHPTVPNPYNLLSSLPPSHTWYSVLDLKDAFFCLKLHPNSQPLFAFEWRDPEKGNTGQLTWTRLPQGFKNSPTLFNEALHRDLASFRALNPQVVMLQYVDDLLVAAPTYRDCKEGTRRLLQELSKLGYRVSAKKAQLCREEVTYLGYLLKGGKRWLTPARKATVMKIPTPTTPRQVREFLGKAGFCRLFIPGFASLAAPLYPLTRPKVPFTWTEAHQEAFGRIKEALLSAPALALPDLTKPFALYVDEKEGVARGVLTQTLGPWRRPVAYLSKKLDPVASGWPTCLKAIAAVALLLKDADKLTLGQNVLVIAPHNLESIVRQPPDRWMTNARMTHYQSLLLNERVSFAPPAILNPATLLPVESDDTPIHICSEILAEETGTRPDLRDQPLPGVPAWYTDGSSFIMDGRRQAGAAIVDNKRTVWASNLPEGTSAQKAELIALTQALRLAEGKSINIYTDSRYAFATAHVHGAIYKQRGWLTSAGKDIKNKEEILALLEAIHLPKRVAIIHCPGHQRGTDPVATGNRKADEAAKQAAQSTRILTETTKNAGKRTADGSEFEKRTADGSEFESPKKKAKVE

SEQ ID NO: 6805 - protein, 2094 aa, synthetic construct
MPAAKRVKLDGGDKKYSIGLDIGTNSVGWAVITDEYKVPSKKFKVLGNTDRHSIKKNLIGALLFDSGETAEATRLKRTARRRYTRRKNRICYLQEIFSNEMAKVDDSFFHRLEESFLVEEDKKHERHPIFGNIVDEVAYHEKYPTIYHLRKKLVDSTDKADLRLIYLALAHMIKFRGHFLIEGDLNPDNSDVDKLFIQLVQTYNQLFEENPINASGVDAKAILSARLSKSRRLENLIAQLPGEKKNGLFGNLIALSLGLTPNFKSNFDLAEDAKLQLSKDTYDDDLDNLLAQIGDQYADLFLAAKNLSDAILLSDILRVNTEITKAPLSASMIKRYDEHHQDLTLLKALVRQQLPEKYKEIFFDQSKNGYAGYIDGGASQEEFYKFIKPILEKMDGTEELLVKLNREDLLRKQRTFDNGSIPHQIHLGELHAILRRQEDFYPFLKDNREKIEKILTFRIPYYVGPLARGNSRFAWMTRKSEETITPWNFEEVVDKGASAQSFIERMTNFDKNLPNEKVLPKHSLLYEYFTVYNELTKVKYVTEGMRKPAFLSGEQKKAIVDLLFKTNRKVTVKQLKEDYFKKIECFDSVEISGVEDRFNASLGTYHDLLKIIKDKDFLDNEENEDILEDIVLTLTLFEDREMIEERLKTYAHLFDDKVMKQLKRRRYTGWGRLSRKLINGIRDKQSGKTILDFLKSDGFANRNFMQLIHDDSLTFKEDIQKAQVSGQGDSLHEHIANLAGSPAIKKGILQTVKVVDELVKVMGRHKPENIVIEMARENQTTQKGQKNSRERMKRIEEGIKELGSQILKEHPVENTQLQNEKLYLYYLQNGRDMYVDQELDINRLSDYDVDHIVPQSFLKDDSIDNKVLTRSDKARGKSDNVPSEEVVKKMKNYWRQLLNAKLITQRKFDNLTKAERGGLSELDKAGFIKRQLVETRQITKHVAQILDSRMNTKYDENDKLIREVKVITLKSKLVSDFRKDFQFYKVREINNYHHAHDAYLNAVVGTALIKKYPKLESEFVYGDYKVYDVRKMIAKSEQEIGKATAKYFFYSNIMNFFKTEITLANGEIRKRPLIETNGETGEIVWDKGRDFATVRKVLSMPQVNIVKKTEVQTGGFSKESILPKRNSDKLIARKKDWDPKKYGGFDSPTVAYSVLVVAKVEKGKSKKLKSVKELLGITIMERSSFEKNPIDFLEAKGYKEVKKDLIIKLPKYSLFELENGRKRMLASAGELQKGNELALPSKYVNFLYLASHYEKLKGSPEDNEQKQLFVEQHKHYLDEIIEQISEFSKRVILADANLDKVLSAYNKHRDKPIREQAENIIHLFTLTNLGAPAAFKYFDTTIDRKRYTSTKEVLDATLIHQSITGLYETRIDLSQLGGDGGGGSGGGGSSGGTLNLEDEYRLYETSAEPEVSPGSTWLSDFPQAWAETGGMGLAVRQAPLIIPLKATSTPVSIKQYPMSQEAKLGIKPHIQRLLDQGILVPCQSPWNTPLLPVKKPGTNDYRPVQDLREVNKRVEDIHPTVPNPYNLLSGLPPSHRWYTVLDLKDAFFCLRLHPTSQPLFAFEWRDPGMGISGQLTWTRLPQGFKNSPTLFNEALHRDLADFRIQHPDLILLQYVDDILLAATSELDCQQGTRALLLTLGNLGYRASAKKAQLCQKQVKYLGYLLKEGQRWLTEARKETVMGQPTPKTPRQLREFLGKAGFCRLFIPGFAEMAAPLYPLTKPGTLFNWGPDQQKAYQEIKQALLTAPALGLPDLTKPFELFVDEKQGYAKGVLTQKLGPWRRPVAYLSKKLDPVAAGWPPCLRMVAAIAVLRKDAGKLTMGQPLVILAPHAVEALVKQPPDRWLSNARMTHYQAMLLDTDRVQFGPVVALNPATLLPLPEEGAPHDCLEILAETHGTRPDLTDQPIPDADHTWYTDGSSFLQEGQRKAGAAVTTETEVIWARALPAGTSAQRAELIALTQALKMAEGKRLNVYTDSRYAFATAHIHGEIYRRRGWLTSEGREIKNKSEILALLKALFLPKRLSIIHCLGHQKGDSAEARGNRLADQAAREAAIKTPPDTSTLLAGKRTADGSEFEKRTADGSEFESPKKKAKVE

SEQ ID NO: 6806 - protein, 2094 aa, synthetic construct
MPAAKRVKLDGGDKKYSIGLDIGTNSVGWAVITDEYKVPSKKFKVLGNTDRHSIKKNLIGALLFDSGETAEATRLKRTARRRYTRRKNRICYLQEIFSNEMAKVDDSFFHRLEESFLVEEDKKHERHPIFGNIVDEVAYHEKYPTIYHLRKKLVDSTDKADLRLIYLALAHMIKFRGHFLIEGDLNPDNSDVDKLFIQLVQTYNQLFEENPINASGVDAKAILSARLSKSRRLENLIAQLPGEKKNGLFGNLIALSLGLTPNFKSNFDLAEDAKLQLSKDTYDDDLDNLLAQIGDQYADLFLAAKNLSDAILLSDILRVNTEITKAPLSASMIKRYDEHHQDLTLLKALVRQQLPEKYKEIFFDQSKNGYAGYIDGGASQEEFYKFIKPILEKMDGTEELLVKLNREDLLRKQRTFDNGSIPHQIHLGELHAILRRQEDFYPFLKDNREKIEKILTFRIPYYVGPLARGNSRFAWMTRKSEETITPWNFEEVVDKGASAQSFIERMTNFDKNLPNEKVLPKHSLLYEYFTVYNELTKVKYVTEGMRKPAFLSGEQKKAIVDLLFKTNRKVTVKQLKEDYFKKIECFDSVEISGVEDRFNASLGTYHDLLKIIKDKDFLDNEENEDILEDIVLTLTLFEDREMIEERLKTYAHLFDDKVMKQLKRRRYTGWGRLSRKLINGIRDKQSGKTILDFLKSDGFANRNFMQLIHDDSLTFKEDIQKAQVSGQGDSLHEHIANLAGSPAIKKGILQTVKVVDELVKVMGRHKPENIVIEMARENQTTQKGQKNSRERMKRIEEGIKELGSQILKEHPVENTQLQNEKLYLYYLQNGRDMYVDQELDINRLSDYDVDHIVPQSFLKDDSIDNKVLTRSDKARGKSDNVPSEEVVKKMKNYWRQLLNAKLITQRKFDNLTKAERGGLSELDKAGFIKRQLVETRQITKHVAQILDSRMNTKYDENDKLIREVKVITLKSKLVSDFRKDFQFYKVREINNYHHAHDAYLNAVVGTALIKKYPKLESEFVYGDYKVYDVRKMIAKSEQEIGKATAKYFFYSNIMNFFKTEITLANGEIRKRPLIETNGETGEIVWDKGRDFATVRKVLSMPQVNIVKKTEVQTGGFSKESILPKRNSDKLIARKKDWDPKKYGGFDSPTVAYSVLVVAKVEKGKSKKLKSVKELLGITIMERSSFEKNPIDFLEAKGYKEVKKDLIIKLPKYSLFELENGRKRMLASAGELQKGNELALPSKYVNFLYLASHYEKLKGSPEDNEQKQLFVEQHKHYLDEIIEQISEFSKRVILADANLDKVLSAYNKHRDKPIREQAENIIHLFTLTNLGAPAAFKYFDTTIDRKRYTSTKEVLDATLIHQSITGLYETRIDLSQLGGDGGGGSGGGGSSGGTLGIEDEYRLHETSTEPDVSLGSTWLSDFPQAWAETGGMGLAVRQAPLIIPLKATSTPVSIQQYPMSHEARLGIKPHIQRLLDQGILVPCQSPWNTPLLPVKKPGTNDYRPVQDLREVNKRVEDIHPTVPNPYNLLSGLPPSHQWYTVLDLKDAFFCLRLHPTSQPLFAFEWRDPGMGISGQLTWTRLPQGFKNSPTLFNEALHRDLADFRIQHPDLILLQYVDDILLAATSELDCQQGTRALLQTLGDLGYRASAKKAQICQKQVKYLGYLLREGQRWLTEARKETVMGQPVPKTPRQLREFLGTAGFCRLWIPGFAEMAAPLYPLTKPGTLFSWGPDQQKAYQEIKQALLTAPALGLPDLTKPFELFVDEKQGYAKGVLTQKLGPWRRPVAYLSKKLDPVAAGWPPCLRMVAAIAVLTKDAGKLTMGQPLVILAPHAVEALVKQPPDRWLSNARMTHYQAMLLDTDRVQFGPVVALNPATLLPLPEEGAPHDCLEILAETHGTRPDLTDQPIPDADHTWYTDGSSFLQEGQRKAGAAVTTETEVIWAGALPAGTSAQRAELIALTQALKMAEGKRLNVYTDSRYAFATAHIHGEIYRRRGWLTSEGREIKNKSEILALLKALFLPKRLSIIHCLGHQKGDSAEARGNRLADQAAREAAIKTPPDTSTLLAGKRTADGSEFEKRTADGSEFESPKKKAKVE

SEQ ID NO: 6807 - protein, 2094 aa, synthetic construct; identical to SEQ ID NO: 6806

SEQ ID NO: 6808 - protein, 2094 aa, synthetic construct
MPAAKRVKLDGGDKKYSIGLDIGTNSVGWAVITDEYKVPSKKFKVLGNTDRHSIKKNLIGALLFDSGETAEATRLKRTARRRYTRRKNRICYLQEIFSNEMAKVDDSFFHRLEESFLVEEDKKHERHPIFGNIVDEVAYHEKYPTIYHLRKKLVDSTDKADLRLIYLALAHMIKFRGHFLIEGDLNPDNSDVDKLFIQLVQTYNQLFEENPINASGVDAKAILSARLSKSRRLENLIAQLPGEKKNGLFGNLIALSLGLTPNFKSNFDLAEDAKLQLSKDTYDDDLDNLLAQIGDQYADLFLAAKNLSDAILLSDILRVNTEITKAPLSASMIKRYDEHHQDLTLLKALVRQQLPEKYKEIFFDQSKNGYAGYIDGGASQEEFYKFIKPILEKMDGTEELLVKLNREDLLRKQRTFDNGSIPHQIHLGELHAILRRQEDFYPFLKDNREKIEKILTFRIPYYVGPLARGNSRFAWMTRKSEETITPWNFEEVVDKGASAQSFIERMTNFDKNLPNEKVLPKHSLLYEYFTVYNELTKVKYVTEGMRKPAFLSGEQKKAIVDLLFKTNRKVTVKQLKEDYFKKIECFDSVEISGVEDRFNASLGTYHDLLKIIKDKDFLDNEENEDILEDIVLTLTLFEDREMIEERLKTYAHLFDDKVMKQLKRRRYTGWGRLSRKLINGIRDKQSGKTILDFLKSDGFANRNFMQLIHDDSLTFKEDIQKAQVSGQGDSLHEHIANLAGSPAIKKGILQTVKVVDELVKVMGRHKPENIVIEMARENQTTQKGQKNSRERMKRIEEGIKELGSQILKEHPVENTQLQNEKLYLYYLQNGRDMYVDQELDINRLSDYDVDHIVPQSFLKDDSIDNKVLTRSDKARGKSDNVPSEEVVKKMKNYWRQLLNAKLITQRKFDNLTKAERGGLSELDKAGFIKRQLVETRQITKHVAQILDSRMNTKYDENDKLIREVKVITLKSKLVSDFRKDFQFYKVREINNYHHAHDAYLNAVVGTALIKKYPKLESEFVYGDYKVYDVRKMIAKSEQEIGKATAKYFFYSNIMNFFKTEITLANGEIRKRPLIETNGETGEIVWDKGRDFATVRKVLSMPQVNIVKKTEVQTGGFSKESILPKRNSDKLIARKKDWDPKKYGGFDSPTVAYSVLVVAKVEKGKSKKLKSVKELLGITIMERSSFEKNPIDFLEAKGYKEVKKDLIIKLPKYSLFELENGRKRMLASAGELQKGNELALPSKYVNFLYLASHYEKLKGSPEDNEQKQLFVEQHKHYLDEIIEQISEFSKRVILADANLDKVLSAYNKHRDKPIREQAENIIHLFTLTNLGAPAAFKYFDTTIDRKRYTSTKEVLDATLIHQSITGLYETRIDLSQLGGDGGGGSGGGGSSGGTLNIEDEYRLHETSKEPDVSLGSTWLSDFPQAWAETGGMGLAVRQAPLIIPLKATSTPVSIKQYPMSQEARLGIKPHIQRLLDQGILVPCQSPWNTPLLPVKKPGTNDYRPVQDLREVNKRVEDIHPTVPNPYNLLSGLPPSHQWYTVLDLKDAFFCLRLHPTSQPLFAFEWRDPEMGISGQLTWTRLPQGFKNSPTLFNEALHRDLAGFRIQHPDLILLQYVDDLLLAATSELDCQQGTRALLQTLGDLGYRASAKKAQICQKQVKYLGYLLKEGQRWLTEARKETVMGQPIPKTPRQLREFLGTAGFCRLWIPGFAEMAAPLYPLTKPGTLFNWGPDQQKAFQEIKQALLTAPALGLPDLTKPFELFVDEKQGYAKGVLTQKLGPWRRPVAYLSKKLDPVAAGWPPCLRMVAAIAVLTKDAGKLTMGQPLVILAPHAVEALVKQPPDRWLSNARMTHYQALLLDTDRVQFGPVVALNPATLLPLPEEGLQHDCLDILAEAHGTRSDLMDQPLPDADHTWYTDGSSFLQEGQRKAGAAVTTETEVIWARALPAGTSAQRAELIALTQALKMAEGKKLNVYTDSRYAFATAHIHGEIYRRRGWLTSEGKEIKNKDEILALLKALFLPKRLSIIHCPGHQKGNSAEARGNRMADQAAREVATRETPETSTLLAGKRTADGSEFEKRTADGSEFESPKKKAKVE

SEQ ID NO: 6809 - protein, 2094 aa, synthetic construct
MPAAKRVKLDGGDKKYSIGLDIGTNSVGWAVITDEYKVPSKKFKVLGNTDRHSIKKNLIGALLFDSGETAEATRLKRTARRRYTRRKNRICYLQEIFSNEMAKVDDSFFHRLEESFLVEEDKKHERHPIFGNIVDEVAYHEKYPTIYHLRKKLVDSTDKADLRLIYLALAHMIKFRGHFLIEGDLNPDNSDVDKLFIQLVQTYNQLFEENPINASGVDAKAILSARLSKSRRLENLIAQLPGEKKNGLFGNLIALSLGLTPNFKSNFDLAEDAKLQLSKDTYDDDLDNLLAQIGDQYADLFLAAKNLSDAILLSDILRVNTEITKAPLSASMIKRYDEHHQDLTLLKALVRQQLPEKYKEIFFDQSKNGYAGYIDGGASQEEFYKFIKPILEKMDGTEELLVKLNREDLLRKQRTFDNGSIPHQIHLGELHAILRRQEDFYPFLKDNREKIEKILTFRIPYYVGPLARGNSRFAWMTRKSEETITPWNFEEVVDKGASAQSFIERMTNFDKNLPNEKVLPKHSLLYEYFTVYNELTKVKYVTEGMRKPAFLSGEQKKAIVDLLFKTNRKVTVKQLKEDYFKKIECFDSVEISGVEDRFNASLGTYHDLLKIIKDKDFLDNEENEDILEDIVLTLTLFEDREMIEERLKTYAHLFDDKVMKQLKRRRYTGWGRLSRKLINGIRDKQSGKTILDFLKSDGFANRNFMQLIHDDSLTFKEDIQKAQVSGQGDSLHEHIANLAGSPAIKKGILQTVKVVDELVKVMGRHKPENIVIEMARENQTTQKGQKNSRERMKRIEEGIKELGSQILKEHPVENTQLQNEKLYLYYLQNGRDMYVDQELDINRLSDYDVDHIVPQSFLKDDSIDNKVLTRSDKARGKSDNVPSEEVVKKMKNYWRQLLNAKLITQRKFDNLTKAERGGLSELDKAGFIKRQLVETRQITKHVAQILDSRMNTKYDENDKLIREVKVITLKSKLVSDFRKDFQFYKVREINNYHHAHDAYLNAVVGTALIKKYPKLESEFVYGDYKVYDVRKMIAKSEQEIGKATAKYFFYSNIMNFFKTEITLANGEIRKRPLIETNGETGEIVWDKGRDFATVRKVLSMPQVNIVKKTEVQTGGFSKESILPKRNSDKLIARKKDWDPKKYGGFDSPTVAYSVLVVAKVEKGKSKKLKSVKELLGITIMERSSFEKNPIDFLEAKGYKEVKKDLIIKLPKYSLFELENGRKRMLASAGELQKGNELALPSKYVNFLYLASHYEKLKGSPEDNEQKQLFVEQHKHYLDEIIEQISEFSKRVILADANLDKVLSAYNKHRDKPIREQAENIIHLFTLTNLGAPAAFKYFDTTIDRKRYTSTKEVLDATLIHQSITGLYETRIDLSQLGGDGGGGSGGGGSSGGTLNIEDEHRLHETSKEPDVSLGSTWLSDFPQAWAETGGMGLAVRQAPLIIPLKATSTPVSIKQYPMSQEARLGIKPHIQRLLDQGILVPCQSPWNTPLLPVKKPGTNDYRPVQDLREVNKRVEDIHPTVPNPYNLLSGLPPSHQWYTVLDLKDAFFCLRLHPTSQPLFAFEWRDPEMGISGQLTWTRLPQGFKNSPTLFNEALHRDLADFRIQHPDLILLQYVDDLLLAATSELDCQQGTRALLQTLGNLGYRASAKKAQICQKQVKYLGYLLKEGQRWLTEARKETVMGQPTPKTPRQLREFLGTAGFCRLWIPGFAEMAAPLYPLTKPGTLFNWGPDQQKAYQEIKQALLTAPALGLPDLTKPFELFVDEKQGYAKGVLTQKLGPWRRPVAYLSKKLDPVAAGWPPCLRMVAAIAVLTKDAGKLTMGQPLVILAPHAVEALVKQPPDRWLSNARMTHYQALLLDTDRVQFGPVVALNPATLLPLPEEGLQHNCLDILAEAHGTRPDLTDQPLPDADHTWYTDGSSLLQEGQRKAGAAVTTETEVIWAKALPAGTSAQRAELIALTQALKMAEGKKLNVYTDSRYAFATAHIHGEIYRRRGWLTSEGKEIKNKDEILALLKALFLPKRLSIIHCPGHQKGHSAEARGNRMADQAARKAAITETPDTSTLLAGKRTADGSEFEKRTADGSEFESPKKKAKVE

SEQ ID NO: 6810 - protein, 2088 aa, synthetic construct
MPAAKRVKLDGGDKKYSIGLDIGTNSVGWAVITDEYKVPSKKFKVLGNTDRHSIKKNLIGALLFDSGETAEATRLKRTARRRYTRRKNRICYLQEIFSNEMAKVDDSFFHRLEESFLVEEDKKHERHPIFGNIVDEVAYHEKYPTIYHLRKKLVDSTDKADLRLIYLALAHMIKFRGHFLIEGDLNPDNSDVDKLFIQLVQTYNQLFEENPINASGVDAKAILSARLSKSRRLENLIAQLPGEKKNGLFGNLIALSLGLTPNFKSNFDLAEDAKLQLSKDTYDDDLDNLLAQIGDQYADLFLAAKNLSDAILLSDILRVNTEITKAPLSASMIKRYDEHHQDLTLLKALVRQQLPEKYKEIFFDQSKNGYAGYIDGGASQEEFYKFIKPILEKMDGTEELLVKLNREDLLRKQRTFDNGSIPHQIHLGELHAILRRQEDFYPFLKDNREKIEKILTFRIPYYVGPLARGNSRFAWMTRKSEETITPWNFEEVVDKGASAQSFIERMTNFDKNLPNEKVLPKHSLLYEYFTVYNELTKVKYVTEGMRKPAFLSGEQKKAIVDLLFKTNRKVTVKQLKEDYFKKIECFDSVEISGVEDRFNASLGTYHDLLKIIKDKDFLDNEENEDILEDIVLTLTLFEDREMIEERLKTYAHLFDDKVMKQLKRRRYTGWGRLSRKLINGIRDKQSGKTILDFLKSDGFANRNFMQLIHDDSLTFKEDIQKAQVSGQGDSLHEHIANLAGSPAIKKGILQTVKVVDELVKVMGRHKPENIVIEMARENQTTQKGQKNSRERMKRIEEGIKELGSQILKEHPVENTQLQNEKLYLYYLQNGRDMYVDQELDINRLSDYDVDHIVPQSFLKDDSIDNKVLTRSDKARGKSDNVPSEEVVKKMKNYWRQLLNAKLITQRKFDNLTKAERGGLSELDKAGFIKRQLVETRQITKHVAQILDSRMNTKYDENDKLIREVKVITLKSKLVSDFRKDFQFYKVREINNYHHAHDAYLNAVVGTALIKKYPKLESEFVYGDYKVYDVRKMIAKSEQEIGKATAKYFFYSNIMNFFKTEITLANGEIRKRPLIETNGETGEIVWDKGRDFATVRKVLSMPQVNIVKKTEVQTGGFSKESILPKRNSDKLIARKKDWDPKKYGGFDSPTVAYSVLVVAKVEKGKSKKLKSVKELLGITIMERSSFEKNPIDFLEAKGYKEVKKDLIIKLPKYSLFELENGRKRMLASAGELQKGNELALPSKYVNFLYLASHYEKLKGSPEDNEQKQLFVEQHKHYLDEIIEQISEFSKRVILADANLDKVLSAYNKHRDKPIREQAENIIHLFTLTNLGAPAAFKYFDTTIDRKRYTSTKEVLDATLIHQSITGLYETRIDLSQLGGDGGGGSGGGGSSGGTLQLDDEYRLYSPLVKPDQNIQFWLEQFPQAWAETAGMGLAKQVPPQVIQLKASATPVSVRQYPLSKEAQEGIRPHVQRLIQQGILVPVQSPWNTPLLPVRKPGTNDYRPVQDLREVNKRVQDIHPTVPNPYNLLCALPPQRSWYTVLDLKDAFFCLRLHPTSQPLFAFEWRDPGTGRTGQLTWTRLPQGFKNSPTIFDEALHRDLANFRIQHPQVTLLQYVDDLLLAGATKQDCLEGTKALLLELSDLGYRASAKKAQICRREVTYLGYSLRDGQRWLTEARKKTVVQIPAPTTAKQVREFLGTAGFCRLWIPGFATLAAPLYPLTKEKGEFSWAPEHQKAFDAIKKALLSAPALALPDVTKPFTLYVDERKGVARGVLTQTLGPWRRPVAYLSKKLDPVASGWPVCLKAIAAVAILVKDADKLTLGQNITVIAPHALENIVRQPPDRWMTNARMTHYQSLLLTERVTFAPPAALNPATLLPEETDEPVTHDCHQLLIEETGVRKDLTDIPLTGEVLTWFTDGSSYVVEGKRMAGAAVVDGTRTIWASSLPEGTSAQKAELMALTQALRLAEGKSINIYTDSRYAFATAHVHGAIYKQRGLLTSAGREIKNKEEILSLLEALHLPKRLAIIHCPGHQKAKDPISRGNQMADRVAKQAAQGVNLLAGKRTADGSEFEKRTADGSEFESPKKKAKVE

SEQ ID NO: 6811 - protein, 2088 aa, synthetic construct; identical to SEQ ID NO: 6810

SEQ ID NO: 6812 - protein, 2174 aa, synthetic construct
MPAAKRVKLDGGDKKYSIGLDIGTNSVGWAVITDEYKVPSKKFKVLGNTDRHSIKKNLIGALLFDSGETAEATRLKRTARRRYTRRKNRICYLQEIFSNEMAKVDDSFFHRLEESFLVEEDKKHERHPIFGNIVDEVAYHEKYPTIYHLRKKLVDSTDKADLRLIYLALAHMIKFRGHFLIEGDLNPDNSDVDKLFIQLVQTYNQLFEENPINASGVDAKAILSARLSKSRRLENLIAQLPGEKKNGLFGNLIALSLGLTPNFKSNFDLAEDAKLQLSKDTYDDDLDNLLAQIGDQYADLFLAAKNLSDAILLSDILRVNTEITKAPLSASMIKRYDEHHQDLTLLKALVRQQLPEKYKEIFFDQSKNGYAGYIDGGASQEEFYKFIKPILEKMDGTEELLVKLNREDLLRKQRTFDNGSIPHQIHLGELHAILRRQEDFYPFLKDNREKIEKILTFRIPYYVGPLARGNSRFAWMTRKSEETITPWNFEEVVDKGASAQSFIERMTNFDKNLPNEKVLPKHSLLYEYFTVYNELTKVKYVTEGMRKPAFLSGEQKKAIVDLLFKTNRKVTVKQLKEDYFKKIECFDSVEISGVEDRFNASLGTYHDLLKIIKDKDFLDNEENEDILEDIVLTLTLFEDREMIEERLKTYAHLFDDKVMKQLKRRRYTGWGRLSRKLINGIRDKQSGKTILDFLKSDGFANRNFMQLIHDDSLTFKEDIQKAQVSGQGDSLHEHIANLAGSPAIKKGILQTVKVVDELVKVMGRHKPENIVIEMARENQTTQKGQKNSRERMKRIEEGIKELGSQILKEHPVENTQLQNEKLYLYYLQNGRDMYVDQELDINRLSDYDVDHIVPQSFLKDDSIDNKVLTRSDKARGKSDNVPSEEVVKKMKNYWRQLLNAKLITQRKFDNLTKAERGGLSELDKAGFIKRQLVETRQITKHVAQILDSRMNTKYDENDKLIREVKVITLKSKLVSDFRKDFQFYKVREINNYHHAHDAYLNAVVGTALIKKYPKLESEFVYGDYKVYDVRKMIAKSEQEIGKATAKYFFYSNIMNFFKTEITLANGEIRKRPLIETNGETGEIVWDKGRDFATVRKVLSMPQVNIVKKTEVQTGGFSKESILPKRNSDKLIARKKDWDPKKYGGFDSPTVAYSVLVVAKVEKGKSKKLKSVKELLGITIMERSSFEKNPIDFLEAKGYKEVKKDLIIKLPKYSLFELENGRKRMLASAGELQKGNELALPSKYVNFLYLASHYEKLKGSPEDNEQKQLFVEQHKHYLDEIIEQISEFSKRVILADANLDKVLSAYNKHRDKPIREQAENIIHLFTLTNLGAPAAFKYFDTTIDRKRYTSTKEVLDATLIHQSITGLYETRIDLSQLGGDGGGGSGGGGSSGGMDPLQLLQPLEAEIKGTKLKAHWNSGATITCVPEAFLEDERPIQTMLIKTIHGEKQQDVYYLTFKVQGRKVEAEVLASPYDYILLNPSDVPWLMKKPLQLTVLVPLHEYQERLLQQTALPKEQKELLQKLFLKYDALWQHWENQVGHRRIKPHNIATGTLAPRPQKQYPINPKAKPSIQIVIDDLLKQGVLIQQNSTMNTPVYPVPKPDGKWRMVLDYREVNKTIPLIAAQNQHSAGILSSIYRGKYKTTLDLTNGFWAHPITPESYWLTAFTWQGKQYCWTRLPQGFLNSPALFTADVVDLLKEIPNVQAYVDDIYISHDDPQEHLEQLEKIFSILLNAGYVVSLKKSEIAQREVEFLGFNITKEGRGLTDTFKQKLLNITPPKDLKQLQSILGLLNFARNFIPNYSELVKPLYTIVANANGKFISWTEDNSNQLQHIISVLNQADNLEERNPETRLIIKVNSSPSAGYIRYYNEGSKRPIMYVNYIFSKAEAKFTQTEKLLTTMHKGLIKAMDLAMGQEILVYSPIVSMTKIQRTPLPERKALPVRWITWMTYLEDPRIQFHYDKSLPELQQIPNVTEDVIAKTKHPSEFAMVFYTDGSAIKHPDVNKSHSAGMGIAQVQFIPEYKIVHQWSIPLGDHTAQLAEIAAVEFACKKALKISGPVLIVTDSFYVAESANKELPYWKSNGFLNNKKKPLRHVSKWKSIAECLQLKPDIIIMHEKGHQQPMTTLHTEGNNLADKLATQGSYVVHAGKRTADGSEFEKRTADGSEFESPKKKAKVE

SEQ ID NO: 6813 - protein, 2085 aa, synthetic construct
MPAAKRVKLDGGDKKYSIGLDIGTNSVGWAVITDEYKVPSKKFKVLGNTDRHSIKKNLIGALLFDSGETAEATRLKRTARRRYTRRKNRICYLQEIFSNEMAKVDDSFFHRLEESFLVEEDKKHERHPIFGNIVDEVAYHEKYPTIYHLRKKLVDSTDKADLRLIYLALAHMIKFRGHFLIEGDLNPDNSDVDKLFIQLVQTYNQLFEENPINASGVDAKAILSARLSKSRRLENLIAQLPGEKKNGLFGNLIALSLGLTPNFKSNFDLAEDAKLQLSKDTYDDDLDNLLAQIGDQYADLFLAAKNLSDAILLSDILRVNTEITKAPLSASMIKRYDEHHQDLTLLKALVRQQLPEKYKEIFFDQSKNGYAGYIDGGASQEEFYKFIKPILEKMDGTEELLVKLNREDLLRKQRTFDNGSIPHQIHLGELHAILRRQEDFYPFLKDNREKIEKILTFRIPYYVGPLARGNSRFAWMTRKSEETITPWNFEEVVDKGASAQSFIERMTNFDKNLPNEKVLPKHSLLYEYFTVYNELTKVKYVTEGMRKPAFLSGEQKKAIVDLLFKTNRKVTVKQLKEDYFKKIECFDSVEISGVEDRFNASLGTYHDLLKIIKDKDFLDNEENEDILEDIVLTLTLFEDREMIEERLKTYAHLFDDKVMKQLKRRRYTGWGRLSRKLINGIRDKQSGKTILDFLKSDGFANRNFMQLIHDDSLTFKEDIQKAQVSGQGDSLHEHIANLAGSPAIKKGILQTVKVVDELVKVMGRHKPENIVIEMARENQTTQKGQKNSRERMKRIEEGIKELGSQILKEHPVENTQLQNEKLYLYYLQNGRDMYVDQELDINRLSDYDVDHIVPQSFLKDDSIDNKVLTRSDKARGKSDNVPSEEVVKKMKNYWRQLLNAKLITQRKFDNLTKAERGGLSELDKAGFIKRQLVETRQITKHVAQILDSRMNTKYDENDKLIREVKVITLKSKLVSDFRKDFQFYKVREINNYHHAHDAYLNAVVGTALIKKYPKLESEFVYGDYKVYDVRKMIAKSEQEIGKATAKYFFYSNIMNFFKTEITLANGEIRKRPLIETNGETGEIVWDKGRDFATVRKVLSMPQVNIVKKTEVQTGGFSKESILPKRNSDKLIARKKDWDPKKYGGFDSPTVAYSVLVVAKVEKGKSKKLKSVKELLGITIMERSSFEKNPIDFLEAKGYKEVKKDLIIKLPKYSLFELENGRKRMLASAGELQKGNELALPSKYVNFLYLASHYEKLKGSPEDNEQKQLFVEQHKHYLDEIIEQISEFSKRVILADANLDKVLSAYNKHRDKPIREQAENIIHLFTLTNLGAPAAFKYFDTTIDRKRYTSTKEVLDATLIHQSITGLYETRIDLSQLGGDGGGGSGGGGSSGGVPWLMKKPLQLTVLVPLHEYQERLLQQTALPKEQKELLQKLFLKYDALWQHWENQVGHRRIKPHNIATGTLAPRPQKQYPINPKAKPSIQIVIDDLLKQGVLIQQNSTMNTPVYPVPKPDGKWRMVLDYREVNKTIPLIAAQNQHSAGILSSIYRGKYKTTLDLTNGFWAHPITPESYWLTAFTWQGKQYCWTRLPQGFLNSPALFTADVVDLLKEIPNVQAYVDDIYISHDDPQEHLEQLEKIFSILLNAGYVVSLKKSEIAQREVEFLGFNITKEGRGLTDTFKQKLLNITPPKDLKQLQSILGLLNFARNFIPNYSELVKPLYTIVANANGKFISWTEDNSNQLQHIISVLNQADNLEERNPETRLIIKVNSSPSAGYIRYYNEGSKRPIMYVNYIFSKAEAKFTQTEKLLTTMHKGLIKAMDLAMGQEILVYSPIVSMTKIQRTPLPERKALPVRWITWMTYLEDPRIQFHYDKSLPELQQIPNVTEDVIAKTKHPSEFAMVFYTDGSAIKHPDVNKSHSAGMGIAQVQFIPEYKIVHQWSIPLGDHTAQLAEIAAVEFACKKALKISGPVLIVTDSFYVAESANKELPYWKSNGFLNNKKKPLRHVSKWKSIAECLQLKPDIIIMHEKGHQQPMTTLHTEGNNLADKLATQGSYVVHAGKRTADGSEFEKRTADGSEFESPKKKAKVE

SEQ ID NO: 6814 - protein, 2085 aa, synthetic construct
MPAAKRVKLDGGDKKYSIGLDIGTNSVGWAVITDEYKVPSKKFKVLGNTDRHSIKKNLIGALLFDSGETAEATRLKRTARRRYTRRKNRICYLQEIFSNEMAKVDDSFFHRLEESFLVEEDKKHERHPIFGNIVDEVAYHEKYPTIYHLRKKLVDSTDKADLRLIYLALAHMIKFRGHFLIEGDLNPDNSDVDKLFIQLVQTYNQLFEENPINASGVDAKAILSARLSKSRRLENLIAQLPGEKKNGLFGNLIALSLGLTPNFKSNFDLAEDAKLQLSKDTYDDDLDNLLAQIGDQYADLFLAAKNLSDAILLSDILRVNTEITKAPLSASMIKRYDEHHQDLTLLKALVRQQLPEKYKEIFFDQSKNGYAGYIDGGASQEEFYKFIKPILEKMDGTEELLVKLNREDLLRKQRTFDNGSIPHQIHLGELHAILRRQEDFYPFLKDNREKIEKILTFRIPYYVGPLARGNSRFAWMTRKSEETITPWNFEEVVDKGASAQSFIERMTNFDKNLPNEKVLPKHSLLYEYFTVYNELTKVKYVTEGMRKPAFLSGEQKKAIVDLLFKTNRKVTVKQLKEDYFKKIECFDSVEISGVEDRFNASLGTYHDLLKIIKDKDFLDNEENEDILEDIVLTLTLFEDREMIEERLKTYAHLFDDKVMKQLKRRRYTGWGRLSRKLINGIRDKQSGKTILDFLKSDGFANRNFMQLIHDDSLTFKEDIQKAQVSGQGDSLHEHIANLAGSPAIKKGILQTVKVVDELVKVMGRHKPENIVIEMARENQTTQKGQKNSRERMKRIEEGIKELGSQILKEHPVENTQLQNEKLYLYYLQNGRDMYVDQELDINRLSDYDVDHIVPQSFLKDDSIDNKVLTRSDKARGKSDNVPSEEVVKKMKNYWRQLLNAKLITQRKFDNLTKAERGGLSELDKAGFIKRQLVETRQITKHVAQILDSRMNTKYDENDKLIREVKVITLKSKLVSDFRKDFQFYKVREINNYHHAHDAYLNAVVGTALIKKYPKLESEFVYGDYKVYDVRKMIAKSEQEIGKATAKYFFYSNIMNFFKTEITLANGEIRKRPLIETNGETGEIVWDKGRDFATVRKVLSMPQVNIVKKTEVQTGGFSKESILPKRNSDKLIARKKDWDPKKYGGFDSPTVAYSVLVVAKVEKGKSKKLKSVKELLGITIMERSSFEKNPIDFLEAKGYKEVKKDLIIKLPKYSLFELENGRKRMLASAGELQKGNELALPSKYVNFLYLASHYEKLKGSPEDNEQKQLFVEQHKHYLDEIIEQISEFSKRVILADANLDKVLSAYNKHRDKPIREQAENIIHLFTLTNLGAPAAFKYFDTTIDRKRYTSTKEVLDATLIHQSITGLYETRIDLSQLGGDGGGGSGGGGSSGGIPWLMKKPLQLTTLVPLQEYEERLLKQTMLTGSYKEKLQSLFLKYDALWQHWENQVGHRRIKPHHIATGTVNPRPQKQYPINPKAKASIQTVINDLLKQGVLIQQNSIMNTPVYPVPKPDGKWRMVLDYREVNKTIPLIAAQNQHSAGILSSIFRGKYKTTLDLSNGFWAHSITPESYWLTAFTWLGQQYCWTRLPQGFLNSPALFNADVVDLLKEVPNVQVYVDDIYISHDDPREHLEQLEKVFSLLLNAGYVVSLKKSEIAQHEVEFLGFNITKEGRGLTETFKQKLLNITPPRDLKQLQSILGKLNFARNFIPNFSELVKPLYNIIATAPGKYITWTTDNSQQLQNIISMLNSAENLEERNPEVRLIMKVNTSPSAGYIRFYNEFAKRPIMYLNYVYTKAEVKFTNTEKLLTTIHKGLIKALDLGMGQEILVYSPIVSMTKIQKTPLPERKALPIRWITWMSYLEDPRIQFHYDKTLPELQQVPTVTDDIIAKIKHPSEFSMVFYTDGSAIKHPNVNKSHNAGMGIAQVQFKPEFTVINTWSIPLGDHTAQLAEVAAVEFACKKALKIDGPVLIVTDSFYVAESVNKELPYWQSNGFFNNKKKPLKHVSKWKSIADCIQLKPDIIIIHEKGHQPTASTFHTEGNNLADKLATQGSYVVNAGKRTADGSEFEKRTADGSEFESPKKKAKVE

SEQ ID NO: 6815 - protein, 2094 aa, synthetic construct
MPAAKRVKLDGGDKKYSIGLDIGTNSVGWAVITDEYKVPSKKFKVLGNTDRHSIKKNLIGALLFDSGETAEATRLKRTARRRYTRRKNRICYLQEIFSNEMAKVDDSFFHRLEESFLVEEDKKHERHPIFGNIVDEVAYHEKYPTIYHLRKKLVDSTDKADLRLIYLALAHMIKFRGHFLIEGDLNPDNSDVDKLFIQLVQTYNQLFEENPINASGVDAKAILSARLSKSRRLENLIAQLPGEKKNGLFGNLIALSLGLTPNFKSNFDLAEDAKLQLSKDTYDDDLDNLLAQIGDQYADLFLAAKNLSDAILLSDILRVNTEITKAPLSASMIKRYDEHHQDLTLLKALVRQQLPEKYKEIFFDQSKNGYAGYIDGGASQEEFYKFIKPILEKMDGTEELLVKLNREDLLRKQRTFDNGSIPHQIHLGELHAILRRQEDFYPFLKDNREKIEKILTFRIPYYVGPLARGNSRFAWMTRKSEETITPWNFEEVVDKGASAQSFIERMTNFDKNLPNEKVLPKHSLLYEYFTVYNELTKVKYVTEGMRKPAFLSGEQKKAIVDLLFKTNRKVTVKQLKEDYFKKIECFDSVEISGVEDRFNASLGTYHDLLKIIKDKDFLDNEENEDILEDIVLTLTLFEDREMIEERLKTYAHLFDDKVMKQLKRRRYTGWGRLSRKLINGIRDKQSGKTILDFLKSDGFANRNFMQLIHDDSLTFKEDIQKAQVSGQGDSLHEHIANLAGSPAIKKGILQTVKVVDELVKVMGRHKPENIVIEMARENQTTQKGQKNSRERMKRIEEGIKELGSQILKEHPVENTQLQNEKLYLYYLQNGRDMYVDQELDINRLSDYDVDHIVPQSFLKDDSIDNKVLTRSDKARGKSDNVPSEEVVKKMKNYWRQLLNAKLITQRKFDNLTKAERGGLSELDKAGFIKRQLVETRQITKHVAQILDSRMNTKYDENDKLIREVKVITLKSKLVSDFRKDFQFYKVREINNYHHAHDAYLNAVVGTALIKKYPKLESEFVYGDYKVYDVRKMIAKSEQEIGKATAKYFFYSNIMNFFKTEITLANGEIRKRPLIETNGETGEIVWDKGRDFATVRKVLSMPQVNIVKKTEVQTGGFSKESILPKRNSDKLIARKKDWDPKKYGGFDSPTVAYSVLVVAKVEKGKSKKLKSVKELLGITIMERSSFEKNPIDFLEAKGYKEVKKDLIIKLPKYSLFELENGRKRMLASAGELQKGNELALPSKYVNFLYLASHYEKLKGSPEDNEQKQLFVEQHKHYLDEIIEQISEFSKRVILADANLDKVLSAYNKHRDKPIREQAENIIHLFTLTNLGAPAAFKYFDTTIDRKRYTSTKEVLDATLIHQSITGLYETRIDLSQLGGDGGGGSGGGGSSGGTLNIEDEYRLHETSKEPDVPLGSTWLSDFPQAWAETGGMGLAVRQAPLIIPLKATSTPVSIKQYPMSQEARLGIKPHIQRLLDQGILVPCQSPWNTPLLPVKKPGTNDYRPVQDLREVNKRVEDIHPTVPNPYNLLSGLPPSHQWYTVLDLKDAFFCLRLHPTSQPLFAFEWRDPEMGISGQLTWTRLPQGFKNSPTLFNEALHRDLADFRIQHPDLILLQYVDDLLLAATSEQDCQRGTRALLQTLGNLGYRASAKKAQICQKQVKYLGYLLKEGQRWLTEARKETVMGQPTPKTPRQLREFLGTAGFCRLWIPGFAEMAAPLYPLTKPGTLFNWGPDQQKAYQEIKQALLTAPALGLPDLTKPFELFVDEKQGYAKGVLTQKLGPWRRPVAYLSKKLDPVAAGWPPCLRMVAAIAVLTKDAGKLTMGQPLVILAPHAVEALVKQPPDRWLSNARMTHYQAMLLDTDRVQFGPVVALNPATLLPLPEKEAPHDCLEILAETHGTRPDLTDQPIPDADYTWYTDGSSFLQEGQRRAGAAVTTETEVIWARALPAGTSAQRAELIALTQALKMAEGKKLNVYTDSRYAFATAHVHGEIYRRRGWLTSEGREIKNKNEILALLKALFLPKRLSIIHCPGHQKGNSAEARGNRMADQAAREAAMKAVLETSTLLAGKRTADGSEFEKRTADGSEFESPKKKAKVE

SEQ ID NO: 6816 - protein, 2094 aa, synthetic construct
MPAAKRVKLDGGDKKYSIGLDIGTNSVGWAVITDEYKVPSKKFKVLGNTDRHSIKKNLIGALLFDSGETAEATRLKRTARRRYTRRKNRICYLQEIFSNEMAKVDDSFFHRLEESFLVEEDKKHERHPIFGNIVDEVAYHEKYPTIYHLRKKLVDSTDKADLRLIYLALAHMIKFRGHFLIEGDLNPDNSDVDKLFIQLVQTYNQLFEENPINASGVDAKAILSARLSKSRRLENLIAQLPGEKKNGLFGNLIALSLGLTPNFKSNFDLAEDAKLQLSKDTYDDDLDNLLAQIGDQYADLFLAAKNLSDAILLSDILRVNTEITKAPLSASMIKRYDEHHQDLTLLKALVRQQLPEKYKEIFFDQSKNGYAGYIDGGASQEEFYKFIKPILEKMDGTEELLVKLNREDLLRKQRTFDNGSIPHQIHLGELHAILRRQEDFYPFLKDNREKIEKILTFRIPYYVGPLARGNSRFAWMTRKSEETITPWNFEEVVDKGASAQSFIERMTNFDKNLPNEKVLPKHSLLYEYFTVYNELTKVKYVTEGMRKPAFLSGEQKKAIVDLLFKTNRKVTVKQLKEDYFKKIECFDSVEISGVEDRFNASLGTYHDLLKIIKDKDFLDNEENEDILEDIVLTLTLFEDREMIEERLKTYAHLFDDKVMKQLKRRRYTGWGRLSRKLINGIRDKQSGKTILDFLKSDGFANRNFMQLIHDDSLTFKEDIQKAQVSGQGDSLHEHIANLAGSPAIKKGILQTVKVVDELVKVMGRHKPENIVIEMARENQTTQKGQKNSRERMKRIEEGIKELGSQILKEHPVENTQLQNEKLYLYYLQNGRDMYVDQELDINRLSDYDVDHIVPQSFLKDDSIDNKVLTRSDKARGKSDNVPSEEVVKKMKNYWRQLLNAKLITQRKFDNLTKAERGGLSELDKAGFIKRQLVETRQITKHVAQILDSRMNTKYDENDKLIREVKVITLKSKLVSDFRKDFQFYKVREINNYHHAHDAYLNAVVGTALIKKYPKLESEFVYGDYKVYDVRKMIAKSEQEIGKATAKYFFYSNIMNFFKTEITLANGEIRKRPLIETNGETGEIVWDKGRDFATVRKVLSMPQVNIVKKTEVQTGGFSKESILPKRNSDKLIARKKDWDPKKYGGFDSPTVAYSVLVVAKVEKGKSKKLKSVKELLGITIMERSSFEKNPIDFLEAKGYKEVKKDLIIKLPKYSLFELENGRKRMLASAGELQKGNELALPSKYVNFLYLASHYEKLKGSPEDNEQKQLFVEQHKHYLDEIIEQISEFSKRVILADANLDKVLSAYNKHRDKPIREQAENIIHLFTLTNLGAPAAFKYFDTTIDRKRYTSTKEVLDATLIHQSITGLYETRIDLSQLGGDGGGGSGGGGSSGGTLNIEDEYRLHETSKEPDVPLGSTWLSDFPQAWAETGGMGLAVRQAPLIIPLKATSTPVSIKQYPMSQEARLGIKPHIQRLLDQGILVPCQSPWNTPLLPVKKPGTNDYRPVQDLREVNKRVEDIHPTVPNPYNLLSGLPPSHQWYTVLDLKDAFFCLRLHPTSQPLFAFEWRDPEMGISGQLTWTRLPQGFKNSPTLFNEALHRDLADFRIQHPDLILLQYVDDLLLAATSEQDCQRGTRALLQTLGNLGYRASAKKAQICQKQVKYLGYLLKEGQRWLTEARKETVMGQPTPKTPRQLREFLGKAGFCRLFIPGFAEMAAPLYPLTKPGTLFNWGPDQQKAYQEIKQALLTAPALGLPDLTKPFELFVDEKQGYAKGVLTQKLGPWRRPVAYLSKKLDPVAAGWPPCLRMVAAIAVLTKDAGKLTMGQPLVILAPHAVEALVKQPPDRWLSNARMTHYQAMLLDTDRVQFGPVVALNPATLLPLPEKEAPHDCLEILAETHGTRPDLTDQPIPDADYTWYTDGSSFLQEGQRRAGAAVTTETEVIWARALPAGTSAQRAELIALTQALKMAEGKKLNVYTDSRYAFATAHVHGEIYRRRGWLTSEGREIKNKNEILALLKALFLPKRLSIIHCPGHQKGNSAEARGNRMADQAAREAAMKAVLETSTLLAGKRTADGSEFEKRTADGSEFESPKKKAKVE

SEQ ID NO: 6817 - protein, 2096 aa, synthetic construct
MPAAKRVKLDGGDKKYSIGLDIGTNSVGWAVITDEYKVPSKKFKVLGNTDRHSIKKNLIGALLFDSGETAEATRLKRTARRRYTRRKNRICYLQEIFSNEMAKVDDSFFHRLEESFLVEEDKKHERHPIFGNIVDEVAYHEKYPTIYHLRKKLVDSTDKADLRLIYLALAHMIKFRGHFLIEGDLNPDNSDVDKLFIQLVQTYNQLFEENPINASGVDAKAILSARLSKSRRLENLIAQLPGEKKNGLFGNLIALSLGLTPNFKSNFDLAEDAKLQLSKDTYDDDLDNLLAQIGDQYADLFLAAKNLSDAILLSDILRVNTEITKAPLSASMIKRYDEHHQDLTLLKALVRQQLPEKYKEIFFDQSKNGYAGYIDGGASQEEFYKFIKPILEKMDGTEELLVKLNREDLLRKQRTFDNGSIPHQIHLGELHAILRRQEDFYPFLKDNREKIEKILTFRIPYYVGPLARGNSRFAWMTRKSEETITPWNFEEVVDKGASAQSFIERMTNFDKNLPNEKVLPKHSLLYEYFTVYNELTKVKYVTEGMRKPAFLSGEQKKAIVDLLFKTNRKVTVKQLKEDYFKKIECFDSVEISGVEDRFNASLGTYHDLLKIIKDKDFLDNEENEDILEDIVLTLTLFEDREMIEERLKTYAHLFDDKVMKQLKRRRYTGWGRLSRKLINGIRDKQSGKTILDFLKSDGFANRNFMQLIHDDSLTFKEDIQKAQVSGQGDSLHEHIANLAGSPAIKKGILQTVKVVDELVKVMGRHKPENIVIEMARENQTTQKGQKNSRERMKRIEEGIKELGSQILKEHPVENTQLQNEKLYLYYLQNGRDMYVDQELDINRLSDYDVDHIVPQSFLKDDSIDNKVLTRSDKARGKSDNVPSEEVVKKMKNYWRQLLNAKLITQRKFDNLTKAERGGLSELDKAGFIKRQLVETRQITKHVAQILDSRMNTKYDENDKLIREVKVITLKSKLVSDFRKDFQFYKVREINNYHHAHDAYLNAVVGTALIKKYPKLESEFVYGDYKVYDVRKMIAKSEQEIGKATAKYFFYSNIMNFFKTEITLANGEIRKRPLIETNGETGEIVWDKGRDFATVRKVLSMPQVNIVKKTEVQTGGFSKESILPKRNSDKLIARKKDWDPKKYGGFDSPTVAYSVLVVAKVEKGKSKKLKSVKELLGITIMERSSFEKNPIDFLEAKGYKEVKKDLIIKLPKYSLFELENGRKRMLASAGELQKGNELALPSKYVNFLYLASHYEKLKGSPEDNEQKQLFVEQHKHYLDEIIEQISEFSKRVILADANLDKVLSAYNKHRDKPIREQAENIIHLFTLTNLGAPAAFKYFDTTIDRKRYTSTKEVLDATLIHQSITGLYETRIDLSQLGGDGGGGSGSSGGGGGTAPLEEEYRLFLEAPIQNVTLLEQWKREIPKVWAEINPPGLASTQAPIHVQLLSTALPVRVRQYPITLEAKRSLRETIRKFRAAGILRPVHSPWNTPLLPVRKSGTSEYRMVQDLREVNKRVETIHPTVPNPYTLLSLLPPDRIWYSVLDLKDAFFCIPLAPESQLIFAFEWADAEEGESGQLTWTRLPQGFKNSPTLFNEALNRDLQGFRLDHPSVSLLQYVDDLLIAADTQAACLSATRDLLMTLAELGYRVSGKKAQLCQEEVTYLGFKIHKGSRSLSNSRTQAILQIPVPKTKRQVREFLGTIGYCRLWIPGFAELAQPLYAATRPGNDPLVWGEKEEEAFQSLKLALTQPPALALPSLDKPFQLFVEETSGAAKGVLTQALGPWKRPVAYLSKRLDPVAAGWPRCLRAIAAAALLTREASKLTFGQDIEITSSHNLESLLRSPPDKWLTNARITQYQVLLLDPPRVRFKQTAALNPATLLPETDDTLPIHHCLDTLDSLTSTRPDLTDQPLAQAEATLFTDGSSYIRDGKRYAGAAVVTLDSVIWAEPLPIGTSAQKAELIALTKALEWSKDKSVNIYTDSRYAFATLHVHGMIYRERGWLTAGGKAIKNAPEILALLTAVWLPKRVAVMHCKGHQKDDAPTSTGNRRADEVAREVAIRPLSTQATISAGKRTADGSEFEKRTADGSEFESPKKKAKVE

SEQ ID NO: 6818 - protein, 2100 aa, synthetic construct
MPAAKRVKLDGGDKKYSIGLDIGTNSVGWAVITDEYKVPSKKFKVLGNTDRHSIKKNLIGALLFDSGETAEATRLKRTARRRYTRRKNRICYLQEIFSNEMAKVDDSFFHRLEESFLVEEDKKHERHPIFGNIVDEVAYHEKYPTIYHLRKKLVDSTDKADLRLIYLALAHMIKFRGHFLIEGDLNPDNSDVDKLFIQLVQTYNQLFEENPINASGVDAKAILSARLSKSRRLENLIAQLPGEKKNGLFGNLIALSLGLTPNFKSNFDLAEDAKLQLSKDTYDDDLDNLLAQIGDQYADLFLAAKNLSDAILLSDILRVNTEITKAPLSASMIKRYDEHHQDLTLLKALVRQQLPEKYKEIFFDQSKNGYAGYIDGGASQEEFYKFIKPILEKMDGTEELLVKLNREDLLRKQRTFDNGSIPHQIHLGELHAILRRQEDFYPFLKDNREKIEKILTFRIPYYVGPLARGNSRFAWMTRKSEETITPWNFEEVVDKGASAQSFIERMTNFDKNLPNEKVLPKHSLLYEYFTVYNELTKVKYVTEGMRKPAFLSGEQKKAIVDLLFKTNRKVTVKQLKEDYFKKIECFDSVEISGVEDRFNASLGTYHDLLKIIKDKDFLDNEENEDILEDIVLTLTLFEDREMIEERLKTYAHLFDDKVMKQLKRRRYTGWGRLSRKLINGIRDKQSGKTILDFLKSDGFANRNFMQLIHDDSLTFKEDIQKAQVSGQGDSLHEHIANLAGSPAIKKGILQTVKVVDELVKVMGRHKPENIVIEMARENQTTQKGQKNSRERMKRIEEGIKELGSQILKEHPVENTQLQNEKLYLYYLQNGRDMYVDQELDINRLSDYDVDHIVPQSFLKDDSIDNKVLTRSDKARGKSDNVPSEEVVKKMKNYWRQLLNAKLITQRKFDNLTKAERGGLSELDKAGFIKRQLVETRQITKHVAQILDSRMNTKYDENDKLIREVKVITLKSKLVSDFRKDFQFYKVREINNYHHAHDAYLNAVVGTALIKKYPKLESEFVYGDYKVYDVRKMIAKSEQEIGKATAKYFFYSNIMNFFKTEITLANGEIRKRPLIETNGETGEIVWDKGRDFATVRKVLSMPQVNIVKKTEVQTGGFSKESILPKRNSDKLIARKKDWDPKKYGGFDSPTVAYSVLVVAKVEKGKSKKLKSVKELLGITIMERSSFEKNPIDFLEAKGYKEVKKDLIIKLPKYSLFELENGRKRMLASAGELQKGNELALPSKYVNFLYLASHYEKLKGSPEDNEQKQLFVEQHKHYLDEIIEQISEFSKRVILADANLDKVLSAYNKHRDKPIREQAENIIHLFTLTNLGAPAAFKYFDTTIDRKRYTSTKEVLDATLIHQSITGLYETRIDLSQLGGDGGGGSGSSGGGGGTVSLQDEHRLFDIPVTTSLPDVWLQDFPQAWAETGGLGRAKCQAPIIIDLKPTAVPVSIKQYPMSLEAHMGIRQHIIKFLELGVLRPCRSPWNTPLLPVKKPGTQDYRPVQDLREINKRTVDIHPTVPNPYNLLSTLKPDYSWYTVLDLKDAFFCLPLAPQSQELFAFEWKDPERGISGQLTWTRLPQGFKNSPTLFDEALHRDLTDFRTQHPEVTLLQYVDDLLLAAPTKKACTQGTRHLLQELGEKGYRASAKKAQICQTKVTYLGYILSEGKRWLTPGRIETVARIPPPRNPREVREFLGTAGFCRLWIPGFAELAAPLYALTKESTPFTWQTEHQLAFEALKKALLSAPALGLPDTSKPFTLFLDERQGIAKGVLTQKLGPWKRPVAYLSKKLDPVAAGWPPCLRIMAATAMLVKDSAKLTLGQPLTVITPHTLEAIVRQPPDRWITNARLTHYQALLLDTDRVQFGPPVTLNPATLLPVPENQPSPHDCRQVLAETHGTREDLKDQELPDADHTWYTDGSSYLDSGTRRAGAAVVDGHNTIWAQSLPPGTSAQKAELIALTKALELSKGKKANIYTDSRYAFATAHTHGSIYERRGLLTSEGKEIKNKAEIIALLKALFLPQEVAIIHCPGHQKGQDPVAVGNRQADRVARQAAMAEVLTLATEPDNTSHITAGKRTADGSEFEKRTADGSEFESPKKKAKVE

SEQ ID NO: 6819 - protein, 2094 aa, synthetic construct
MPAAKRVKLDGGDKKYSIGLDIGTNSVGWAVITDEYKVPSKKFKVLGNTDRHSIKKNLIGALLFDSGETAEATRLKRTARRRYTRRKNRICYLQEIFSNEMAKVDDSFFHRLEESFLVEEDKKHERHPIFGNIVDEVAYHEKYPTIYHLRKKLVDSTDKADLRLIYLALAHMIKFRGHFLIEGDLNPDNSDVDKLFIQLVQTYNQLFEENPINASGVDAKAILSARLSKSRRLENLIAQLPGEKKNGLFGNLIALSLGLTPNFKSNFDLAEDAKLQLSKDTYDDDLDNLLAQIGDQYADLFLAAKNLSDAILLSDILRVNTEITKAPLSASMIKRYDEHHQDLTLLKALVRQQLPEKYKEIFFDQSKNGYAGYIDGGASQEEFYKFIKPILEKMDGTEELLVKLNREDLLRKQRTFDNGSIPHQIHLGELHAILRRQEDFYPFLKDNREKIEKILTFRIPYYVGPLARGNSRFAWMTRKSEETITPWNFEEVVDKGASAQSFIERMTNFDKNLPNEKVLPKHSLLYEYFTVYNELTKVKYVTEGMRKPAFLSGEQKKAIVDLLFKTNRKVTVKQLKEDYFKKIECFDSVEISGVEDRFNASLGTYHDLLKIIKDKDFLDNEENEDILEDIVLTLTLFEDREMIEERLKTYAHLFDDKVMKQLKRRRYTGWGRLSRKLINGIRDKQSGKTILDFLKSDGFANRNFMQLIHDDSLTFKEDIQKAQVSGQGDSLHEHIANLAGSPAIKKGILQTVKVVDELVKVMGRHKPENIVIEMARENQTTQKGQKNSRERMKRIEEGIKELGSQILKEHPVENTQLQNEKLYLYYLQNGRDMYVDQELDINRLSDYDVDHIVPQSFLKDDSIDNKVLTRSDKARGKSDNVPSEEVVKKMKNYWRQLLNAKLITQRKFDNLTKAERGGLSELDKAGFIKRQLVETRQITKHVAQILDSRMNTKYDENDKLIREVKVITLKSKLVSDFRKDFQFYKVREINNYHHAHDAYLNAVVGTALIKKYPKLESEFVYGDYKVYDVRKMIAKSEQEIGKATAKYFFYSNIMNFFKTEITLANGEIRKRPLIETNGETGEIVWDKGRDFATVRKVLSMPQVNIVKKTEVQTGGFSKESILPKRNSDKLIARKKDWDPKKYGGFDSPTVAYSVLVVAKVEKGKSKKLKSVKELLGITIMERSSFEKNPIDFLEAKGYKEVKKDLIIKLPKYSLFELENGRKRMLASAGELQKGNELALPSKYVNFLYLASHYEKLKGSPEDNEQKQLFVEQHKHYLDEIIEQISEFSKRVILADANLDKVLSAYNKHRDKPIREQAENIIHLFTLTNLGAPAAFKYFDTTIDRKRYTSTKEVLDATLIHQSITGLYETRIDLSQLGGDGGGGSGSSGGGGGTLNLEDEYRLYETSAEPEVSPGSTWLSDFPQAWAETGGMGLAVRQAPLIIPLKATSTPVSIKQYPMSQEAKLGIKPHIQRLLDQGILVPCQSPWNTPLLPVKKPGTNDYRPVQDLREVNKRVEDIHPTVPNPYNLLSGLPPSHRWYTVLDLKDAFFCLRLHPTSQPLFAFEWRDPGMGISGQLTWTRLPQGFKNSPTLFNEALHRDLADFRIQHPDLILLQYVDDILLAATSELDCQQGTRALLLTLGNLGYRASAKKAQLCQKQVKYLGYLLKEGQRWLTEARKETVMGQPTPKTPRQLREFLGKAGFCRLFIPGFAEMAAPLYPLTKPGTLFNWGPDQQKAYQEIKQALLTAPALGLPDLTKPFELFVDEKQGYAKGVLTQKLGPWRRPVAYLSKKLDPVAAGWPPCLRMVAAIAVLRKDAGKLTMGQPLVILAPHAVEALVKQPPDRWLSNARMTHYQAMLLDTDRVQFGPVVALNPATLLPLPEEGAPHDCLEILAETHGTRPDLTDQPIPDADHTWYTDGSSFLQEGQRKAGAAVTTETEVIWARALPAGTSAQRAELIALTQALKMAEGKRLNVYTDSRYAFATAHIHGEIYRRRGWLTSEGREIKNKSEILALLKALFLPKRLSIIHCLGHQKGDSAEARGNRLADQAAREAAIKTPPDTSTLLAGKRTADGSEFEKRTADGSEFESPKKKAKVE

SEQ ID NO: 6820 - protein, 2094 aa, synthetic construct
MPAAKRVKLDGGDKKYSIGLDIGTNSVGWAVITDEYKVPSKKFKVLGNTDRHSIKKNLIGALLFDSGETAEATRLKRTARRRYTRRKNRICYLQEIFSNEMAKVDDSFFHRLEESFLVEEDKKHERHPIFGNIVDEVAYHEKYPTIYHLRKKLVDSTDKADLRLIYLALAHMIKFRGHFLIEGDLNPDNSDVDKLFIQLVQTYNQLFEENPINASGVDAKAILSARLSKSRRLENLIAQLPGEKKNGLFGNLIALSLGLTPNFKSNFDLAEDAKLQLSKDTYDDDLDNLLAQIGDQYADLFLAAKNLSDAILLSDILRVNTEITKAPLSASMIKRYDEHHQDLTLLKALVRQQLPEKYKEIFFDQSKNGYAGYIDGGASQEEFYKFIKPILEKMDGTEELLVKLNREDLLRKQRTFDNGSIPHQIHLGELHAILRRQEDFYPFLKDNREKIEKILTFRIPYYVGPLARGNSRFAWMTRKSEETITPWNFEEVVDKGASAQSFIERMTNFDKNLPNEKVLPKHSLLYEYFTVYNELTKVKYVTEGMRKPAFLSGEQKKAIVDLLFKTNRKVTVKQLKEDYFKKIECFDSVEISGVEDRFNASLGTYHDLLKIIKDKDFLDNEENEDILEDIVLTLTLFEDREMIEERLKTYAHLFDDKVMKQLKRRRYTGWGRLSRKLINGIRDKQSGKTILDFLKSDGFANRNFMQLIHDDSLTFKEDIQKAQVSGQGDSLHEHIANLAGSPAIKKGILQTVKVVDELVKVMGRHKPENIVIEMARENQTTQKGQKNSRERMKRIEEGIKELGSQILKEHPVENTQLQNEKLYLYYLQNGRDMYVDQELDINRLSDYDVDHIVPQSFLKDDSIDNKVLTRSDKARGKSDNVPSEEVVKKMKNYWRQLLNAKLITQRKFDNLTKAERGGLSELDKAGFIKRQLVETRQITKHVAQILDSRMNTKYDENDKLIREVKVITLKSKLVSDFRKDFQFYKVREINNYHHAHDAYLNAVVGTALIKKYPKLESEFVYGDYKVYDVRKMIAKSEQEIGKATAKYFFYSNIMNFFKTEITLANGEIRKRPLIETNGETGEIVWDKGRDFATVRKVLSMPQVNIVKKTEVQTGGFSKESILPKRNSDKLIARKKDWDPKKYGGFDSPTVAYSVLVVAKVEKGKSKKLKSVKELLGITIMERSSFEKNPIDFLEAKGYKEVKKDLIIKLPKYSLFELENGRKRMLASAGELQKGNELALPSKYVNFLYLASHYEKLKGSPEDNEQKQLFVEQHKHYLDEIIEQISEFSKRVILADANLDKVLSAYNKHRDKPIREQAENIIHLFTLTNLGAPAAFKYFDTTIDRKRYTSTKEVLDATLIHQSITGLYETRIDLSQLGGDGGGGSGSSGGGGGLGIEDEYRLHETSTEPDVSLGSTWLSDFPQAWAETGGMGLAVRQAPLIIPLKATSTPVSIQQYPMSHEARLGIKPHIQRLLDQGILVPCQSPWNTPLLPVKKPGTNDYRPVQDLREVNKRVEDIHPTVPNPYNLLSGLPPSHQWYTVLDLKDAFFCLRLHPTSQPLFAFEWRDPGMGISGQLTWTRLPQGFKNSPTLFNEALHRDLADFRIQHPDLILLQYVDDILLAATSELDCQQGTRALLQTLGDLGYRASAKKAQICQKQVKYLGYLLREGQRWLTEARKETVMGQPVPKTPRQLREFLGKAGFCRLFIPGFAEMAAPLYPLTKPGTLFSWGPDQQKAYQEIKQALLTAPALGLPDLTKPFELFVDEKQGYAKGVLTQKLGPWRRPVAYLSKKLDPVAAGWPPCLRMVAAIAVLTKDAGKLTMGQPLVILAPHAVEALVKQPPDRWLSNARMTHYQAMLLDTDRVQFGPVVALNPATLLPLPEEGAPHDCLEILAETHGTRPDLTDQPIPDADHTWYTDGSSFLQEGQRKAGAAVTTETEVIWAGALPAGTSAQRAELIALTQALKMAEGKRLNVYTDSRYAFATAHIHGEIYRRRGWLTSEGREIKNKSEILALLKALFLPKRLSIIHCLGHQKGDSAEARGNRLADQAAREAAIKTPPDTSTLLIAGKRTADGSEFEKRTADGSEFESPKKKAKVE

SEQ ID NO: 6821 - protein, 2174 aa, synthetic construct
MPAAKRVKLDGGDKKYSIGLDIGTNSVGWAVITDEYKVPSKKFKVLGNTDRHSIKKNLIGALLFDSGETAEATRLKRTARRRYTRRKNRICYLQEIFSNEMAKVDDSFFHRLEESFLVEEDKKHERHPIFGNIVDEVAYHEKYPTIYHLRKKLVDSTDKADLRLIYLALAHMIKFRGHFLIEGDLNPDNSDVDKLFIQLVQTYNQLFEENPINASGVDAKAILSARLSKSRRLENLIAQLPGEKKNGLFGNLIALSLGLTPNFKSNFDLAEDAKLQLSKDTYDDDLDNLLAQIGDQYADLFLAAKNLSDAILLSDILRVNTEITKAPLSASMIKRYDEHHQDLTLLKALVRQQLPEKYKEIFFDQSKNGYAGYIDGGASQEEFYKFIKPILEKMDGTEELLVKLNREDLLRKQRTFDNGSIPHQIHLGELHAILRRQEDFYPFLKDNREKIEKILTFRIPYYVGPLARGNSRFAWMTRKSEETITPWNFEEVVDKGASAQSFIERMTNFDKNLPNEKVLPKHSLLYEYFTVYNELTKVKYVTEGMRKPAFLSGEQKKAIVDLLFKTNRKVTVKQLKEDYFKKIECFDSVEISGVEDRFNASLGTYHDLLKIIKDKDFLDNEENEDILEDIVLTLTLFEDREMIEERLKTYAHLFDDKVMKQLKRRRYTGWGRLSRKLINGIRDKQSGKTILDFLKSDGFANRNFMQLIHDDSLTFKEDIQKAQVSGQGDSLHEHIANLAGSPAIKKGILQTVKVVDELVKVMGRHKPENIVIEMARENQTTQKGQKNSRERMKRIEEGIKELGSQILKEHPVENTQLQNEKLYLYYLQNGRDMYVDQELDINRLSDYDVDHIVPQSFLKDDSIDNKVLTRSDKARGKSDNVPSEEVVKKMKNYWRQLLNAKLITQRKFDNLTKAERGGLSELDKAGFIKRQLVETRQITKHVAQILDSRMNTKYDENDKLIREVKVITLKSKLVSDFRKDFQFYKVREINNYHHAHDAYLNAVVGTALIKKYPKLESEFVYGDYKVYDVRKMIAKSEQEIGKATAKYFFYSNIMNFFKTEITLANGEIRKRPLIETNGETGEIVWDKGRDFATVRKVLSMPQVNIVKKTEVQTGGFSKESILPKRNSDKLIARKKDWDPKKYGGFDSPTVAYSVLVVAKVEKGKSKKLKSVKELLGITIMERSSFEKNPIDFLEAKGYKEVKKDLIIKLPKYSLFELENGRKRMLASAGELQKGNELALPSKYVNFLYLASHYEKLKGSPEDNEQKQLFVEQHKHYLDEIIEQISEFSKRVILADANLDKVLSAYNKHRDKPIREQAENIIHLFTLTNLGAPAAFKYFDTTIDRKRYTSTKEVLDATLIHQSITGLYETRIDLSQLGGDGGGGSGSSGGGGGMDPLQLLQPLEAEIKGTKLKAHWNSGATITCVPEAFLEDERPIQTMLIKTIHGEKQQDVYYLTFKVQGRKVEAEVLASPYDYILLNPSDVPWLMKKPLQLTVLVPLHEYQERLLQQTALPKEQKELLQKLFLKYDALWQHWENQVGHRRIKPHNIATGTLAPRPQKQYPINPKAKPSIQIVIDDLLKQGVLIQQNSTMNTPVYPVPKPDGKWRMVLDYREVNKTIPLIAAQNQHSAGILSSIYRGKYKTTLDLTNGFWAHPITPESYWLTAFTWQGKQYCWTRLPQGFLNSPALFNADVVDLLKEIPNVQAYVDDIYISHDDPQEHLEQLEKIFSILLNAGYVVSLKKSEIAQREVEFLGFNITKEGRGLTDTFKQKLLNITPPKDLKQLQSILGLLNFARNFIPNYSELVKPLYTIVAPANGKFISWTEDNSNQLQHIISVLNQADNLEERNPETRLIIKVNSSPSAGYIRYYNEGSKRPIMYVNYIFSKAEAKFTQTEKLLTTMHKGLIKAMDLAMGQEILVYSPIVSMTKIQRTPLPERKALPVRWITWMTYLEDPRIQFHYDKSLPELQQIPNVTEDVIAKTKHPSEFAMVFYTDGSAIKHPDVNKSHSAGMGIAQVQFIPEYKIVHQWSIPLGDHTAQLAEIAAVEFACKKALKISGPVLIVTDSFYVAESANKELPYWKSNGFLNNKKKPLRHVSKWKSIAECLQLKPDIIIMHEKGHQQPMTTLHTEGNNLADKLATQGSYVVHAGKRTADGSEFEKRTADGSEFESPKKKAKVE

SEQ ID NO: 6822 - protein, 2096 aa, synthetic construct
MPAAKRVKLDGGDKKYSIGLDIGTNSVGWAVITDEYKVPSKKFKVLGNTDRHSIKKNLIGALLFDSGETAEATRLKRTARRRYTRRKNRICYLQEIFSNEMAKVDDSFFHRLEESFLVEEDKKHERHPIFGNIVDEVAYHEKYPTIYHLRKKLVDSTDKADLRLIYLALAHMIKFRGHFLIEGDLNPDNSDVDKLFIQLVQTYNQLFEENPINASGVDAKAILSARLSKSRRLENLIAQLPGEKKNGLFGNLIALSLGLTPNFKSNFDLAEDAKLQLSKDTYDDDLDNLLAQIGDQYADLFLAAKNLSDAILLSDILRVNTEITKAPLSASMIKRYDEHHQDLTLLKALVRQQLPEKYKEIFFDQSKNGYAGYIDGGASQEEFYKFIKPILEKMDGTEELLVKLNREDLLRKQRTFDNGSIPHQIHLGELHAILRRQEDFYPFLKDNREKIEKILTFRIPYYVGPLARGNSRFAWMTRKSEETITPWNFEEVVDKGASAQSFIERMTNFDKNLPNEKVLPKHSLLYEYFTVYNELTKVKYVTEGMRKPAFLSGEQKKAIVDLLFKTNRKVTVKQLKEDYFKKIECFDSVEISGVEDRFNASLGTYHDLLKIIKDKDFLDNEENEDILEDIVLTLTLFEDREMIEERLKTYAHLFDDKVMKQLKRRRYTGWGRLSRKLINGIRDKQSGKTILDFLKSDGFANRNFMQLIHDDSLTFKEDIQKAQVSGQGDSLHEHIANLAGSPAIKKGILQTVKVVDELVKVMGRHKPENIVIEMARENQTTQKGQKNSRERMKRIEEGIKELGSQILKEHPVENTQLQNEKLYLYYLQNGRDMYVDQELDINRLSDYDVDHIVPQSFLKDDSIDNKVLTRSDKARGKSDNVPSEEVVKKMKNYWRQLLNAKLITQRKFDNLTKAERGGLSELDKAGFIKRQLVETRQITKHVAQILDSRMNTKYDENDKLIREVKVITLKSKLVSDFRKDFQFYKVREINNYHHAHDAYLNAVVGTALIKKYPKLESEFVYGDYKVYDVRKMIAKSEQEIGKATAKYFFYSNIMNFFKTEITLANGEIRKRPLIETNGETGEIVWDKGRDFATVRKVLSMPQVNIVKKTEVQTGGFSKESILPKRNSDKLIARKKDWDPKKYGGFDSPTVAYSVLVVAKVEKGKSKKLKSVKELLGITIMERSSFEKNPIDFLEAKGYKEVKKDLIIKLPKYSLFELENGRKRMLASAGELQKGNELALPSKYVNFLYLASHYEKLKGSPEDNEQKQLFVEQHKHYLDEIIEQISEFSKRVILADANLDKVLSAYNKHRDKPIREQAENIIHLFTLTNLGAPAAFKYFDTTIDRKRYTSTKEVLDATLIHQSITGLYETRIDLSQLGGDGGGGGGGSGSSGGTAPLEEEYRLFLEAPIQNVTLLEQWKREIPKVWAEINPPGLASTQAPIHVQLLSTALPVRVRQYPITLEAKRSLRETIRKFRAAGILRPVHSPWNTPLLPVRKSGTSEYRMVQDLREVNKRVETIHPTVPNPYTLLSLLPPDRIWYSVLDLKDAFFCIPLAPESQLIFAFEWADAEEGESGQLTWTRLPQGFKNSPTLFDEALNRDLQGFRLDHPSVSLLQYVDDLLIAADTQAACLSATRDLLMTLAELGYRVSGKKAQLCQEEVTYLGFKIHKGSRSLSNSRTQAILQIPVPKTKRQVREFLGTIGYCRLWIPGFAELAQPLYAATRGGNDPLVWGEKEEEAFQSLKLALTQPPALALPSLDKPFQLFVEETSGAAKGVLTQALGPWKRPVAYLSKRLDPVAAGWPRCLRAIAAAALLTREASKLTFGQDIEITSSHNLESLLRSPPDKWLTNARITQYQVLLLDPPRVRFKQTAALNPATLLPETDDTLPIHHCLDTLDSLTSTRPDLTDQPLAQAEATLFTDGSSYIRDGKRYAGAAVVTLDSVIWAEPLPIGTSAQKAELIALTKALEWSKDKSVNIYTDSRYAFATLHVHGMIYRERGLLTAGGKAIKNAPEILALLTAVWLPKRVAVMHCKGHQKDDAPTSTGNRRADEVAREVAIRPLSTQATISAGKRTADGSEFEKRTADGSEFESPKKKAKVE

SEQ ID NO: 6823 - protein, 2096 aa, synthetic construct
MPAAKRVKLDGGDKKYSIGLDIGTNSVGWAVITDEYKVPSKKFKVLGNTDRHSIKKNLIGALLFDSGETAEATRLKRTARRRYTRRKNRICYLQEIFSNEMAKVDDSFFHRLEESFLVEEDKKHERHPIFGNIVDEVAYHEKYPTIYHLRKKLVDSTDKADLRLIYLALAHMIKFRGHFLIEGDLNPDNSDVDKLFIQLVQTYNQLFEENPINASGVDAKAILSARLSKSRRLENLIAQLPGEKKNGLFGNLIALSLGLTPNFKSNFDLAEDAKLQLSKDTYDDDLDNLLAQIGDQYADLFLAAKNLSDAILLSDILRVNTEITKAPLSASMIKRYDEHHQDLTLLKALVRQQLPEKYKEIFFDQSKNGYAGYIDGGASQEEFYKFIKPILEKMDGTEELLVKLNREDLLRKQRTFDNGSIPHQIHLGELHAILRRQEDFYPFLKDNREKIEKILTFRIPYYVGPLARGNSRFAWMTRKSEETITPWNFEEVVDKGASAQSFIERMTNFDKNLPNEKVLPKHSLLYEYFTVYNELTKVKYVTEGMRKPAFLSGEQKKAIVDLLFKTNRKVTVKQLKEDYFKKIECFDSVEISGVEDRFNASLGTYHDLLKIIKDKDFLDNEENEDILEDIVLTLTLFEDREMIEERLKTYAHLFDDKVMKQLKRRRYTGWGRLSRKLINGIRDKQSGKTILDFLKSDGFANRNFMQLIHDDSLTFKEDIQKAQVSGQGDSLHEHIANLAGSPAIKKGILQTVKVVDELVKVMGRHKPENIVIEMARENQTTQKGQKNSRERMKRIEEGIKELGSQILKEHPVENTQLQNEKLYLYYLQNGRDMYVDQELDINRLSDYDVDHIVPQSFLKDDSIDNKVLTRSDKARGKSDNVPSEEVVKKMKNYWRQLLNAKLITQRKFDNLTKAERGGLSELDKAGFIKRQLVETRQITKHVAQILDSRMNTKYDENDKLIREVKVITLKSKLVSDFRKDFQFYKVREINNYHHAHDAYLNAVVGTALIKKYPKLESEFVYGDYKVYDVRKMIAKSEQEIGKATAKYFFYSNIMNFFKTEITLANGEIRKRPLIETNGETGEIVWDKGRDFATVRKVLSMPQVNIVKKTEVQTGGFSKESILPKRNSDKLIARKKDWDPKKYGGFDSPTVAYSVLVVAKVEKGKSKKLKSVKELLGITIMERSSFEKNPIDFLEAKGYKEVKKDLIIKLPKYSLFELENGRKRMLASAGELQKGNELALPSKYVNFLYLASHYEKLKGSPEDNEQKQLFVEQHKHYLDEIIEQISEFSKRVILADANLDKVLSAYNKHRDKPIREQAENIIHLFTLTNLGAPAAFKYFDTTIDRKRYTSTKEVLDATLIHQSITGLYETRIDLSQLGGDGGGGGGGSGSSGGTAPLEEEYRLFLEAPIQNVTLLEQWKREIPKVWAEINPPGLASTQAPIHVQLLSTALPVRVRQYPITLEAKRSLRETIRKFRAAGILRPVHSPWNTPLLPVRKSGTSEYRMVQDLREVNKRVETIHPTVPNPYTLLSLLPPDRIWYSVLDLKDAFFCIPLAPESQLIFAFEWADAEEGESGQLTWTRLPQGFKNSPTLFNEALNRDLQGFRLDHPSVSLLQYVDDLLIAADTQAACLSATRDLLMTLAELGYRVSGKKAQLCQEEVTYLGFKIHKGSRSLSNSRTQAILQIPVPKTKRQVREFLGTIGYCRLWIPGFAELAQPLYAATRPGNDPLVWGEKEEEAFQSLKLALTQPPALALPSLDKPFQLFVEETSGAAKGVLTQALGPWKRPVAYLSKRLDPVAAGWPRCLRAIAAAALLTREASKLTFGQDIEITSSHNLESLLRSPPDKWLTNARITQYQVLLLDPPRVRFKQTAALNPATLLPETDDTLPIHHCLDTLDSLTSTRPDLTDQPLAQAEATLFTDGSSYIRDGKRYAGAAVVTLDSVIWAEPLPIGTSAQKAELIALTKALEWSKDKSVNIYTDSRYAFATLHVHGMIYRERGWLTAGGKAIKNAPEILALLTAVWLPKRVAVMHCKGHQKDDAPTSTGNRRADEVAREVAIRPLSTQATISAGKRTADGSEFEKRTADGSEFESPKKKAKVE

SEQ ID NO: 6824 - protein, 2096 aa, synthetic construct
MPAAKRVKLDGGDKKYSIGLDIGTNSVGWAVITDEYKVPSKKFKVLGNTDRHSIKKNLIGALLFDSGETAEATRLKRTARRRYTRRKNRICYLQEIFSNEMAKVDDSFFHRLEESFLVEEDKKHERHPIFGNIVDEVAYHEKYPTIYHLRKKLVDSTDKADLRLIYLALAHMIKFRGHFLIEGDLNPDNSDVDKLFIQLVQTYNQLFEENPINASGVDAKAILSARLSKSRRLENLIAQLPGEKKNGLFGNLIALSLGLTPNFKSNFDLAEDAKLQLSKDTYDDDLDNLLAQIGDQYADLFLAAKNLSDAILLSDILRVNTEITKAPLSASMIKRYDEHHQDLTLLKALVRQQLPEKYKEIFFDQSKNGYAGYIDGGASQEEFYKFIKPILEKMDGTEELLVKLNREDLLRKQRTFDNGSIPHQIHLGELHAILRRQEDFYPFLKDNREKIEKILTFRIPYYVGPLARGNSRFAWMTRKSEETITPWNFEEVVDKGASAQSFIERMTNFDKNLPNEKVLPKHSLLYEYFTVYNELTKVKYVTEGMRKPAFLSGEQKKAIVDLLFKTNRKVTVKQLKEDYFKKIECFDSVEISGVEDRFNASLGTYHDLLKIIKDKDFLDNEENEDILEDIVLTLTLFEDREMIEERLKTYAHLFDDKVMKQLKRRRYTGWGRLSRKLINGIRDKQSGKTILDFLKSDGFANRNFMQLIHDDSLTFKEDIQKAQVSGQGDSLHEHIANLAGSPAIKKGILQTVKVVDELVKVMGRHKPENIVIEMARENQTTQKGQKNSRERMKRIEEGIKELGSQILKEHPVENTQLQNEKLYLYYLQNGRDMYVDQELDINRLSDYDVDHIVPQSFLKDDSIDNKVLTRSDKARGKSDNVPSEEVVKKMKNYWRQLLNAKLITQRKFDNLTKAERGGLSELDKAGFIKRQLVETRQITKHVAQILDSRMNTKYDENDKLIREVKVITLKSKLVSDFRKDFQFYKVREINNYHHAHDAYLNAVVGTALIKKYPKLESEFVYGDYKVYDVRKMIAKSEQEIGKATAKYFFYSNIMNFFKTEITLANGEIRKRPLIETNGETGEIVWDKGRDFATVRKVLSMPQVNIVKKTEVQTGGFSKESILPKRNSDKLIARKKDWDPKKYGGFDSPTVAYSVLVVAKVEKGKSKKLKSVKELLGITIMERSSFEKNPIDFLEAKGYKEVKKDLIIKLPKYSLFELENGRKRMLASAGELQKGNELALPSKYVNFLYLASHYEKLKGSPEDNEQKQLFVEQHKHYLDEIIEQISEFSKRVILADANLDKVLSAYNKHRDKPIREQAENIIHLFTLTNLGAPAAFKYFDTTIDRKRYTSTKEVLDATLIHQSITGLYETRIDLSQLGGDGGGGGGGSGSSGGTAPLEEEYRLFLEAPIQNVTLLEQWKREIPKVWAEINPPGLASTQAPIHVQLLSTALPVRVRQYPITLEAKRSLRETIRKFRAAGILRPVHSPWNTPLLPVRKSGTSEYRMVQDLREVNKRVETIHPTVPNPYTLLSLLPPDRIWYSVLDLKDAFFCIPLAPESQLIFAFEWADAEEGESGQLTWTRLPQGFKNSPTLFNEALNRDLQGFRLDHPSVSLLQYVDDLLIAADTQAACLSATRDLLMTLAELGYRVSGKKAQLCQEEVTYLGFKIHKGSRSLSNSRTQAILQIPVPKTKRQVREFLGKIGYCRLFIPGFAELAQPLYAATRPGNDPLVWGEKEEEAFQSLKLALTQPPALALPSLDKPFQLFVEETSGAAKGVLTQALGPWKRPVAYLSKRLDPVAAGWPRCLRAIAAAALLTREASKLTFGQDIEITSSHNLESLLRSPPDKWLTNARITQYQVLLLDPPRVRFKQTAALNPATLLPETDDTLPIHHCLDTLDSLTSTRPDLTDQPLAQAEATLFTDGSSYIRDGKRYAGAAVVTLDSVIWAEPLPIGTSAQKAELIALTKALEWSKDKSVNIYTDSRYAFATLHVHGMIYRERGWLTAGGKAIKNAPEILALLTAVWLPKRVAVMHCKGHQKDDAPTSTGNRRADEVAREVAIRPLSTQATISAGKRTADGSEFEKRTADGSEFESPKKKAKVE

SEQ ID NO: 6825 - protein, 2100 aa, synthetic construct
MPAAKRVKLDGGDKKYSIGLDIGTNSVGWAVITDEYKVPSKKFKVLGNTDRHSIKKNLIGALLFDSGETAEATRLKRTARRRYTRRKNRICYLQEIFSNEMAKVDDSFFHRLEESFLVEEDKKHERHPIFGNIVDEVAYHEKYPTIYHLRKKLVDSTDKADLRLIYLALAHMIKFRGHFLIEGDLNPDNSDVDKLFIQLVQTYNQLFEENPINASGVDAKAILSARLSKSRRLENLIAQLPGEKKNGLFGNLIALSLGLTPNFKSNFDLAEDAKLQLSKDTYDDDLDNLLAQIGDQYADLFLAAKNLSDAILLSDILRVNTEITKAPLSASMIKRYDEHHQDLTLLKALVRQQLPEKYKEIFFDQSKNGYAGYIDGGASQEEFYKFIKPILEKMDGTEELLVKLNREDLLRKQRTFDNGSIPHQIHLGELHAILRRQEDFYPFLKDNREKIEKILTFRIPYYVGPLARGNSRFAWMTRKSEETITPWNFEEVVDKGASAQSFIERMTNFDKNLPNEKVLPKHSLLYEYFTVYNELTKVKYVTEGMRKPAFLSGEQKKAIVDLLFKTNRKVTVKQLKEDYFKKIECFDSVEISGVEDRFNASLGTYHDLLKIIKDKDFLDNEENEDILEDIVLTLTLFEDREMIEERLKTYAHLFDDKVMKQLKRRRYTGWGRLSRKLINGIRDKQSGKTILDFLKSDGFANRNFMQLIHDDSLTFKEDIQKAQVSGQGDSLHEHIANLAGSPAIKKGILQTVKVVDELVKVMGRHKPENIVIEMARENQTTQKGQKNSRERMKRIEEGIKELGSQILKEHPVENTQLQNEKLYLYYLQNGRDMYVDQELDINRLSDYDVDHIVPQSFLKDDSIDNKVLTRSDKARGKSDNVPSEEVVKKMKNYWRQLLNAKLITQRKFDNLTKAERGGLSELDKAGFIKRQLVETRQITKHVAQILDSRMNTKYDENDKLIREVKVITLKSKLVSDFRKDFQFYKVREINNYHHAHDAYLNAVVGTALIKKYPKLESEFVYGDYKVYDVRKMIAKSEQEIGKATAKYFFYSNIMNFFKTEITLANGEIRKRPLIETNGETGEIVWDKGRDFATVRKVLSMPQVNIVKKTEVQTGGFSKESILPKRNSDKLIARKKDWDPKKYGGFDSPTVAYSVLVVAKVEKGKSKKLKSVKELLGITIMERSSFEKNPIDFLEAKGYKEVKKDLIIKLPKYSLFELENGRKRMLASAGELQKGNELALPSKYVNFLYLASHYEKLKGSPEDNEQKQLFVEQHKHYLDEIIEQISEFSKRVILADANLDKVLSAYNKHRDKPIREQAENIIHLFTLTNLGAPAAFKYFDTTIDRKRYTSTKEVLDATLIHQSITGLYETRIDLSQLGGDGGGGGGGSGSSGGTVSLQDEHRLFDIPVTTSLPDVWLQDFPQAWAETGGLGRAKCQAPIIIDLKPTAVPVSIKQYPMSLEAHMGIRQHIIKFLELGVLRPCRSPWNTPLLPVKKPGTQDYRPVQDLREINKRTVDIHPTVPNPYNLLSTLKPDYSWYTVLDLKDAFFCLPLAPQSQELFAFEWKDPERGISGQLTWTRLPQGFKNSPTLFNEALHRDLTDFRTQHPEVTLLQYVDDLLLAAPTKKACTQGTRHLLQELGEKGYRASAKKAQICQTKVTYLGYILSEGKRWLTPGRIETVARIPPPRNPREVREFLGTAGFCRLWIPGFAELAAPLYALTKPSTPFTWQTEHQLAFEALKKALLSAPALGLPDTSKPFTLFLDERQGIAKGVLTQKLGPWKRPVAYLSKKLDPVAAGWPPCLRIMAATAMLVKDSAKLTLGQPLTVITPHTLEAIVRQPPDRWITNARLTHYQALLLDTDRVQFGPPVTLNPATLLPVPENQPSPHDCRQVLAETHGTREDLKDQELPDADHTWYTDGSSYLDSGTRRAGAAVVDGHNTIWAQSLPPGTSAQKAELIALTKALELSKGKKANIYTDSRYAFATAHTHGSIYERRGWLTSEGKEIKNKAEIIALLKALFLPQEVAIIHCPGHQKGQDPVAVGNRQADRVARQAAMAEVLTLATEPDNTSHITAGKRTADGSEFEKRTADGSEFESPKKKAKVE

SEQ ID NO: 6826 - protein, 2093 aa, synthetic construct
MPAAKRVKLDGGDKKYSIGLDIGTNSVGWAVITDEYKVPSKKFKVLGNTDRHSIKKNLIGALLFDSGETAEATRLKRTARRRYTRRKNRICYLQEIFSNEMAKVDDSFFHRLEESFLVEEDKKHERHPIFGNIVDEVAYHEKYPTIYHLRKKLVDSTDKADLRLIYLALAHMIKFRGHFLIEGDLNPDNSDVDKLFIQLVQTYNQLFEENPINASGVDAKAILSARLSKSRRLENLIAQLPGEKKNGLFGNLIALSLGLTPNFKSNFDLAEDAKLQLSKDTYDDDLDNLLAQIGDQYADLFLAAKNLSDAILLSDILRVNTEITKAPLSASMIKRYDEHHQDLTLLKALVRQQLPEKYKEIFFDQSKNGYAGYIDGGASQEEFYKFIKPILEKMDGTEELLVKLNREDLLRKQRTFDNGSIPHQIHLGELHAILRRQEDFYPFLKDNREKIEKILTFRIPYYVGPLARGNSRFAWMTRKSEETITPWNFEEVVDKGASAQSFIERMTNFDKNLPNEKVLPKHSLLYEYFTVYNELTKVKYVTEGMRKPAFLSGEQKKAIVDLLFKTNRKVTVKQLKEDYFKKIECFDSVEISGVEDRFNASLGTYHDLLKIIKDKDFLDNEENEDILEDIVLTLTLFEDREMIEERLKTYAHLFDDKVMKQLKRRRYTGWGRLSRKLINGIRDKQSGKTILDFLKSDGFANRNFMQLIHDDSLTFKEDIQKAQVSGQGDSLHEHIANLAGSPAIKKGILQTVKVVDELVKVMGRHKPENIVIEMARENQTTQKGQKNSRERMKRIEEGIKELGSQILKEHPVENTQLQNEKLYLYYLQNGRDMYVDQELDINRLSDYDVDHIVPQSFLKDDSIDNKVLTRSDKARGKSDNVPSEEVVKKMKNYWRQLLNAKLITQRKFDNLTKAERGGLSELDKAGFIKRQLVETRQITKHVAQILDSRMNTKYDENDKLIREVKVITLKSKLVSDFRKDFQFYKVREINNYHHAHDAYLNAVVGTALIKKYPKLESEFVYGDYKVYDVRKMIAKSEQEIGKATAKYFFYSNIMNFFKTEITLANGEIRKRPLIETNGETGEIVWDKGRDFATVRKVLSMPQVNIVKKTEVQTGGFSKESILPKRNSDKLIARKKDWDPKKYGGFDSPTVAYSVLVVAKVEKGKSKKLKSVKELLGITIMERSSFEKNPIDFLEAKGYKEVKKDLIIKLPKYSLFELENGRKRMLASAGELQKGNELALPSKYVNFLYLASHYEKLKGSPEDNEQKQLFVEQHKHYLDEIIEQISEFSKRVILADANLDKVLSAYNKHRDKPIREQAENIIHLFTLTNLGAPAAFKYFDTTIDRKRYTSTKEVLDATLIHQSITGLYETRIDLSQLGGDGGGGGGGSGSSGGTLQLEEEYRLFEPESTQKQEMDIWLKNFPQAWAETGGMGTAHCQAPVLIQLKATATPISIRQYPMPHEAYQGIKPHIRRMLDQGILKPCQSPWNTPLLPVKKPGTEDYRPVQDLREVNKRVEDIHPTVPNPYNLLSTLPPSHPWYTVLDLKDAFFCLRLHSESQLLFAFEWRDPEIGLSGQLTWTRLPQGFKNSPTLFNEALHSDLADFRVRYPALVLLQYVDDLLLAAATRTECLEGTKALLETLGNKGYRASAKKAQICLQEVTYLGYSLKDGQRWLTKARKEAILSIPVPKNSRQVREFLGKAGYCRLFIPGFAELAAPLYPLTRPGTLFQWGTEQQLAFEDIKKALLSSPALGLPDITKPFELFIDENSGFAKGVLVQKLGPWKRPVAYLSKKLDTVASGWPPCLRMVAAIAILVKDAGKLTLGQPLTILTSHPVEALVRQPPNKWLSNARMTHYQAMLLDAERVHFGPTVSLNPATLLPLPSGGNHHDCLQILAETHGTRPDLTDQPLPDADLTWYTDGSSFIRNGEREAGAAVTTESEVIWAAPLPPGTSAQRAELIALTQALKMAEGKKLTVYTDSRYAFATTHVHGEIYRRRGWLTSEGKEIKNKNEILALLEALFLPKRLSIIHCPGHQKGDSPQAKGNRLADDTAKKAATETHSSLTVLPAGKRTADGSEFEKRTADGSEFESPKKKAKVE

SEQ ID NO: 6827 - protein, 2174 aa, synthetic construct
MPAAKRVKLDGGDKKYSIGLDIGTNSVGWAVITDEYKVPSKKFKVLGNTDRHSIKKNLIGALLFDSGETAEATRLKRTARRRYTRRKNRICYLQEIFSNEMAKVDDSFFHRLEESFLVEEDKKHERHPIFGNIVDEVAYHEKYPTIYHLRKKLVDSTDKADLRLIYLALAHMIKFRGHFLIEGDLNPDNSDVDKLFIQLVQTYNQLFEENPINASGVDAKAILSARLSKSRRLENLIAQLPGEKKNGLFGNLIALSLGLTPNFKSNFDLAEDAKLQLSKDTYDDDLDNLLAQIGDQYADLFLAAKNLSDAILLSDILRVNTEITKAPLSASMIKRYDEHHQDLTLLKALVRQQLPEKYKEIFFDQSKNGYAGYIDGGASQEEFYKFIKPILEKMDGTEELLVKLNREDLLRKQRTFDNGSIPHQIHLGELHAILRRQEDFYPFLKDNREKIEKILTFRIPYYVGPLARGNSRFAWMTRKSEETITPWNFEEVVDKGASAQSFIERMTNFDKNLPNEKVLPKHSLLYEYFTVYNELTKVKYVTEGMRKPAFLSGEQKKAIVDLLFKTNRKVTVKQLKEDYFKKIECFDSVEISGVEDRFNASLGTYHDLLKIIKDKDFLDNEENEDILEDIVLTLTLFEDREMIEERLKTYAHLFDDKVMKQLKRRRYTGWGRLSRKLINGIRDKQSGKTILDFLKSDGFANRNFMQLIHDDSLTFKEDIQKAQVSGQGDSLHEHIANLAGSPAIKKGILQTVKVVDELVKVMGRHKPENIVIEMARENQTTQKGQKNSRERMKRIEEGIKELGSQILKEHPVENTQLQNEKLYLYYLQNGRDMYVDQELDINRLSDYDVDHIVPQSFLKDDSIDNKVLTRSDKARGKSDNVPSEEVVKKMKNYWRQLLNAKLITQRKFDNLTKAERGGLSELDKAGFIKRQLVETRQITKHVAQILDSRMNTKYDENDKLIREVKVITLKSKLVSDFRKDFQFYKVREINNYHHAHDAYLNAVVGTALIKKYPKLESEFVYGDYKVYDVRKMIAKSEQEIGKATAKYFFYSNIMNFFKTEITLANGEIRKRPLIETNGETGEIVWDKGRDFATVRKVLSMPQVNIVKKTEVQTGGFSKESILPKRNSDKLIARKKDWDPKKYGGFDSPTVAYSVLVVAKVEKGKSKKLKSVKELLGITIMERSSFEKNPIDFLEAKGYKEVKKDLIIKLPKYSLFELENGRKRMLASAGELQKGNELALPSKYVNFLYLASHYEKLKGSPEDNEQKQLFVEQHKHYLDEIIEQISEFSKRVILADANLDKVLSAYNKHRDKPIREQAENIIHLFTLTNLGAPAAFKYFDTTIDRKRYTSTKEVLDATLIHQSITGLYETRIDLSQLGGDGGGGGGGSGSSGGMNPLQLLQPLPAEIKGTKLLAHWNSGATITCIPESFLEDEQPIKKTLIKTIHGEKQQNVYYVTFKVKGRKVEAEVIASPYEYILLSPTDVPWLTQQPLQLTILVPLQEYQEKILSKTALPEDQKQQLKTLFVKYDNLWQHWENQVGHRKIRPHNIATGDYPPRPQKQYPINPKAKPSIQIVIDDLLKQGVLTPQNSTMNTPVYPVPKPDGRWRMVLDYREVNKTIPLTAAQNQHSAGILATIVRQKYKTTLDLANGFWAHPITPESYWLTAFTWQGKQYCWTRLPQGFLNSPALFNADVVDLLKEIPNVQVYVDDIYLSHDDPKEHVQQLEKVFQILLQAGYVVSLKKSEIGQKTVEFLGFNITKEGRGLTDTFKTKLLNITPPKDLKQLQSILGKLNFARNFIPNFAELVQPLYNLIAPAKGKYIEWSEENTKQLNMVIEALNTASNLEERLPEQRLVIKVNTSPSAGYVRYYNETGKKPIMYLNYVFSKAELKFSMLEKLLTTMHKALIKAMDLAMGQEILVYSPIVSMTKIQKTPLPERKALPIRWITWMTYLEDPRIQFHYDKTLPELKHIPDVYTSSQSPVKHPSQYEGVFYTDGSAIKSPDPTKSNNAGMGIVHATYKPEYQVLNQWSIPLGNHTAQMAEIAAVEFACKKALKIPGPVLVITDSFYVAESANKELPYWKSNGFVNNKKKPLKHISKWKSIAECLSMKPDITIQHEKGISLQIPVFILKGNALADKLATQGSYVVNAGKRTADGSEFEKRTADGSEFESPKKKAKVE

SEQ ID NO: 6828 - protein, 2125 aa, synthetic construct
MPAAKRVKLDGGDKKYSIGLDIGTNSVGWAVITDEYKVPSKKFKVLGNTDRHSIKKNLIGALLFDSGETAEATRLKRTARRRYTRRKNRICYLQEIFSNEMAKVDDSFFHRLEESFLVEEDKKHERHPIFGNIVDEVAYHEKYPTIYHLRKKLVDSTDKADLRLIYLALAHMIKFRGHFLIEGDLNPDNSDVDKLFIQLVQTYNQLFEENPINASGVDAKAILSARLSKSRRLENLIAQLPGEKKNGLFGNLIALSLGLTPNFKSNFDLAEDAKLQLSKDTYDDDLDNLLAQIGDQYADLFLAAKNLSDAILLSDILRVNTEITKAPLSASMIKRYDEHHQDLTLLKALVRQQLPEKYKEIFFDQSKNGYAGYIDGGASQEEFYKFIKPILEKMDGTEELLVKLNREDLLRKQRTFDNGSIPHQIHLGELHAILRRQEDFYPFLKDNREKIEKILTFRIPYYVGPLARGNSRFAWMTRKSEETITPWNFEEVVDKGASAQSFIERMTNFDKNLPNEKVLPKHSLLYEYFTVYNELTKVKYVTEGMRKPAFLSGEQKKAIVDLLFKTNRKVTVKQLKEDYFKKIECFDSVEISGVEDRFNASLGTYHDLLKIIKDKDFLDNEENEDILEDIVLTLTLFEDREMIEERLKTYAHLFDDKVMKQLKRRRYTGWGRLSRKLINGIRDKQSGKTILDFLKSDGFANRNFMQLIHDDSLTFKEDIQKAQVSGQGDSLHEHIANLAGSPAIKKGILQTVKVVDELVKVMGRHKPENIVIEMARENQTTQKGQKNSRERMKRIEEGIKELGSQILKEHPVENTQLQNEKLYLYYLQNGRDMYVDQELDINRLSDYDVDHIVPQSFLKDDSIDNKVLTRSDKARGKSDNVPSEEVVKKMKNYWRQLLNAKLITQRKFDNLTKAERGGLSELDKAGFIKRQLVETRQITKHVAQILDSRMNTKYDENDKLIREVKVITLKSKLVSDFRKDFQFYKVREINNYHHAHDAYLNAVVGTALIKKYPKLESEFVYGDYKVYDVRKMIAKSEQEIGKATAKYFFYSNIMNFFKTEITLANGEIRKRPLIETNGETGEIVWDKGRDFATVRKVLSMPQVNIVKKTEVQTGGFSKESILPKRNSDKLIARKKDWDPKKYGGFDSPTVAYSVLVVAKVEKGKSKKLKSVKELLGITIMERSSFEKNPIDFLEAKGYKEVKKDLIIKLPKYSLFELENGRKRMLASAGELQKGNELALPSKYVNFLYLASHYEKLKGSPEDNEQKQLFVEQHKHYLDEIIEQISEFSKRVILADANLDKVLSAYNKHRDKPIREQAENIIHLFTLTNLGAPAAFKYFDTTIDRKRYTSTKEVLDATLIHQSITGLYETRIDLSQLGGDGGGGGGGSGSSGGLLGRDLLTKLKAQIQFSTEGPQVTWEDRPAMCLVLNLEEEYRLHEKPVPPSIDPSWLQLFPMVWAEKAGMGLANQVPPVVVELKSDASPVAVRQYPMSKEAREGIRPHIQRFLDLGILVPCQSPWNTPLLPVKKPGTNDYRPVQDLREVNKRVQDIHPTVPNPYNLLSSLPPSHTWYSVLDLKDAFFCLKLHPNSQPLFAFEWRDPEKGNTGQLTWTRLPQGFKNSPTLFNEALHRDLASFRALNPQVVMLQYVDDLLVAAPTYRDCKEGTRRLLQELSKLGYRVSAKKAQLCREEVTYLGYLLKGGKRWLTPARKATVMKIPTPTTPRQVREFLGTAGFCRLWIPGFASLAAPLYPLTRPKVPFTWTEAHQEAFGRIKEALLSAPALALPDLTKPFALYVDEKEGVARGVLTQTLGPWRRPVAYLSKKLDPVASGWPTCLKAIAAVALLLKDADKLTLGQNVLVIAPHNLESIVRQPPDRWMTNARMTHYQSLLLNERVSFAPPAILNPATLLPVESDDTPIHICSEILAEETGTRPDLRDQPLPGVPAWYTDGSSFIMDGRRQAGAAIVDNKRTVWASNLPEGTSAQKAELIALTQALRLAEGKSINIYTDSRYAFATAHVHGAIYKQRGWLTSAGKDIKNKEEILALLEAIHLPKRVAIIHCPGHQRGTDPVATGNRKADEAAKQAAQSTRILTETTKNAGKRTADGSEFEKRTADGSEFESPKKKAKVE

SEQ ID NO: 6829 - protein, 2125 aa, synthetic construct
MPAAKRVKLDGGDKKYSIGLDIGTNSVGWAVITDEYKVPSKKFKVLGNTDRHSIKKNLIGALLFDSGETAEATRLKRTARRRYTRRKNRICYLQEIFSNEMAKVDDSFFHRLEESFLVEEDKKHERHPIFGNIVDEVAYHEKYPTIYHLRKKLVDSTDKADLRLIYLALAHMIKFRGHFLIEGDLNPDNSDVDKLFIQLVQTYNQLFEENPINASGVDAKAILSARLSKSRRLENLIAQLPGEKKNGLFGNLIALSLGLTPNFKSNFDLAEDAKLQLSKDTYDDDLDNLLAQIGDQYADLFLAAKNLSDAILLSDILRVNTEITKAPLSASMIKRYDEHHQDLTLLKALVRQQLPEKYKEIFFDQSKNGYAGYIDGGASQEEFYKFIKPILEKMDGTEELLVKLNREDLLRKQRTFDNGSIPHQIHLGELHAILRRQEDFYPFLKDNREKIEKILTFRIPYYVGPLARGNSRFAWMTRKSEETITPWNFEEVVDKGASAQSFIERMTNFDKNLPNEKVLPKHSLLYEYFTVYNELTKVKYVTEGMRKPAFLSGEQKKAIVDLLFKTNRKVTVKQLKEDYFKKIECFDSVEISGVEDRFNASLGTYHDLLKIIKDKDFLDNEENEDILEDIVLTLTLFEDREMIEERLKTYAHLFDDKVMKQLKRRRYTGWGRLSRKLINGIRDKQSGKTILDFLKSDGFANRNFMQLIHDDSLTFKEDIQKAQVSGQGDSLHEHIANLAGSPAIKKGILQTVKVVDELVKVMGRHKPENIVIEMARENQTTQKGQKNSRERMKRIEEGIKELGSQILKEHPVENTQLQNEKLYLYYLQNGRDMYVDQELDINRLSDYDVDHIVPQSFLKDDSIDNKVLTRSDKARGKSDNVPSEEVVKKMKNYWRQLLNAKLITQRKFDNLTKAERGGLSELDKAGFIKRQLVETRQITKHVAQILDSRMNTKYDENDKLIREVKVITLKSKLVSDFRKDFQFYKVREINNYHHAHDAYLNAVVGTALIKKYPKLESEFVYGDYKVYDVRKMIAKSEQEIGKATAKYFFYSNIMNFFKTEITLANGEIRKRPLIETNGETGEIVWDKGRDFATVRKVLSMPQVNIVKKTEVQTGGFSKESILPKRNSDKLIARKKDWDPKKYGGFDSPTVAYSVLVVAKVEKGKSKKLKSVKELLGITIMERSSFEKNPIDFLEAKGYKEVKKDLIIKLPKYSLFELENGRKRMLASAGELQKGNELALPSKYVNFLYLASHYEKLKGSPEDNEQKQLFVEQHKHYLDEIIEQISEFSKRVILADANLDKVLSAYNKHRDKPIREQAENIIHLFTLTNLGAPAAFKYFDTTIDRKRYTSTKEVLDATLIHQSITGLYETRIDLSQLGGDGGGGGGGSGSSGGLLGRDLLTKLKAQIQFSTEGPQVTWEDRPAMCLVLNLEEEYRLHEKPVPPSIDPSWLQLFPMVWAEKAGMGLANQVPPVVVELKSDASPVAVRQYPMSKEAREGIRPHIQRFLDLGILVPCQSPWNTPLLPVKKPGTNDYRPVQDLREVNKRVQDIHPTVPNPYNLLSSLPPSHTWYSVLDLKDAFFCLKLHPNSQPLFAFEWRDPEKGNTGQLTWTRLPQGFKNSPTLFNEALHRDLASFRALNPQVVMLQYVDDLLVAAPTYRDCKEGTRRLLQELSKLGYRVSAKKAQLCREEVTYLGYLLKGGKRWLTPARKATVMKIPTPTTPRQVREFLGKAGFCRLFIPGFASLAAPLYPLTRPKVPFTWTEAHQEAFGRIKEALLSAPALALPDLTKPFALYVDEKEGVARGVLTQTLGPWRRPVAYLSKKLDPVASGWPTCLKAIAAVALLLKDADKLTLGQNVLVIAPHNLESIVRQPPDRWMTNARMTHYQSLLLNERVSFAPPAILNPATLLPVESDDTPIHICSEILAEETGTRPDLRDQPLPGVPAWYTDGSSFIMDGRRQAGAAIVDNKRTVWASNLPEGTSAQKAELIALTQALRLAEGKSINIYTDSRYAFATAHVHGAIYKQRGWLTSAGKDIKNKEEILALLEAIHLPKRVAIIHCPGHQRGTDPVATGNRKADEAAKQAAQSTRILTETTKNAGKRTADGSEFEKRTADGSEFESPKKKAKVE

SEQ ID NO: 6830 - protein, 2094 aa, synthetic construct
MPAAKRVKLDGGDKKYSIGLDIGTNSVGWAVITDEYKVPSKKFKVLGNTDRHSIKKNLIGALLFDSGETAEATRLKRTARRRYTRRKNRICYLQEIFSNEMAKVDDSFFHRLEESFLVEEDKKHERHPIFGNIVDEVAYHEKYPTIYHLRKKLVDSTDKADLRLIYLALAHMIKFRGHFLIEGDLNPDNSDVDKLFIQLVQTYNQLFEENPINASGVDAKAILSARLSKSRRLENLIAQLPGEKKNGLFGNLIALSLGLTPNFKSNFDLAEDAKLQLSKDTYDDDLDNLLAQIGDQYADLFLAAKNLSDAILLSDILRVNTEITKAPLSASMIKRYDEHHQDLTLLKALVRQQLPEKYKEIFFDQSKNGYAGYIDGGASQEEFYKFIKPILEKMDGTEELLVKLNREDLLRKQRTFDNGSIPHQIHLGELHAILRRQEDFYPFLKDNREKIEKILTFRIPYYVGPLARGNSRFAWMTRKSEETITPWNFEEVVDKGASAQSFIERMTNFDKNLPNEKVLPKHSLLYEYFTVYNELTKVKYVTEGMRKPAFLSGEQKKAIVDLLFKTNRKVTVKQLKEDYFKKIECFDSVEISGVEDRFNASLGTYHDLLKIIKDKDFLDNEENEDILEDIVLTLTLFEDREMIEERLKTYAHLFDDKVMKQLKRRRYTGWGRLSRKLINGIRDKQSGKTILDFLKSDGFANRNFMQLIHDDSLTFKEDIQKAQVSGQGDSLHEHIANLAGSPAIKKGILQTVKVVDELVKVMGRHKPENIVIEMARENQTTQKGQKNSRERMKRIEEGIKELGSQILKEHPVENTQLQNEKLYLYYLQNGRDMYVDQELDINRLSDYDVDHIVPQSFLKDDSIDNKVLTRSDKARGKSDNVPSEEVVKKMKNYWRQLLNAKLITQRKFDNLTKAERGGLSELDKAGFIKRQLVETRQITKHVAQILDSRMNTKYDENDKLIREVKVITLKSKLVSDFRKDFQFYKVREINNYHHAHDAYLNAVVGTALIKKYPKLESEFVYGDYKVYDVRKMIAKSEQEIGKATAKYFFYSNIMNFFKTEITLANGEIRKRPLIETNGETGEIVWDKGRDFATVRKVLSMPQVNIVKKTEVQTGGFSKESILPKRNSDKLIARKKDWDPKKYGGFDSPTVAYSVLVVAKVEKGKSKKLKSVKELLGITIMERSSFEKNPIDFLEAKGYKEVKKDLIIKLPKYSLFELENGRKRMLASAGELQKGNELALPSKYVNFLYLASHYEKLKGSPEDNEQKQLFVEQHKHYLDEIIEQISEFSKRVILADANLDKVLSAYNKHRDKPIREQAENIIHLFTLTNLGAPAAFKYFDTTIDRKRYTSTKEVLDATLIHQSITGLYETRIDLSQLGGDGGGGGGGSGSSGGTLNIEDEYRLHETSKGPDVPLGSTWLSDFPQAWAETGGMGLAVRQAPLIIPLKATSTPVSIKQYPMSQEARLGIKPHIQRLLDQGILVPCQSPWNTPLLPVKKPGTNDYRPVQDLREVNKRVEDIHPTVPNPYNLLSGLPPSHQWYTVLDLKDAFFCLRLHPTSQSLFAFEWRDPEMGISGQLTWTRLPQGFKNSPTLFNEALHRDLADFRIQHPDLILLQYVDDLLLAATSELDCQQGTRALLQTLGDLGYRASAKKAQICQKQVKYLGYLLKEGQRWLTEARKETVMGQPTPKTPRQLREFLGTAGFCRLWIPGFAEMAAPLYPLTKPGTLFEWGPDQQKAYQEIKQALLTAPALGLPDLTKPFELFVDEKQGYAKGVLTQKLGPWRRPVAYLSKKLDPVAAGWPPCLRMVAAIAVLTKDAGKLTMGQPLVILAPHAVEALVKQPPDRWLSNARMTHYQALLLDTDRVQFGPIVALNPATLLPLPEEGLQHDCLDILAEAHGTRPDLTDQPLPDADHTWYTDGSSFLQEGQRKAGAAVTTETEVVWAKALPAGTSAQRAELIALTQALKMAEGKKLNVYTDSRYAFATAHIHGEIYRRRGWLTSEGKEIKNKDEILALLKALFLPKRLSIIHCPGHQKGNRAEARGNRMADQAAREVATRETPETSTLLAGKRTADGSEFEKRTADGSEFESPKKKAKVE

SEQ ID NO: 6831 - protein, 2094 aa, synthetic construct
MPAAKRVKLDGGDKKYSIGLDIGTNSVGWAVITDEYKVPSKKFKVLGNTDRHSIKKNLIGALLFDSGETAEATRLKRTARRRYTRRKNRICYLQEIFSNEMAKVDDSFFHRLEESFLVEEDKKHERHPIFGNIVDEVAYHEKYPTIYHLRKKLVDSTDKADLRLIYLALAHMIKFRGHFLIEGDLNPDNSDVDKLFIQLVQTYNQLFEENPINASGVDAKAILSARLSKSRRLENLIAQLPGEKKNGLFGNLIALSLGLTPNFKSNFDLAEDAKLQLSKDTYDDDLDNLLAQIGDQYADLFLAAKNLSDAILLSDILRVNTEITKAPLSASMIKRYDEHHQDLTLLKALVRQQLPEKYKEIFFDQSKNGYAGYIDGGASQEEFYKFIKPILEKMDGTEELLVKLNREDLLRKQRTFDNGSIPHQIHLGELHAILRRQEDFYPFLKDNREKIEKILTFRIPYYVGPLARGNSRFAWMTRKSEETITPWNFEEVVDKGASAQSFIERMTNFDKNLPNEKVLPKHSLLYEYFTVYNELTKVKYVTEGMRKPAFLSGEQKKAIVDLLFKTNRKVTVKQLKEDYFKKIECFDSVEISGVEDRFNASLGTYHDLLKIIKDKDFLDNEENEDILEDIVLTLTLFEDREMIEERLKTYAHLFDDKVMKQLKRRRYTGWGRLSRKLINGIRDKQSGKTILDFLKSDGFANRNFMQLIHDDSLTFKEDIQKAQVSGQGDSLHEHIANLAGSPAIKKGILQTVKVVDELVKVMGRHKPENIVIEMARENQTTQKGQKNSRERMKRIEEGIKELGSQILKEHPVENTQLQNEKLYLYYLQNGRDMYVDQELDINRLSDYDVDHIVPQSFLKDDSIDNKVLTRSDKARGKSDNVPSEEVVKKMKNYWRQLLNAKLITQRKFDNLTKAERGGLSELDKAGFIKRQLVETRQITKHVAQILDSRMNTKYDENDKLIREVKVITLKSKLVSDFRKDFQFYKVREINNYHHAHDAYLNAVVGTALIKKYPKLESEFVYGDYKVYDVRKMIAKSEQEIGKATAKYFFYSNIMNFFKTEITLANGEIRKRPLIETNGETGEIVWDKGRDFATVRKVLSMPQVNIVKKTEVQTGGFSKESILPKRNSDKLIARKKDWDPKKYGGFDSPTVAYSVLVVAKVEKGKSKKLKSVKELLGITIMERSSFEKNPIDFLEAKGYKEVKKDLIIKLPKYSLFELENGRKRMLASAGELQKGNELALPSKYVNFLYLASHYEKLKGSPEDNEQKQLFVEQHKHYLDEIIEQISEFSKRVILADANLDKVLSAYNKHRDKPIREQAENIIHLFTLTNLGAPAAFKYFDTTIDRKRYTSTKEVLDATLIHQSITGLYETRIDLSQLGGDGGGGGGGSGSSGGTLNIEDEHRLHETSKEPDVSLGSTWLSDFPQAWAETGGMGLAVRQAPLIIPLKATSTPVSIKQYPMSQEARLGIKPHIQRLLDQGILVPCQSPWNTPLLPVKKPGTNDYRPVQDLREVNKRVEDIHPTVPNPYNLLSGLPPSHQWYTVLDLKDAFFCLRLHPTSQPLFAFEWRDPEMGISGQLTWTRLPQGFKNSPTLFNEALHRDLADFRIQHPDLILLQYVDDLLLAATSELDCQQGTRALLQTLGNLGYRASAKKAQICQKQVKYLGYLLKEGQRWLTEARKETVMGQPTPKTPRQLREFLGTAGFCRLWIPGFAEMAAPLYPLTKPGTLFNWGPDQQKAYQEIKQALLTAPALGLPDLTKPFELFVDEKQGYAKGVLTQKLGPWRRPVAYLSKKLDPVAAGWPPCLRMVAAIAVLTKDAGKLTMGQPLVILAPHAVEALVKQPPDRWLSNARMTHYQALLLDTDRVQFGPVVALNPATLLPLPEEGLQHNCLDILAEAHGTRPDLTDQPLPDADHTWYTDGSSLLQEGQRKAGAAVTTETEVIWAKALPAGTSAQRAELIALTQALKMAEGKKLNVYTDSRYAFATAHIHGEIYRRRGWLTSEGKEIKNKDEILALLKALFLPKRLSIIHCPGHQKGHSAEARGNRMADQAARKAAITETPDTSTLLAGKRTADGSEFEKRTADGSEFESPKKKAKVE

SEQ ID NO: 6832 - protein, 2094 aa, synthetic construct; identical to SEQ ID NO: 6831

SEQ ID NO: 6833 - protein, 2086 aa, synthetic construct
MPAAKRVKLDGGDKKYSIGLDIGTNSVGWAVITDEYKVPSKKFKVLGNTDRHSIKKNLIGALLFDSGETAEATRLKRTARRRYTRRKNRICYLQEIFSNEMAKVDDSFFHRLEESFLVEEDKKHERHPIFGNIVDEVAYHEKYPTIYHLRKKLVDSTDKADLRLIYLALAHMIKFRGHFLIEGDLNPDNSDVDKLFIQLVQTYNQLFEENPINASGVDAKAILSARLSKSRRLENLIAQLPGEKKNGLFGNLIALSLGLTPNFKSNFDLAEDAKLQLSKDTYDDDLDNLLAQIGDQYADLFLAAKNLSDAILLSDILRVNTEITKAPLSASMIKRYDEHHQDLTLLKALVRQQLPEKYKEIFFDQSKNGYAGYIDGGASQEEFYKFIKPILEKMDGTEELLVKLNREDLLRKQRTFDNGSIPHQIHLGELHAILRRQEDFYPFLKDNREKIEKILTFRIPYYVGPLARGNSRFAWMTRKSEETITPWNFEEVVDKGASAQSFIERMTNFDKNLPNEKVLPKHSLLYEYFTVYNELTKVKYVTEGMRKPAFLSGEQKKAIVDLLFKTNRKVTVKQLKEDYFKKIECFDSVEISGVEDRFNASLGTYHDLLKIIKDKDFLDNEENEDILEDIVLTLTLFEDREMIEERLKTYAHLFDDKVMKQLKRRRYTGWGRLSRKLINGIRDKQSGKTILDFLKSDGFANRNFMQLIHDDSLTFKEDIQKAQVSGQGDSLHEHIANLAGSPAIKKGILQTVKVVDELVKVMGRHKPENIVIEMARENQTTQKGQKNSRERMKRIEEGIKELGSQILKEHPVENTQLQNEKLYLYYLQNGRDMYVDQELDINRLSDYDVDHIVPQSFLKDDSIDNKVLTRSDKARGKSDNVPSEEVVKKMKNYWRQLLNAKLITQRKFDNLTKAERGGLSELDKAGFIKRQLVETRQITKHVAQILDSRMNTKYDENDKLIREVKVITLKSKLVSDFRKDFQFYKVREINNYHHAHDAYLNAVVGTALIKKYPKLESEFVYGDYKVYDVRKMIAKSEQEIGKATAKYFFYSNIMNFFKTEITLANGEIRKRPLIETNGETGEIVWDKGRDFATVRKVLSMPQVNIVKKTEVQTGGFSKESILPKRNSDKLIARKKDWDPKKYGGFDSPTVAYSVLVVAKVEKGKSKKLKSVKELLGITIMERSSFEKNPIDFLEAKGYKEVKKDLIIKLPKYSLFELENGRKRMLASAGELQKGNELALPSKYVNFLYLASHYEKLKGSPEDNEQKQLFVEQHKHYLDEIIEQISEFSKRVILADANLDKVLSAYNKHRDKPIREQAENIIHLFTLTNLGAPAAFKYFDTTIDRKRYTSTKEVLDATLIHQSITGLYETRIDLSQLGGDGGGGGGGSGSSGGLDDEYRLYSPLVKPDQNIQFWLEQFPQAWAETAGMGLAKQVPPQVIQLKASATPVSVRQYPLSKEAQEGIRPHVQRLIQQGILVPVQSPWNTPLLPVRKPGTNDYRPVQDLREVNKRVQDIHPTVPNPYNLLCALPPQRSWYTVLDLKDAFFCLRLHPTSQPLFAFEWRDPGTGRTGQLTWTRLPQGFKNSPTIFNEALHRDLANFRIQHPQVTLLQYVDDLLLAGATKQDCLEGTKALLLELSDLGYRASAKKAQICRREVTYLGYSLRDGQRWLTEARKKTVVQIPAPTTAKQVREFLGKAGFCRLFIPGFATLAAPLYPLTKPKGEFSWAPEHQKAFDAIKKALLSAPALALPDVTKPFTLYVDERKGVARGVLTQTLGPWRRPVAYLSKKLDPVASGWPVCLKAIAAVAILVKDADKLTLGQNITVIAPHALENIVRQPPDRWMTNARMTHYQSLLLTERVTFAPPAALNPATLLPEETDEPVTHDCHQLLIEETGVRKDLTDIPLTGEVLTWFTDGSSYVVEGKRMAGAAVVDGTRTIWASSLPEGTSAQKAELMALTQALRLAEGKSINIYTDSRYAFATAHVHGAIYKQRGWLTSAGREIKNKEEILSLLEALHLPKRLAIIHCPGHQKAKDPISRGNQMADRVAKQAAQGVNLLPAGKRTADGSEFEKRTADGSEFESPKKKAKVE

SEQ ID NO: 6834 - protein, 2086 aa, synthetic construct; identical to SEQ ID NO: 6833

SEQ ID NO: 6835 - protein, 2088 aa, synthetic construct
MPAAKRVKLDGGDKKYSIGLDIGTNSVGWAVITDEYKVPSKKFKVLGNTDRHSIKKNLIGALLFDSGETAEATRLKRTARRRYTRRKNRICYLQEIFSNEMAKVDDSFFHRLEESFLVEEDKKHERHPIFGNIVDEVAYHEKYPTIYHLRKKLVDSTDKADLRLIYLALAHMIKFRGHFLIEGDLNPDNSDVDKLFIQLVQTYNQLFEENPINASGVDAKAILSARLSKSRRLENLIAQLPGEKKNGLFGNLIALSLGLTPNFKSNFDLAEDAKLQLSKDTYDDDLDNLLAQIGDQYADLFLAAKNLSDAILLSDILRVNTEITKAPLSASMIKRYDEHHQDLTLLKALVRQQLPEKYKEIFFDQSKNGYAGYIDGGASQEEFYKFIKPILEKMDGTEELLVKLNREDLLRKQRTFDNGSIPHQIHLGELHAILRRQEDFYPFLKDNREKIEKILTFRIPYYVGPLARGNSRFAWMTRKSEETITPWNFEEVVDKGASAQSFIERMTNFDKNLPNEKVLPKHSLLYEYFTVYNELTKVKYVTEGMRKPAFLSGEQKKAIVDLLFKTNRKVTVKQLKEDYFKKIECFDSVEISGVEDRFNASLGTYHDLLKIIKDKDFLDNEENEDILEDIVLTLTLFEDREMIEERLKTYAHLFDDKVMKQLKRRRYTGWGRLSRKLINGIRDKQSGKTILDFLKSDGFANRNFMQLIHDDSLTFKEDIQKAQVSGQGDSLHEHIANLAGSPAIKKGILQTVKVVDELVKVMGRHKPENIVIEMARENQTTQKGQKNSRERMKRIEEGIKELGSQILKEHPVENTQLQNEKLYLYYLQNGRDMYVDQELDINRLSDYDVDHIVPQSFLKDDSIDNKVLTRSDKARGKSDNVPSEEVVKKMKNYWRQLLNAKLITQRKFDNLTKAERGGLSELDKAGFIKRQLVETRQITKHVAQILDSRMNTKYDENDKLIREVKVITLKSKLVSDFRKDFQFYKVREINNYHHAHDAYLNAVVGTALIKKYPKLESEFVYGDYKVYDVRKMIAKSEQEIGKATAKYFFYSNIMNFFKTEITLANGEIRKRPLIETNGETGEIVWDKGRDFATVRKVLSMPQVNIVKKTEVQTGGFSKESILPKRNSDKLIARKKDWDPKKYGGFDSPTVAYSVLVVAKVEKGKSKKLKSVKELLGITIMERSSFEKNPIDFLEAKGYKEVKKDLIIKLPKYSLFELENGRKRMLASAGELQKGNELALPSKYVNFLYLASHYEKLKGSPEDNEQKQLFVEQHKHYLDEIIEQISEFSKRVILADANLDKVLSAYNKHRDKPIREQAENIIHLFTLTNLGAPAAFKYFDTTIDRKRYTSTKEVLDATLIHQSITGLYETRIDLSQLGGDGGGGGGGSGSSGGTLQLDDEYRLYSPLVKPDQNIQFWLEQFPQAWAETAGMGLAKQVPPQVIQLKASATPVSVRQYPLSKEAQEGIRPHVQRLIQQGILVPVQSPWNTPLLPVRKPGTNDYRPVQDLREVNKRVQDIHPTVPNPYNLLCALPPQRSWYTVLDLKDAFFCLRLHPTSQPLFAFEWRDPGTGRTGQLTWTRLPQGFKNSPTIFDEALHRDLANFRIQHPQVTLLQYVDDLLLAGATKQDCLEGTKALLLELSDLGYRASAKKAQICRREVTYLGYSLRDGQRWLTEARKKTVVQIPAPTTAKQVREFLGTAGFCRLWIPGFATLAAPLYPLTKEKGEFSWAPEHQKAFDAIKKALLSAPALALPDVTKPFTLYVDERKGVARGVLTQTLGPWRRPVAYLSKKLDPVASGWPVCLKAIAAVAILVKDADKLTLGQNITVIAPHALENIVRQPPDRWMTNARMTHYQSLLLTERVTFAPPAALNPATLLPEETDEPVTHDCHQLLIEETGVRKDLTDIPLTGEVLTWFTDGSSYVVEGKRMAGAAVVDGTRTIWASSLPEGTSAQKAELMALTQALRLAEGKSINIYTDSRYAFATAHVHGAIYKQRGLLTSAGREIKNKEEILSLLEALHLPKRLAIIHCPGHQKAKDPISRGNQMADRVAKQAAQGVNLLAGKRTADGSEFEKRTADGSEFESPKKKAKVE

SEQ ID NO: 6836 - protein, 2085 aa, synthetic construct
MPAAKRVKLDGGDKKYSIGLDIGTNSVGWAVITDEYKVPSKKFKVLGNTDRHSIKKNLIGALLFDSGETAEATRLKRTARRRYTRRKNRICYLQEIFSNEMAKVDDSFFHRLEESFLVEEDKKHERHPIFGNIVDEVAYHEKYPTIYHLRKKLVDSTDKADLRLIYLALAHMIKFRGHFLIEGDLNPDNSDVDKLFIQLVQTYNQLFEENPINASGVDAKAILSARLSKSRRLENLIAQLPGEKKNGLFGNLIALSLGLTPNFKSNFDLAEDAKLQLSKDTYDDDLDNLLAQIGDQYADLFLAAKNLSDAILLSDILRVNTEITKAPLSASMIKRYDEHHQDLTLLKALVRQQLPEKYKEIFFDQSKNGYAGYIDGGASQEEFYKFIKPILEKMDGTEELLVKLNREDLLRKQRTFDNGSIPHQIHLGELHAILRRQEDFYPFLKDNREKIEKILTFRIPYYVGPLARGNSRFAWMTRKSEETITPWNFEEVVDKGASAQSFIERMTNFDKNLPNEKVLPKHSLLYEYFTVYNELTKVKYVTEGMRKPAFLSGEQKKAIVDLLFKTNRKVTVKQLKEDYFKKIECFDSVEISGVEDRFNASLGTYHDLLKIIKDKDFLDNEENEDILEDIVLTLTLFEDREMIEERLKTYAHLFDDKVMKQLKRRRYTGWGRLSRKLINGIRDKQSGKTILDFLKSDGFANRNFMQLIHDDSLTFKEDIQKAQVSGQGDSLHEHIANLAGSPAIKKGILQTVKVVDELVKVMGRHKPENIVIEMARENQTTQKGQKNSRERMKRIEEGIKELGSQILKEHPVENTQLQNEKLYLYYLQNGRDMYVDQELDINRLSDYDVDHIVPQSFLKDDSIDNKVLTRSDKARGKSDNVPSEEVVKKMKNYWRQLLNAKLITQRKFDNLTKAERGGLSELDKAGFIKRQLVETRQITKHVAQILDSRMNTKYDENDKLIREVKVITLKSKLVSDFRKDFQFYKVREINNYHHAHDAYLNAVVGTALIKKYPKLESEFVYGDYKVYDVRKMIAKSEQEIGKATAKYFFYSNIMNFFKTEITLANGEIRKRPLIETNGETGEIVWDKGRDFATVRKVLSMPQVNIVKKTEVQTGGFSKESILPKRNSDKLIARKKDWDPKKYGGFDSPTVAYSVLVVAKVEKGKSKKLKSVKELLGITIMERSSFEKNPIDFLEAKGYKEVKKDLIIKLPKYSLFELENGRKRMLASAGELQKGNELALPSKYVNFLYLASHYEKLKGSPEDNEQKQLFVEQHKHYLDEIIEQISEFSKRVILADANLDKVLSAYNKHRDKPIREQAENIIHLFTLTNLGAPAAFKYFDTTIDRKRYTSTKEVLDATLIHQSITGLYETRIDLSQLGGDGGGGGGGSGSSGGVPWLMKKPLQLTVLVPLHEYQERLLQQTALPKEQKELLQKLFLKYDALWQHWENQVGHRRIKPHNIATGTLAPRPQKQYPINPKAKPSIQIVIDDLLKQGVLIQQNSTMNTPVYPVPKPDGKWRMVLDYREVNKTIPLIAAQNQHSAGILSSIYRGKYKTTLDLTNGFWAHPITPESYWLTAFTWQGKQYCWTRLPQGFLNSPALFTADVVDLLKEIPNVQAYVDDIYISHDDPQEHLEQLEKIFSILLNAGYVVSLKKSEIAQREVEFLGFNITKEGRGLTDTFKQKLLNITPPKDLKQLQSILGLLNFARNFIPNYSELVKPLYTIVANANGKFISWTEDNSNQLQHIISVLNQADNLEERNPETRLIIKVNSSPSAGYIRYYNEGSKRPIMYVNYIFSKAEAKFTQTEKLLTTMHKGLIKAMDLAMGQEILVYSPIVSMTKIQRTPLPERKALPVRWITWMTYLEDPRIQFHYDKSLPELQQIPNVTEDVIAKTKHPSEFAMVFYTDGSAIKHPDVNKSHSAGMGIAQVQFIPEYKIVHQWSIPLGDHTAQLAEIAAVEFACKKALKISGPVLIVTDSFYVAESANKELPYWKSNGFLNNKKKPLRHVSKWKSIAECLQLKPDIIIMHEKGHQQPMTTLHTEGNNLADKLATQGSYVVHAGKRTADGSEFEKRTADGSEFESPKKKAKVE

SEQ ID NO: 6837 - protein, 2085 aa, synthetic construct
MPAAKRVKLDGGDKKYSIGLDIGTNSVGWAVITDEYKVPSKKFKVLGNTDRHSIKKNLIGALLFDSGETAEATRLKRTARRRYTRRKNRICYLQEIFSNEMAKVDDSFFHRLEESFLVEEDKKHERHPIFGNIVDEVAYHEKYPTIYHLRKKLVDSTDKADLRLIYLALAHMIKFRGHFLIEGDLNPDNSDVDKLFIQLVQTYNQLFEENPINASGVDAKAILSARLSKSRRLENLIAQLPGEKKNGLFGNLIALSLGLTPNFKSNFDLAEDAKLQLSKDTYDDDLDNLLAQIGDQYADLFLAAKNLSDAILLSDILRVNTEITKAPLSASMIKRYDEHHQDLTLLKALVRQQLPEKYKEIFFDQSKNGYAGYIDGGASQEEFYKFIKPILEKMDGTEELLVKLNREDLLRKQRTFDNGSIPHQIHLGELHAILRRQEDFYPFLKDNREKIEKILTFRIPYYVGPLARGNSRFAWMTRKSEETITPWNFEEVVDKGASAQSFIERMTNFDKNLPNEKVLPKHSLLYEYFTVYNELTKVKYVTEGMRKPAFLSGEQKKAIVDLLFKTNRKVTVKQLKEDYFKKIECFDSVEISGVEDRFNASLGTYHDLLKIIKDKDFLDNEENEDILEDIVLTLTLFEDREMIEERLKTYAHLFDDKVMKQLKRRRYTGWGRLSRKLINGIRDKQSGKTILDFLKSDGFANRNFMQLIHDDSLTFKEDIQKAQVSGQGDSLHEHIANLAGSPAIKKGILQTVKVVDELVKVMGRHKPENIVIEMARENQTTQKGQKNSRERMKRIEEGIKELGSQILKEHPVENTQLQNEKLYLYYLQNGRDMYVDQELDINRLSDYDVDHIVPQSFLKDDSIDNKVLTRSDKARGKSDNVPSEEVVKKMKNYWRQLLNAKLITQRKFDNLTKAERGGLSELDKAGFIKRQLVETRQITKHVAQILDSRMNTKYDENDKLIREVKVITLKSKLVSDFRKDFQFYKVREINNYHHAHDAYLNAVVGTALIKKYPKLESEFVYGDYKVYDVRKMIAKSEQEIGKATAKYFFYSNIMNFFKTEITLANGEIRKRPLIETNGETGEIVWDKGRDFATVRKVLSMPQVNIVKKTEVQTGGFSKESILPKRNSDKLIARKKDWDPKKYGGFDSPTVAYSVLVVAKVEKGKSKKLKSVKELLGITIMERSSFEKNPIDFLEAKGYKEVKKDLIIKLPKYSLFELENGRKRMLASAGELQKGNELALPSKYVNFLYLASHYEKLKGSPEDNEQKQLFVEQHKHYLDEIIEQISEFSKRVILADANLDKVLSAYNKHRDKPIREQAENIIHLFTLTNLGAPAAFKYFDTTIDRKRYTSTKEVLDATLIHQSITGLYETRIDLSQLGGDGGGGGGGSGSSGGVPWLMKKPLQLTVLVPLHEYQERLLQQTALPKEQKELLQKLFLKYDALWQHWENQVGHRRIKPHNIATGTLAPRPQKQYPINPKAKPSIQIVIDDLLKQGVLIQQNSTMNTPVYPVPKPDGKWRMVLDYREVNKTIPLIAAQNQHSAGILSSIYRGKYKTTLDLTNGFWAHPITPESYWLTAFTWQGKQYCWTRLPQGFLNSPALFNADVVDLLKEIPNVQAYVDDIYISHDDPQEHLEQLEKIFSILLNAGYVVSLKKSEIAQREVEFLGFNITKEGRGLTDTFKQKLLNITPPKDLKQLQSILGLLNFARNFIPNYSELVKPLYTIVAPANGKFISWTEDNSNQLQHIISVLNQADNLEERNPETRLIIKVNSSPSAGYIRYYNEGSKRPIMYVNYIFSKAEAKFTQTEKLLTTMHKGLIKAMDLAMGQEILVYSPIVSMTKIQRTPLPERKALPVRWITWMTYLEDPRIQFHYDKSLPELQQIPNVTEDVIAKTKHPSEFAMVFYTDGSAIKHPDVNKSHSAGMGIAQVQFIPEYKIVHQWSIPLGDHTAQLAEIAAVEFACKKALKISGPVLIVTDSFYVAESANKELPYWKSNGFLNNKKKPLRHVSKWKSIAECLQLKPDIIIMHEKGHQQPMTTLHTEGNNLADKLATQGSYVVHAGKRTADGSEFEKRTADGSEFESPKKKAKVE

SEQ ID NO: 6838 - protein, 2174 aa, synthetic construct
MPAAKRVKLDGGDKKYSIGLDIGTNSVGWAVITDEYKVPSKKFKVLGNTDRHSIKKNLIGALLFDSGETAEATRLKRTARRRYTRRKNRICYLQEIFSNEMAKVDDSFFHRLEESFLVEEDKKHERHPIFGNIVDEVAYHEKYPTIYHLRKKLVDSTDKADLRLIYLALAHMIKFRGHFLIEGDLNPDNSDVDKLFIQLVQTYNQLFEENPINASGVDAKAILSARLSKSRRLENLIAQLPGEKKNGLFGNLIALSLGLTPNFKSNFDLAEDAKLQLSKDTYDDDLDNLLAQIGDQYADLFLAAKNLSDAILLSDILRVNTEITKAPLSASMIKRYDEHHQDLTLLKALVRQQLPEKYKEIFFDQSKNGYAGYIDGGASQEEFYKFIKPILEKMDGTEELLVKLNREDLLRKQRTFDNGSIPHQIHLGELHAILRRQEDFYPFLKDNREKIEKILTFRIPYYVGPLARGNSRFAWMTRKSEETITPWNFEEVVDKGASAQSFIERMTNFDKNLPNEKVLPKHSLLYEYFTVYNELTKVKYVTEGMRKPAFLSGEQKKAIVDLLFKTNRKVTVKQLKEDYFKKIECFDSVEISGVEDRFNASLGTYHDLLKIIKDKDFLDNEENEDILEDIVLTLTLFEDREMIEERLKTYAHLFDDKVMKQLKRRRYTGWGRLSRKLINGIRDKQSGKTILDFLKSDGFANRNFMQLIHDDSLTFKEDIQKAQVSGQGDSLHEHIANLAGSPAIKKGILQTVKVVDELVKVMGRHKPENIVIEMARENQTTQKGQKNSRERMKRIEEGIKELGSQILKEHPVENTQLQNEKLYLYYLQNGRDMYVDQELDINRLSDYDVDHIVPQSFLKDDSIDNKVLTRSDKARGKSDNVPSEEVVKKMKNYWRQLLNAKLITQRKFDNLTKAERGGLSELDKAGFIKRQLVETRQITKHVAQILDSRMNTKYDENDKLIREVKVITLKSKLVSDFRKDFQFYKVREINNYHHAHDAYLNAVVGTALIKKYPKLESEFVYGDYKVYDVRKMIAKSEQEIGKATAKYFFYSNIMNFFKTEITLANGEIRKRPLIETNGETGEIVWDKGRDFATVRKVLSMPQVNIVKKTEVQTGGFSKESILPKRNSDKLIARKKDWDPKKYGGFDSPTVAYSVLVVAKVEKGKSKKLKSVKELLGITIMERSSFEKNPIDFLEAKGYKEVKKDLIIKLPKYSLFELENGRKRMLASAGELQKGNELALPSKYVNFLYLASHYEKLKGSPEDNEQKQLFVEQHKHYLDEIIEQISEFSKRVILADANLDKVLSAYNKHRDKPIREQAENIIHLFTLTNLGAPAAFKYFDTTIDRKRYTSTKEVLDATLIHQSITGLYETRIDLSQLGGDGGGGGGGSGSSGGMDPLQLLQPLEAEIKGTKLKAHWNSGATITCVPQAFLEEEVPIKNIWIKTIHGEKEQPVYYLTFKIQGRKVEAEVISSPYDYILVSPSDIPWLMKKPLQLTTLVPLQEYEERLLKQTMLTGSYKEKLQSLFLKYDALWQHWENQVGHRRIKPHHIATGTVNPRPQKQYPINPKAKASIQTVINDLLKQGVLIQQNSIMNTPVYPVPKPDGKWRMVLDYREVNKTIPLIAAQNQHSAGILSSIFRGKYKTTLDLSNGFWAHSITPESYWLTAFTWLGQQYCWTRLPQGFLNSPALFNADVVDLLKEVPNVQVYVDDIYISHDDPREHLEQLEKVFSLLLNAGYVVSLKKSEIAQHEVEFLGFNITKEGRGLTETFKQKLLNITPPRDLKQLQSILGLLNFARNFIPNFSELVKPLYNIIATAPGKYITWTTDNSQQLQNIISMLNSAENLEERNPEVRLIMKVNTSPSAGYIRFYNEFAKRPIMYLNYVYTKAEVKFTNTEKLLTTIHKGLIKALDLGMGQEILVYSPIVSMTKIQKTPLPERKALPIRWITWMSYLEDPRIQFHYDKTLPELQQVPTVTDDIIAKIKHPSEFSMVFYTDGSAIKHPNVNKSHNAGMGIAQVQFKPEFTVINTWSIPLGDHTAQLAEVAAVEFACKKALKIDGPVLIVTDSFYVAESVNKELPYWQSNGFFNNKKKPLKHVSKWKSIADCIQLKPDIIIIHEKGHQPTASTFHTEGNNLADKLATQGSYVVNAGKRTADGSEFEKRTADGSEFESPKKKAKVE

SEQ ID NO: 6839 - protein, 2092 aa, synthetic construct
MPAAKRVKLDGGDKKYSIGLDIGTNSVGWAVITDEYKVPSKKFKVLGNTDRHSIKKNLIGALLFDSGETAEATRLKRTARRRYTRRKNRICYLQEIFSNEMAKVDDSFFHRLEESFLVEEDKKHERHPIFGNIVDEVAYHEKYPTIYHLRKKLVDSTDKADLRLIYLALAHMIKFRGHFLIEGDLNPDNSDVDKLFIQLVQTYNQLFEENPINASGVDAKAILSARLSKSRRLENLIAQLPGEKKNGLFGNLIALSLGLTPNFKSNFDLAEDAKLQLSKDTYDDDLDNLLAQIGDQYADLFLAAKNLSDAILLSDILRVNTEITKAPLSASMIKRYDEHHQDLTLLKALVRQQLPEKYKEIFFDQSKNGYAGYIDGGASQEEFYKFIKPILEKMDGTEELLVKLNREDLLRKQRTFDNGSIPHQIHLGELHAILRRQEDFYPFLKDNREKIEKILTFRIPYYVGPLARGNSRFAWMTRKSEETITPWNFEEVVDKGASAQSFIERMTNFDKNLPNEKVLPKHSLLYEYFTVYNELTKVKYVTEGMRKPAFLSGEQKKAIVDLLFKTNRKVTVKQLKEDYFKKIECFDSVEISGVEDRFNASLGTYHDLLKIIKDKDFLDNEENEDILEDIVLTLTLFEDREMIEERLKTYAHLFDDKVMKQLKRRRYTGWGRLSRKLINGIRDKQSGKTILDFLKSDGFANRNFMQLIHDDSLTFKEDIQKAQVSGQGDSLHEHIANLAGSPAIKKGILQTVKVVDELVKVMGRHKPENIVIEMARENQTTQKGQKNSRERMKRIEEGIKELGSQILKEHPVENTQLQNEKLYLYYLQNGRDMYVDQELDINRLSDYDVDHIVPQSFLKDDSIDNKVLTRSDKARGKSDNVPSEEVVKKMKNYWRQLLNAKLITQRKFDNLTKAERGGLSELDKAGFIKRQLVETRQITKHVAQILDSRMNTKYDENDKLIREVKVITLKSKLVSDFRKDFQFYKVREINNYHHAHDAYLNAVVGTALIKKYPKLESEFVYGDYKVYDVRKMIAKSEQEIGKATAKYFFYSNIMNFFKTEITLANGEIRKRPLIETNGETGEIVWDKGRDFATVRKVLSMPQVNIVKKTEVQTGGFSKESILPKRNSDKLIARKKDWDPKKYGGFDSPTVAYSVLVVAKVEKGKSKKLKSVKELLGITIMERSSFEKNPIDFLEAKGYKEVKKDLIIKLPKYSLFELENGRKRMLASAGELQKGNELALPSKYVNFLYLASHYEKLKGSPEDNEQKQLFVEQHKHYLDEIIEQISEFSKRVILADANLDKVLSAYNKHRDKPIREQAENIIHLFTLTNLGAPAAFKYFDTTIDRKRYTSTKEVLDATLIHQSITGLYETRIDLSQLGGDGGGGGGGSGSSGGVLNLEEEYRLHEKPVPSSIDPSWLQLFPTVWAERAGMGLANQVPPVVVELRSGASPVAVRQYPMSKEAREGIRPHIQRFLDLGVLVPCQSPWNTPLLPVKKPGTNDYRPVQDLREINKRVQDIHPTVPNPYNLLSSLPPSHTWYSVLDLKDAFFCLKLHPNSQPLFAFEWRDPEKGNTGQLTWTRLPQGFKNSPTLFNEALHRDLAPFRALNPQVVLLQYVDDLLVAAPTYRDCKEGTQKLLQELSKLGYRVSAKKAQLCQKEVTYLGYLLKEGKRWLTPARKATVMKIPPPTTPRQVREFLGTAGFCRLWIPGFASLAAPLYPLTKPSIPFIWTEEHQKAFDRIKEALLSAPALALPDLTKPFTLYVDERAGVARGVLTQTLGPWRRPVAYLSKKLDPVASGWPTCLKAVAAVALLLKDADKLTLGQNVTVIASHSLESIVRQPPDRWMTNARMTHYQSLLLNERVSFAPPAVLNPATLLPVESEATPVHRCSEILAEETGTRRDLKDQPLPGVPAWYTDGSSFIAEGKRRAGAAIVDGKRTVWASSLPEGTSAQKAELVALTQALRLAEGKDINIYTDSRYAFATAHIHGAIYKQRGWLTSAGKDIKNKEEILALLEAIHLPKRVAIIHCPGHQKGNDPVATGNRRADEAAKQAALSTRVLAETTKPAGKRTADGSEFEKRTADGSEFESPKKKAKVE

SEQ ID NO: 6840 - protein, 2096 aa, synthetic construct
MPAAKRVKLDGGDKKYSIGLDIGTNSVGWAVITDEYKVPSKKFKVLGNTDRHSIKKNLIGALLFDSGETAEATRLKRTARRRYTRRKNRICYLQEIFSNEMAKVDDSFFHRLEESFLVEEDKKHERHPIFGNIVDEVAYHEKYPTIYHLRKKLVDSTDKADLRLIYLALAHMIKFRGHFLIEGDLNPDNSDVDKLFIQLVQTYNQLFEENPINASGVDAKAILSARLSKSRRLENLIAQLPGEKKNGLFGNLIALSLGLTPNFKSNFDLAEDAKLQLSKDTYDDDLDNLLAQIGDQYADLFLAAKNLSDAILLSDILRVNTEITKAPLSASMIKRYDEHHQDLTLLKALVRQQLPEKYKEIFFDQSKNGYAGYIDGGASQEEFYKFIKPILEKMDGTEELLVKLNREDLLRKQRTFDNGSIPHQIHLGELHAILRRQEDFYPFLKDNREKIEKILTFRIPYYVGPLARGNSRFAWMTRKSEETITPWNFEEVVDKGASAQSFIERMTNFDKNLPNEKVLPKHSLLYEYFTVYNELTKVKYVTEGMRKPAFLSGEQKKAIVDLLFKTNRKVTVKQLKEDYFKKIECFDSVEISGVEDRFNASLGTYHDLLKIIKDKDFLDNEENEDILEDIVLTLTLFEDREMIEERLKTYAHLFDDKVMKQLKRRRYTGWGRLSRKLINGIRDKQSGKTILDFLKSDGFANRNFMQLIHDDSLTFKEDIQKAQVSGQGDSLHEHIANLAGSPAIKKGILQTVKVVDELVKVMGRHKPENIVIEMARENQTTQKGQKNSRERMKRIEEGIKELGSQILKEHPVENTQLQNEKLYLYYLQNGRDMYVDQELDINRLSDYDVDHIVPQSFLKDDSIDNKVLTRSDKARGKSDNVPSEEVVKKMKNYWRQLLNAKLITQRKFDNLTKAERGGLSELDKAGFIKRQLVETRQITKHVAQILDSRMNTKYDENDKLIREVKVITLKSKLVSDFRKDFQFYKVREINNYHHAHDAYLNAVVGTALIKKYPKLESEFVYGDYKVYDVRKMIAKSEQEIGKATAKYFFYSNIMNFFKTEITLANGEIRKRPLIETNGETGEIVWDKGRDFATVRKVLSMPQVNIVKKTEVQTGGFSKESILPKRNSDKLIARKKDWDPKKYGGFDSPTVAYSVLVVAKVEKGKSKKLKSVKELLGITIMERSSFEKNPIDFLEAKGYKEVKKDLIIKLPKYSLFELENGRKRMLASAGELQKGNELALPSKYVNFLYLASHYEKLKGSPEDNEQKQLFVEQHKHYLDEIIEQISEFSKRVILADANLDKVLSAYNKHRDKPIREQAENIIHLFTLTNLGAPAAFKYFDTTIDRKRYTSTKEVLDATLIHQSITGLYETRIDLSQLGGDGGGGGGSSGGSGGTAPLEEEYRLFLEAPIQNVTLLEQWKREIPKVWAEINPPGLASTQAPIHVQLLSTALPVRVRQYPITLEAKRSLRETIRKFRAAGILRPVHSPWNTPLLPVRKSGTSEYRMVQDLREVNKRVETIHPTVPNPYTLLSLLPPDRIWYSVLDLKDAFFCIPLAPESQLIFAFEWADAEEGESGQLTWTRLPQGFKNSPTLFDEALNRDLQGFRLDHPSVSLLQYVDDLLIAADTQAACLSATRDLLMTLAELGYRVSGKKAQLCQEEVTYLGFKIHKGSRSLSNSRTQAILQIPVPKTKRQVREFLGTIGYCRLWIPGFAELAQPLYAATRGGNDPLVWGEKEEEAFQSLKLALTQPPALALPSLDKPFQLFVEETSGAAKGVLTQALGPWKRPVAYLSKRLDPVAAGWPRCLRAIAAAALLTREASKLTFGQDIEITSSHNLESLLRSPPDKWLTNARITQYQVLLLDPPRVRFKQTAALNPATLLPETDDTLPIHHCLDTLDSLTSTRPDLTDQPLAQAEATLFTDGSSYIRDGKRYAGAAVVTLDSVIWAEPLPIGTSAQKAELIALTKALEWSKDKSVNIYTDSRYAFATLHVHGMIYRERGLLTAGGKAIKNAPEILALLTAVWLPKRVAVMHCKGHQKDDAPTSTGNRRADEVAREVAIRPLSTQATISAGKRTADGSEFEKRTADGSEFESPKKKAKVE

SEQ ID NO: 6841 - protein, 2096 aa, synthetic construct
MPAAKRVKLDGGDKKYSIGLDIGTNSVGWAVITDEYKVPSKKFKVLGNTDRHSIKKNLIGALLFDSGETAEATRLKRTARRRYTRRKNRICYLQEIFSNEMAKVDDSFFHRLEESFLVEEDKKHERHPIFGNIVDEVAYHEKYPTIYHLRKKLVDSTDKADLRLIYLALAHMIKFRGHFLIEGDLNPDNSDVDKLFIQLVQTYNQLFEENPINASGVDAKAILSARLSKSRRLENLIAQLPGEKKNGLFGNLIALSLGLTPNFKSNFDLAEDAKLQLSKDTYDDDLDNLLAQIGDQYADLFLAAKNLSDAILLSDILRVNTEITKAPLSASMIKRYDEHHQDLTLLKALVRQQLPEKYKEIFFDQSKNGYAGYIDGGASQEEFYKFIKPILEKMDGTEELLVKLNREDLLRKQRTFDNGSIPHQIHLGELHAILRRQEDFYPFLKDNREKIEKILTFRIPYYVGPLARGNSRFAWMTRKSEETITPWNFEEVVDKGASAQSFIERMTNFDKNLPNEKVLPKHSLLYEYFTVYNELTKVKYVTEGMRKPAFLSGEQKKAIVDLLFKTNRKVTVKQLKEDYFKKIECFDSVEISGVEDRFNASLGTYHDLLKIIKDKDFLDNEENEDILEDIVLTLTLFEDREMIEERLKTYAHLFDDKVMKQLKRRRYTGWGRLSRKLINGIRDKQSGKTILDFLKSDGFANRNFMQLIHDDSLTFKEDIQKAQVSGQGDSLHEHIANLAGSPAIKKGILQTVKVVDELVKVMGRHKPENIVIEMARENQTTQKGQKNSRERMKRIEEGIKELGSQILKEHPVENTQLQNEKLYLYYLQNGRDMYVDQELDINRLSDYDVDHIVPQSFLKDDSIDNKVLTRSDKARGKSDNVPSEEVVKKMKNYWRQLLNAKLITQRKFDNLTKAERGGLSELDKAGFIKRQLVETRQITKHVAQILDSRMNTKYDENDKLIREVKVITLKSKLVSDFRKDFQFYKVREINNYHHAHDAYLNAVVGTALIKKYPKLESEFVYGDYKVYDVRKMIAKSEQEIGKATAKYFFYSNIMNFFKTEITLANGEIRKRPLIETNGETGEIVWDKGRDFATVRKVLSMPQVNIVKKTEVQTGGFSKESILPKRNSDKLIARKKDWDPKKYGGFDSPTVAYSVLVVAKVEKGKSKKLKSVKELLGITIMERSSFEKNPIDFLEAKGYKEVKKDLIIKLPKYSLFELENGRKRMLASAGELQKGNELALPSKYVNFLYLASHYEKLKGSPEDNEQKQLFVEQHKHYLDEIIEQISEFSKRVILADANLDKVLSAYNKHRDKPIREQAENIIHLFTLTNLGAPAAFKYFDTTIDRKRYTSTKEVLDATLIHQSITGLYETRIDLSQLGGDGGGGGGSSGGSGGTAPLEEEYRLFLEAPIQNVTLLEQWKREIPKVWAEINPPGLASTQAPIHVQLLSTALPVRVRQYPITLEAKRSLRETIRKFRAAGILRPVHSPWNTPLLPVRKSGTSEYRMVQDLREVNKRVETIHPTVPNPYTLLSLLPPDRIWYSVLDLKDAFFCIPLAPESQLIFAFEWADAEEGESGQLTWTRLPQGFKNSPTLFNEALNRDLQGFRLDHPSVSLLQYVDDLLIAADTQAACLSATRDLLMTLAELGYRVSGKKAQLCQEEVTYLGFKIHKGSRSLSNSRTQAILQIPVPKTKRQVREFLGTIGYCRLWIPGFAELAQPLYAATRPGNDPLVWGEKEEEAFQSLKLALTQPPALALPSLDKPFQLFVEETSGAAKGVLTQALGPWKRPVAYLSKRLDPVAAGWPRCLRAIAAAALLTREASKLTFGQDIEITSSHNLESLLRSPPDKWLTNARITQYQVLLLDPPRVRFKQTAALNPATLLPETDDTLPIHHCLDTLDSLTSTRPDLTDQPLAQAEATLFTDGSSYIRDGKRYAGAAVVTLDSVIWAEPLPIGTSAQKAELIALTKALEWSKDKSVNIYTDSRYAFATLHVHGMIYRERGWLTAGGKAIKNAPEILALLTAVWLPKRVAVMHCKGHQKDDAPTSTGNRRADEVAREVAIRPLSTQATISAGKRTADGSEFEKRTADGSEFESPKKKAKVE

SEQ ID NO: 6842 - protein, 2100 aa, synthetic construct
MPAAKRVKLDGGDKKYSIGLDIGTNSVGWAVITDEYKVPSKKFKVLGNTDRHSIKKNLIGALLFDSGETAEATRLKRTARRRYTRRKNRICYLQEIFSNEMAKVDDSFFHRLEESFLVEEDKKHERHPIFGNIVDEVAYHEKYPTIYHLRKKLVDSTDKADLRLIYLALAHMIKFRGHFLIEGDLNPDNSDVDKLFIQLVQTYNQLFEENPINASGVDAKAILSARLSKSRRLENLIAQLPGEKKNGLFGNLIALSLGLTPNFKSNFDLAEDAKLQLSKDTYDDDLDNLLAQIGDQYADLFLAAKNLSDAILLSDILRVNTEITKAPLSASMIKRYDEHHQDLTLLKALVRQQLPEKYKEIFFDQSKNGYAGYIDGGASQEEFYKFIKPILEKMDGTEELLVKLNREDLLRKQRTFDNGSIPHQIHLGELHAILRRQEDFYPFLKDNREKIEKILTFRIPYYVGPLARGNSRFAWMTRKSEETITPWNFEEVVDKGASAQSFIERMTNFDKNLPNEKVLPKHSLLYEYFTVYNELTKVKYVTEGMRKPAFLSGEQKKAIVDLLFKTNRKVTVKQLKEDYFKKIECFDSVEISGVEDRFNASLGTYHDLLKIIKDKDFLDNEENEDILEDIVLTLTLFEDREMIEERLKTYAHLFDDKVMKQLKRRRYTGWGRLSRKLINGIRDKQSGKTILDFLKSDGFANRNFMQLIHDDSLTFKEDIQKAQVSGQGDSLHEHIANLAGSPAIKKGILQTVKVVDELVKVMGRHKPENIVIEMARENQTTQKGQKNSRERMKRIEEGIKELGSQILKEHPVENTQLQNEKLYLYYLQNGRDMYVDQELDINRLSDYDVDHIVPQSFLKDDSIDNKVLTRSDKARGKSDNVPSEEVVKKMKNYWRQLLNAKLITQRKFDNLTKAERGGLSELDKAGFIKRQLVETRQITKHVAQILDSRMNTKYDENDKLIREVKVITLKSKLVSDFRKDFQFYKVREINNYHHAHDAYLNAVVGTALIKKYPKLESEFVYGDYKVYDVRKMIAKSEQEIGKATAKYFFYSNIMNFFKTEITLANGEIRKRPLIETNGETGEIVWDKGRDFATVRKVLSMPQVNIVKKTEVQTGGFSKESILPKRNSDKLIARKKDWDPKKYGGFDSPTVAYSVLVVAKVEKGKSKKLKSVKELLGITIMERSSFEKNPIDFLEAKGYKEVKKDLIIKLPKYSLFELENGRKRMLASAGELQKGNELALPSKYVNFLYLASHYEKLKGSPEDNEQKQLFVEQHKHYLDEIIEQISEFSKRVILADANLDKVLSAYNKHRDKPIREQAENIIHLFTLTNLGAPAAFKYFDTTIDRKRYTSTKEVLDATLIHQSITGLYETRIDLSQLGGDGGGGGGSSGGSGGTVSLQDEHRLFDIPVTTSLPDVWLQDFPQAWAETGGLGRAKCQAPIIIDLKPTAVPVSIKQYPMSLEAHMGIRQHIIKFLELGVLRPCRSPWNTPLLPVKKPGTQDYRPVQDLREINKRTVDIHPTVPNPYNLLSTLKPDYSWYTVLDLKDAFFCLPLAPQSQELFAFEWKDPERGISGQLTWTRLPQGFKNSPTLFNEALHRDLTDFRTQHPEVTLLQYVDDLLLAAPTKKACTQGTRHLLQELGEKGYRASAKKAQICQTKVTYLGYILSEGKRWLTPGRIETVARIPPPRNPREVREFLGTAGFCRLWIPGFAELAAPLYALTKPSTPFTWQTEHQLAFEALKKALLSAPALGLPDTSKPFTLFLDERQGIAKGVLTQKLGPWKRPVAYLSKKLDPVAAGWPPCLRIMAATAMLVKDSAKLTLGQPLTVITPHTLEAIVRQPPDRWITNARLTHYQALLLDTDRVQFGPPVTLNPATLLPVPENQPSPHDCRQVLAETHGTREDLKDQELPDADHTWYTDGSSYLDSGTRRAGAAVVDGHNTIWAQSLPPGTSAQKAELIALTKALELSKGKKANIYTDSRYAFATAHTHGSIYERRGWLTSEGKEIKNKAEIIALLKALFLPQEVAIIHCPGHQKGQDPVAVGNRQADRVARQAAMAEVLTLATEPDNTSHITAGKRTADGSEFEKRTADGSEFESPKKKAKVE

SEQ ID NO: 6843 - protein, 2085 aa, synthetic construct
MPAAKRVKLDGGDKKYSIGLDIGTNSVGWAVITDEYKVPSKKFKVLGNTDRHSIKKNLIGALLFDSGETAEATRLKRTARRRYTRRKNRICYLQEIFSNEMAKVDDSFFHRLEESFLVEEDKKHERHPIFGNIVDEVAYHEKYPTIYHLRKKLVDSTDKADLRLIYLALAHMIKFRGHFLIEGDLNPDNSDVDKLFIQLVQTYNQLFEENPINASGVDAKAILSARLSKSRRLENLIAQLPGEKKNGLFGNLIALSLGLTPNFKSNFDLAEDAKLQLSKDTYDDDLDNLLAQIGDQYADLFLAAKNLSDAILLSDILRVNTEITKAPLSASMIKRYDEHHQDLTLLKALVRQQLPEKYKEIFFDQSKNGYAGYIDGGASQEEFYKFIKPILEKMDGTEELLVKLNREDLLRKQRTFDNGSIPHQIHLGELHAILRRQEDFYPFLKDNREKIEKILTFRIPYYVGPLARGNSRFAWMTRKSEETITPWNFEEVVDKGASAQSFIERMTNFDKNLPNEKVLPKHSLLYEYFTVYNELTKVKYVTEGMRKPAFLSGEQKKAIVDLLFKTNRKVTVKQLKEDYFKKIECFDSVEISGVEDRFNASLGTYHDLLKIIKDKDFLDNEENEDILEDIVLTLTLFEDREMIEERLKTYAHLFDDKVMKQLKRRRYTGWGRLSRKLINGIRDKQSGKTILDFLKSDGFANRNFMQLIHDDSLTFKEDIQKAQVSGQGDSLHEHIANLAGSPAIKKGILQTVKVVDELVKVMGRHKPENIVIEMARENQTTQKGQKNSRERMKRIEEGIKELGSQILKEHPVENTQLQNEKLYLYYLQNGRDMYVDQELDINRLSDYDVDHIVPQSFLKDDSIDNKVLTRSDKARGKSDNVPSEEVVKKMKNYWRQLLNAKLITQRKFDNLTKAERGGLSELDKAGFIKRQLVETRQITKHVAQILDSRMNTKYDENDKLIREVKVITLKSKLVSDFRKDFQFYKVREINNYHHAHDAYLNAVVGTALIKKYPKLESEFVYGDYKVYDVRKMIAKSEQEIGKATAKYFFYSNIMNFFKTEITLANGEIRKRPLIETNGETGEIVWDKGRDFATVRKVLSMPQVNIVKKTEVQTGGFSKESILPKRNSDKLIARKKDWDPKKYGGFDSPTVAYSVLVVAKVEKGKSKKLKSVKELLGITIMERSSFEKNPIDFLEAKGYKEVKKDLIIKLPKYSLFELENGRKRMLASAGELQKGNELALPSKYVNFLYLASHYEKLKGSPEDNEQKQLFVEQHKHYLDEIIEQISEFSKRVILADANLDKVLSAYNKHRDKPIREQAENIIHLFTLTNLGAPAAFKYFDTTIDRKRYTSTKEVLDATLIHQSITGLYETRIDLSQLGGDGGGGGGSSGGSGGVPWILKKPLELTIKLDLEEQQGTLLNNSILSKKGKEELKQLFEKYSALWQSWENQVGHRRIRPHKIATGTVKPTPQKQYHINPKAKPDIQIVINDLLKQGVLIQKESTMNTPVYPVPKPNGRWRMVLDYRAVNKVTPLIAVQNQHSYGILGSLFKGRYKTTIDLSNGFWAHPIVPEDYWITAFTWQGKQYCWTVLPQGFLNSPGLFTGDVVDLLQGIPNVEVYVDDVYISHDSEKEHLEYLDILFNRLKEAGYIISLKKSNIANSIVDFLGFQITNEGRGLTDTFKEKLENITAPTTLKQLQSILGLLNFARNFIPDFTELIAPLYALIPKSTKNYVPWQIEHSTTLETLITKLNGAEYLQGRKGDKTLIMKVNASYTTGYIRYYNEGEKKPISYVSIVFSKTELKFTELEKLLTTVHKGLLKALDLSMGQNIHVYSPIVSMQNIQKTPQTAKKALASRWLSWLSYLEDPRIRFFYDPQMPALKDLPAVDTGKDNKKHPSNFQHIFYTDGSAITSPTKEGHLNAGMGIVYFINKDGNLQKQQEWSISLGNHTAQFAEIAAFEFALKKCLPLGGNILVVTDSNYVAKAYNEELDVWASNGFVNNRKKPLKHISKWKSVADLKRLRPDVVVTHEPGHQKLDSSPHAYGNNLADQLATQASFKVHAGKRTADGSEFEKRTADGSEFESPKKKAKVE

SEQ ID NO: 6844 - protein, 2093 aa, synthetic construct
MPAAKRVKLDGGDKKYSIGLDIGTNSVGWAVITDEYKVPSKKFKVLGNTDRHSIKKNLIGALLFDSGETAEATRLKRTARRRYTRRKNRICYLQEIFSNEMAKVDDSFFHRLEESFLVEEDKKHERHPIFGNIVDEVAYHEKYPTIYHLRKKLVDSTDKADLRLIYLALAHMIKFRGHFLIEGDLNPDNSDVDKLFIQLVQTYNQLFEENPINASGVDAKAILSARLSKSRRLENLIAQLPGEKKNGLFGNLIALSLGLTPNFKSNFDLAEDAKLQLSKDTYDDDLDNLLAQIGDQYADLFLAAKNLSDAILLSDILRVNTEITKAPLSASMIKRYDEHHQDLTLLKALVRQQLPEKYKEIFFDQSKNGYAGYIDGGASQEEFYKFIKPILEKMDGTEELLVKLNREDLLRKQRTFDNGSIPHQIHLGELHAILRRQEDFYPFLKDNREKIEKILTFRIPYYVGPLARGNSRFAWMTRKSEETITPWNFEEVVDKGASAQSFIERMTNFDKNLPNEKVLPKHSLLYEYFTVYNELTKVKYVTEGMRKPAFLSGEQKKAIVDLLFKTNRKVTVKQLKEDYFKKIECFDSVEISGVEDRFNASLGTYHDLLKIIKDKDFLDNEENEDILEDIVLTLTLFEDREMIEERLKTYAHLFDDKVMKQLKRRRYTGWGRLSRKLINGIRDKQSGKTILDFLKSDGFANRNFMQLIHDDSLTFKEDIQKAQVSGQGDSLHEHIANLAGSPAIKKGILQTVKVVDELVKVMGRHKPENIVIEMARENQTTQKGQKNSRERMKRIEEGIKELGSQILKEHPVENTQLQNEKLYLYYLQNGRDMYVDQELDINRLSDYDVDHIVPQSFLKDDSIDNKVLTRSDKARGKSDNVPSEEVVKKMKNYWRQLLNAKLITQRKFDNLTKAERGGLSELDKAGFIKRQLVETRQITKHVAQILDSRMNTKYDENDKLIREVKVITLKSKLVSDFRKDFQFYKVREINNYHHAHDAYLNAVVGTALIKKYPKLESEFVYGDYKVYDVRKMIAKSEQEIGKATAKYFFYSNIMNFFKTEITLANGEIRKRPLIETNGETGEIVWDKGRDFATVRKVLSMPQVNIVKKTEVQTGGFSKESILPKRNSDKLIARKKDWDPKKYGGFDSPTVAYSVLVVAKVEKGKSKKLKSVKELLGITIMERSSFEKNPIDFLEAKGYKEVKKDLIIKLPKYSLFELENGRKRMLASAGELQKGNELALPSKYVNFLYLASHYEKLKGSPEDNEQKQLFVEQHKHYLDEIIEQISEFSKRVILADANLDKVLSAYNKHRDKPIREQAENIIHLFTLTNLGAPAAFKYFDTTIDRKRYTSTKEVLDATLIHQSITGLYETRIDLSQLGGDGGGGGGSSGGSGGTLQLEEEYRLFEPESTQKQEMDIWLKNFPQAWAETGGMGTAHCQAPVLIQLKATATPISIRQYPMPHEAYQGIKPHIRRMLDQGILKPCQSPWNTPLLPVKKPGTEDYRPVQDLREVNKRVEDIHPTVPNPYNLLSTLPPSHPWYTVLDLKDAFFCLRLHSESQLLFAFEWRDPEIGLSGQLTWTRLPQGFKNSPTLFNEALHSDLADFRVRYPALVLLQYVDDLLLAAATRTECLEGTKALLETLGNKGYRASAKKAQICLQEVTYLGYSLKDGQRWLTKARKEAILSIPVPKNSRQVREFLGTAGYCRLWIPGFAELAAPLYPLTRPGTLFQWGTEQQLAFEDIKKALLSSPALGLPDITKPFELFIDENSGFAKGVLVQKLGPWKRPVAYLSKKLDTVASGWPPCLRMVAAIAILVKDAGKLTLGQPLTILTSHPVEALVRQPPNKWLSNARMTHYQAMLLDAERVHFGPTVSLNPATLLPLPSGGNHHDCLQILAETHGTRPDLTDQPLPDADLTWYTDGSSFIRNGEREAGAAVTTESEVIWAAPLPPGTSAQRAELIALTQALKMAEGKKLTVYTDSRYAFATTHVHGEIYRRRGWLTSEGKEIKNKNEILALLEALFLPKRLSIIHCPGHQKGDSPQAKGNRLADDTAKKAATETHSSLTVLPAGKRTADGSEFEKRTADGSEFESPKKKAKVE

SEQ ID NO: 6845 - protein, 2125 aa, synthetic construct
MPAAKRVKLDGGDKKYSIGLDIGTNSVGWAVITDEYKVPSKKFKVLGNTDRHSIKKNLIGALLFDSGETAEATRLKRTARRRYTRRKNRICYLQEIFSNEMAKVDDSFFHRLEESFLVEEDKKHERHPIFGNIVDEVAYHEKYPTIYHLRKKLVDSTDKADLRLIYLALAHMIKFRGHFLIEGDLNPDNSDVDKLFIQLVQTYNQLFEENPINASGVDAKAILSARLSKSRRLENLIAQLPGEKKNGLFGNLIALSLGLTPNFKSNFDLAEDAKLQLSKDTYDDDLDNLLAQIGDQYADLFLAAKNLSDAILLSDILRVNTEITKAPLSASMIKRYDEHHQDLTLLKALVRQQLPEKYKEIFFDQSKNGYAGYIDGGASQEEFYKFIKPILEKMDGTEELLVKLNREDLLRKQRTFDNGSIPHQIHLGELHAILRRQEDFYPFLKDNREKIEKILTFRIPYYVGPLARGNSRFAWMTRKSEETITPWNFEEVVDKGASAQSFIERMTNFDKNLPNEKVLPKHSLLYEYFTVYNELTKVKYVTEGMRKPAFLSGEQKKAIVDLLFKTNRKVTVKQLKEDYFKKIECFDSVEISGVEDRFNASLGTYHDLLKIIKDKDFLDNEENEDILEDIVLTLTLFEDREMIEERLKTYAHLFDDKVMKQLKRRRYTGWGRLSRKLINGIRDKQSGKTILDFLKSDGFANRNFMQLIHDDSLTFKEDIQKAQVSGQGDSLHEHIANLAGSPAIKKGILQTVKVVDELVKVMGRHKPENIVIEMARENQTTQKGQKNSRERMKRIEEGIKELGSQILKEHPVENTQLQNEKLYLYYLQNGRDMYVDQELDINRLSDYDVDHIVPQSFLKDDSIDNKVLTRSDKARGKSDNVPSEEVVKKMKNYWRQLLNAKLITQRKFDNLTKAERGGLSELDKAGFIKRQLVETRQITKHVAQILDSRMNTKYDENDKLIREVKVITLKSKLVSDFRKDFQFYKVREINNYHHAHDAYLNAVVGTALIKKYPKLESEFVYGDYKVYDVRKMIAKSEQEIGKATAKYFFYSNIMNFFKTEITLANGEIRKRPLIETNGETGEIVWDKGRDFATVRKVLSMPQVNIVKKTEVQTGGFSKESILPKRNSDKLIARKKDWDPKKYGGFDSPTVAYSVLVVAKVEKGKSKKLKSVKELLGITIMERSSFEKNPIDFLEAKGYKEVKKDLIIKLPKYSLFELENGRKRMLASAGELQKGNELALPSKYVNFLYLASHYEKLKGSPEDNEQKQLFVEQHKHYLDEIIEQISEFSKRVILADANLDKVLSAYNKHRDKPIREQAENIIHLFTLTNLGAPAAFKYFDTTIDRKRYTSTKEVLDATLIHQSITGLYETRIDLSQLGGDGGGGGGSSGGSGGLLGRDLLTKLKAQIQFSTEGPQVTWEDRPAMCLVLNLEEEYRLHEKPVPPSIDPSWLQLFPMVWAEKAGMGLANQVPPVVVELKSDASPVAVRQYPMSKEAREGIRPHIQRFLDLGILVPCQSPWNTPLLPVKKPGTNDYRPVQDLREVNKRVQDIHPTVPNPYNLLSSLPPSHTWYSVLDLKDAFFCLKLHPNSQPLFAFEWRDPEKGNTGQLTWTRLPQGFKNSPTLFNEALHRDLASFRALNPQVVMLQYVDDLLVAAPTYRDCKEGTRRLLQELSKLGYRVSAKKAQLCREEVTYLGYLLKGGKRWLTPARKATVMKIPTPTTPRQVREFLGTAGFCRLWIPGFASLAAPLYPLTRPKVPFTWTEAHQEAFGRIKEALLSAPALALPDLTKPFALYVDEKEGVARGVLTQTLGPWRRPVAYLSKKLDPVASGWPTCLKAIAAVALLLKDADKLTLGQNVLVIAPHNLESIVRQPPDRWMTNARMTHYQSLLLNERVSFAPPAILNPATLLPVESDDTPIHICSEILAEETGTRPDLRDQPLPGVPAWYTDGSSFIMDGRRQAGAAIVDNKRTVWASNLPEGTSAQKAELIALTQALRLAEGKSINIYTDSRYAFATAHVHGAIYKQRGWLTSAGKDIKNKEEILALLEAIHLPKRVAIIHCPGHQRGTDPVATGNRKADEAAKQAAQSTRILTETTKNAGKRTADGSEFEKRTADGSEFESPKKKAKVE

SEQ ID NO: 6846 - protein, 2125 aa, synthetic construct
MPAAKRVKLDGGDKKYSIGLDIGTNSVGWAVITDEYKVPSKKFKVLGNTDRHSIKKNLIGALLFDSGETAEATRLKRTARRRYTRRKNRICYLQEIFSNEMAKVDDSFFHRLEESFLVEEDKKHERHPIFGNIVDEVAYHEKYPTIYHLRKKLVDSTDKADLRLIYLALAHMIKFRGHFLIEGDLNPDNSDVDKLFIQLVQTYNQLFEENPINASGVDAKAILSARLSKSRRLENLIAQLPGEKKNGLFGNLIALSLGLTPNFKSNFDLAEDAKLQLSKDTYDDDLDNLLAQIGDQYADLFLAAKNLSDAILLSDILRVNTEITKAPLSASMIKRYDEHHQDLTLLKALVRQQLPEKYKEIFFDQSKNGYAGYIDGGASQEEFYKFIKPILEKMDGTEELLVKLNREDLLRKQRTFDNGSIPHQIHLGELHAILRRQEDFYPFLKDNREKIEKILTFRIPYYVGPLARGNSRFAWMTRKSEETITPWNFEEVVDKGASAQSFIERMTNFDKNLPNEKVLPKHSLLYEYFTVYNELTKVKYVTEGMRKPAFLSGEQKKAIVDLLFKTNRKVTVKQLKEDYFKKIECFDSVEISGVEDRFNASLGTYHDLLKIIKDKDFLDNEENEDILEDIVLTLTLFEDREMIEERLKTYAHLFDDKVMKQLKRRRYTGWGRLSRKLINGIRDKQSGKTILDFLKSDGFANRNFMQLIHDDSLTFKEDIQKAQVSGQGDSLHEHIANLAGSPAIKKGILQTVKVVDELVKVMGRHKPENIVIEMARENQTTQKGQKNSRERMKRIEEGIKELGSQILKEHPVENTQLQNEKLYLYYLQNGRDMYVDQELDINRLSDYDVDHIVPQSFLKDDSIDNKVLTRSDKARGKSDNVPSEEVVKKMKNYWRQLLNAKLITQRKFDNLTKAERGGLSELDKAGFIKRQLVETRQITKHVAQILDSRMNTKYDENDKLIREVKVITLKSKLVSDFRKDFQFYKVREINNYHHAHDAYLNAVVGTALIKKYPKLESEFVYGDYKVYDVRKMIAKSEQEIGKATAKYFFYSNIMNFFKTEITLANGEIRKRPLIETNGETGEIVWDKGRDFATVRKVLSMPQVNIVKKTEVQTGGFSKESILPKRNSDKLIARKKDWDPKKYGGFDSPTVAYSVLVVAKVEKGKSKKLKSVKELLGITIMERSSFEKNPIDFLEAKGYKEVKKDLIIKLPKYSLFELENGRKRMLASAGELQKGNELALPSKYVNFLYLASHYEKLKGSPEDNEQKQLFVEQHKHYLDEIIEQISEFSKRVILADANLDKVLSAYNKHRDKPIREQAENIIHLFTLTNLGAPAAFKYFDTTIDRKRYTSTKEVLDATLIHQSITGLYETRIDLSQLGGDGGGGGGSSGGSGGLLGRDLLTKLKAQIQFSTEGPQVTWEDRPAMCLVLNLEEEYRLHEKPVPPSIDPSWLQLFPMVWAEKAGMGLANQVPPVVVELKSDASPVAVRQYPMSKEAREGIRPHIQRFLDLGILVPCQSPWNTPLLPVKKPGTNDYRPVQDLREVNKRVQDIHPTVPNPYNLLSSLPPSHTWYSVLDLKDAFFCLKLHPNSQPLFAFEWRDPEKGNTGQLTWTRLPQGFKNSPTLFNEALHRDLASFRALNPQVVMLQYVDDLLVAAPTYRDCKEGTRRLLQELSKLGYRVSAKKAQLCREEVTYLGYLLKGGKRWLTPARKATVMKIPTPTTPRQVREFLGKAGFCRLFIPGFASLAAPLYPLTRPKVPFTWTEAHQEAFGRIKEALLSAPALALPDLTKPFALYVDEKEGVARGVLTQTLGPWRRPVAYLSKKLDPVASGWPTCLKAIAAVALLLKDADKLTLGQNVLVIAPHNLESIVRQPPDRWMTNARMTHYQSLLLNERVSFAPPAILNPATLLPVESDDTPIHICSEILAEETGTRPDLRDQPLPGVPAWYTDGSSFIMDGRRQAGAAIVDNKRTVWASNLPEGTSAQKAELIALTQALRLAEGKSINIYTDSRYAFATAHVHGAIYKQRGWLTSAGKDIKNKEEILALLEAIHLPKRVAIIHCPGHQRGTDPVATGNRKADEAAKQAAQSTRILTETTKNAGKRTADGSEFEKRTADGSEFESPKKKAKVE

SEQ ID NO: 6847 - protein, 2216 aa, synthetic construct
MPAAKRVKLDGGDKKYSIGLDIGTNSVGWAVITDEYKVPSKKFKVLGNTDRHSIKKNLIGALLFDSGETAEATRLKRTARRRYTRRKNRICYLQEIFSNEMAKVDDSFFHRLEESFLVEEDKKHERHPIFGNIVDEVAYHEKYPTIYHLRKKLVDSTDKADLRLIYLALAHMIKFRGHFLIEGDLNPDNSDVDKLFIQLVQTYNQLFEENPINASGVDAKAILSARLSKSRRLENLIAQLPGEKKNGLFGNLIALSLGLTPNFKSNFDLAEDAKLQLSKDTYDDDLDNLLAQIGDQYADLFLAAKNLSDAILLSDILRVNTEITKAPLSASMIKRYDEHHQDLTLLKALVRQQLPEKYKEIFFDQSKNGYAGYIDGGASQEEFYKFIKPILEKMDGTEELLVKLNREDLLRKQRTFDNGSIPHQIHLGELHAILRRQEDFYPFLKDNREKIEKILTFRIPYYVGPLARGNSRFAWMTRKSEETITPWNFEEVVDKGASAQSFIERMTNFDKNLPNEKVLPKHSLLYEYFTVYNELTKVKYVTEGMRKPAFLSGEQKKAIVDLLFKTNRKVTVKQLKEDYFKKIECFDSVEISGVEDRFNASLGTYHDLLKIIKDKDFLDNEENEDILEDIVLTLTLFEDREMIEERLKTYAHLFDDKVMKQLKRRRYTGWGRLSRKLINGIRDKQSGKTILDFLKSDGFANRNFMQLIHDDSLTFKEDIQKAQVSGQGDSLHEHIANLAGSPAIKKGILQTVKVVDELVKVMGRHKPENIVIEMARENQTTQKGQKNSRERMKRIEEGIKELGSQILKEHPVENTQLQNEKLYLYYLQNGRDMYVDQELDINRLSDYDVDHIVPQSFLKDDSIDNKVLTRSDKARGKSDNVPSEEVVKKMKNYWRQLLNAKLITQRKFDNLTKAERGGLSELDKAGFIKRQLVETRQITKHVAQILDSRMNTKYDENDKLIREVKVITLKSKLVSDFRKDFQFYKVREINNYHHAHDAYLNAVVGTALIKKYPKLESEFVYGDYKVYDVRKMIAKSEQEIGKATAKYFFYSNIMNFFKTEITLANGEIRKRPLIETNGETGEIVWDKGRDFATVRKVLSMPQVNIVKKTEVQTGGFSKESILPKRNSDKLIARKKDWDPKKYGGFDSPTVAYSVLVVAKVEKGKSKKLKSVKELLGITIMERSSFEKNPIDFLEAKGYKEVKKDLIIKLPKYSLFELENGRKRMLASAGELQKGNELALPSKYVNFLYLASHYEKLKGSPEDNEQKQLFVEQHKHYLDEIIEQISEFSKRVILADANLDKVLSAYNKHRDKPIREQAENIIHLFTLTNLGAPAAFKYFDTTIDRKRYTSTKEVLDATLIHQSITGLYETRIDLSQLGGDGGGGGGSSGGSGGTLGDQGSRGSDPLPEPRVTLTVEGIPTEFLVNTGAEHSVLTKPMGKMGSKRTVVAGATGSKVYPWTTKRLLKIGQKQVTHSFLVIPECPAPLLGRDLLTKLKAQIQFSTEGPQVTWEDRPAMCLVLNLEEEYRLHEKPVPPSIDPSWLQLFPMVWAEKAGMGLANQVPPVVVELKSDASPVAVRQYPMSKEAREGIRPHIQRFLDLGILVPCQSPWNTPLLPVKKPGTNDYRPVQDLREVNKRVQDIHPTVPNPYNLLSSLPPSHTWYSVLDLKDAFFCLKLHPNSQPLFAFEWRDPEKGNTGQLTWTRLPQGFKNSPTLFNEALHRDLASFRALNPQVVMLQYVDDLLVAAPTYRDCKEGTRRLLQELSKLGYRVSAKKAQLCREEVTYLGYLLKGGKRWLTPARKATVMKIPTPTTPRQVREFLGKAGFCRLFIPGFASLAAPLYPLTRPKVPFTWTEAHQEAFGRIKEALLSAPALALPDLTKPFALYVDEKEGVARGVLTQTLGPWRRPVAYLSKKLDPVASGWPTCLKAIAAVALLLKDADKLTLGQNVLVIAPHNLESIVRQPPDRWMTNARMTHYQSLLLNERVSFAPPAILNPATLLPVESDDTPIHICSEILAEETGTRPDLRDQPLPGVPAWYTDGSSFIMDGRRQAGAAIVDNKRTVWASNLPEGTSAQKAELIALTQALRLAEGKSINIYTDSRYAFATAHVHGAIYKQRGWLTSAGKDIKNKEEILALLEAIHLPKRVAIIHCPGHQRGTDPVATGNRKADEAAKQAAQSTRILTETTKNAGKRTADGSEFEKRTADGSEFESPKKKAKVE

SEQ ID NO: 6848 - protein, 2094 aa, synthetic construct
MPAAKRVKLDGGDKKYSIGLDIGTNSVGWAVITDEYKVPSKKFKVLGNTDRHSIKKNLIGALLFDSGETAEATRLKRTARRRYTRRKNRICYLQEIFSNEMAKVDDSFFHRLEESFLVEEDKKHERHPIFGNIVDEVAYHEKYPTIYHLRKKLVDSTDKADLRLIYLALAHMIKFRGHFLIEGDLNPDNSDVDKLFIQLVQTYNQLFEENPINASGVDAKAILSARLSKSRRLENLIAQLPGEKKNGLFGNLIALSLGLTPNFKSNFDLAEDAKLQLSKDTYDDDLDNLLAQIGDQYADLFLAAKNLSDAILLSDILRVNTEITKAPLSASMIKRYDEHHQDLTLLKALVRQQLPEKYKEIFFDQSKNGYAGYIDGGASQEEFYKFIKPILEKMDGTEELLVKLNREDLLRKQRTFDNGSIPHQIHLGELHAILRRQEDFYPFLKDNREKIEKILTFRIPYYVGPLARGNSRFAWMTRKSEETITPWNFEEVVDKGASAQSFIERMTNFDKNLPNEKVLPKHSLLYEYFTVYNELTKVKYVTEGMRKPAFLSGEQKKAIVDLLFKTNRKVTVKQLKEDYFKKIECFDSVEISGVEDRFNASLGTYHDLLKIIKDKDFLDNEENEDILEDIVLTLTLFEDREMIEERLKTYAHLFDDKVMKQLKRRRYTGWGRLSRKLINGIRDKQSGKTILDFLKSDGFANRNFMQLIHDDSLTFKEDIQKAQVSGQGDSLHEHIANLAGSPAIKKGILQTVKVVDELVKVMGRHKPENIVIEMARENQTTQKGQKNSRERMKRIEEGIKELGSQILKEHPVENTQLQNEKLYLYYLQNGRDMYVDQELDINRLSDYDVDHIVPQSFLKDDSIDNKVLTRSDKARGKSDNVPSEEVVKKMKNYWRQLLNAKLITQRKFDNLTKAERGGLSELDKAGFIKRQLVETRQITKHVAQILDSRMNTKYDENDKLIREVKVITLKSKLVSDFRKDFQFYKVREINNYHHAHDAYLNAVVGTALIKKYPKLESEFVYGDYKVYDVRKMIAKSEQEIGKATAKYFFYSNIMNFFKTEITLANGEIRKRPLIETNGETGEIVWDKGRDFATVRKVLSMPQVNIVKKTEVQTGGFSKESILPKRNSDKLIARKKDWDPKKYGGFDSPTVAYSVLVVAKVEKGKSKKLKSVKELLGITIMERSSFEKNPIDFLEAKGYKEVKKDLIIKLPKYSLFELENGRKRMLASAGELQKGNELALPSKYVNFLYLASHYEKLKGSPEDNEQKQLFVEQHKHYLDEIIEQISEFSKRVILADANLDKVLSAYNKHRDKPIREQAENIIHLFTLTNLGAPAAFKYFDTTIDRKRYTSTKEVLDATLIHQSITGLYETRIDLSQLGGDGGGGGGSSGGSGGTLGIEDEYRLHETSTEPDVSLGSTWLSDFPQAWAETGGMGLAVRQAPLIIPLKATSTPVSIQQYPMSHEARLGIKPHIQRLLDQGILVPCQSPWNTPLLPVKKPGTNDYRPVQDLREVNKRVEDIHPTVPNPYNLLSGLPPSHQWYTVLDLKDAFFCLRLHPTSQPLFAFEWRDPGMGISGQLTWTRLPQGFKNSPTLFNEALHRDLADFRIQHPDLILLQYVDDILLAATSELDCQQGTRALLQTLGDLGYRASAKKAQICQKQVKYLGYLLREGQRWLTEARKETVMGQPVPKTPRQLREFLGTAGFCRLWIPGFAEMAAPLYPLTKPGTLFSWGPDQQKAYQEIKQALLTAPALGLPDLTKPFELFVDEKQGYAKGVLTQKLGPWRRPVAYLSKKLDPVAAGWPPCLRMVAAIAVLTKDAGKLTMGQPLVILAPHAVEALVKQPPDRWLSNARMTHYQAMLLDTDRVQFGPVVALNPATLLPLPEEGAPHDCLEILAETHGTRPDLTDQPIPDADHTWYTDGSSFLQEGQRKAGAAVTTETEVIWAGALPAGTSAQRAELIALTQALKMAEGKRLNVYTDSRYAFATAHIHGEIYRRRGWLTSEGREIKNKSEILALLKALFLPKRLSIIHCLGHQKGDSAEARGNRLADQAAREAAIKTPPDTSTLLAGKRTADGSEFEKRTADGSEFESPKKKAKVE

SEQ ID NO: 6849 - protein, 2094 aa, synthetic construct
MPAAKRVKLDGGDKKYSIGLDIGTNSVGWAVITDEYKVPSKKFKVLGNTDRHSIKKNLIGALLFDSGETAEATRLKRTARRRYTRRKNRICYLQEIFSNEMAKVDDSFFHRLEESFLVEEDKKHERHPIFGNIVDEVAYHEKYPTIYHLRKKLVDSTDKADLRLIYLALAHMIKFRGHFLIEGDLNPDNSDVDKLFIQLVQTYNQLFEENPINASGVDAKAILSARLSKSRRLENLIAQLPGEKKNGLFGNLIALSLGLTPNFKSNFDLAEDAKLQLSKDTYDDDLDNLLAQIGDQYADLFLAAKNLSDAILLSDILRVNTEITKAPLSASMIKRYDEHHQDLTLLKALVRQQLPEKYKEIFFDQSKNGYAGYIDGGASQEEFYKFIKPILEKMDGTEELLVKLNREDLLRKQRTFDNGSIPHQIHLGELHAILRRQEDFYPFLKDNREKIEKILTFRIPYYVGPLARGNSRFAWMTRKSEETITPWNFEEVVDKGASAQSFIERMTNFDKNLPNEKVLPKHSLLYEYFTVYNELTKVKYVTEGMRKPAFLSGEQKKAIVDLLFKTNRKVTVKQLKEDYFKKIECFDSVEISGVEDRFNASLGTYHDLLKIIKDKDFLDNEENEDILEDIVLTLTLFEDREMIEERLKTYAHLFDDKVMKQLKRRRYTGWGRLSRKLINGIRDKQSGKTILDFLKSDGFANRNFMQLIHDDSLTFKEDIQKAQVSGQGDSLHEHIANLAGSPAIKKGILQTVKVVDELVKVMGRHKPENIVIEMARENQTTQKGQKNSRERMKRIEEGIKELGSQILKEHPVENTQLQNEKLYLYYLQNGRDMYVDQELDINRLSDYDVDHIVPQSFLKDDSIDNKVLTRSDKARGKSDNVPSEEVVKKMKNYWRQLLNAKLITQRKFDNLTKAERGGLSELDKAGFIKRQLVETRQITKHVAQILDSRMNTKYDENDKLIREVKVITLKSKLVSDFRKDFQFYKVREINNYHHAHDAYLNAVVGTALIKKYPKLESEFVYGDYKVYDVRKMIAKSEQEIGKATAKYFFYSNIMNFFKTEITLANGEIRKRPLIETNGETGEIVWDKGRDFATVRKVLSMPQVNIVKKTEVQTGGFSKESILPKRNSDKLIARKKDWDPKKYGGFDSPTVAYSVLVVAKVEKGKSKKLKSVKELLGITIMERSSFEKNPIDFLEAKGYKEVKKDLIIKLPKYSLFELENGRKRMLASAGELQKGNELALPSKYVNFLYLASHYEKLKGSPEDNEQKQLFVEQHKHYLDEIIEQISEFSKRVILADANLDKVLSAYNKHRDKPIREQAENIIHLFTLTNLGAPAAFKYFDTTIDRKRYTSTKEVLDATLIHQSITGLYETRIDLSQLGGDGGGGGGSSGGSGGTLNIEDEYRLHETSKEPDVSLGSTWLSDFPQAWAETGGMGLAVRQAPLIIPLKATSTPVSIKQYPMSQEARLGIKPHIQRLLDQGILVPCQSPWNTPLLPVKKPGTNDYRPVQDLREVNKRVEDIHPTVPNPYNLLSGLPPSHQWYTVLDLKDAFFCLRLHPTSQPLFAFEWRDPEMGISGQLTWTRLPQGFKNSPTLFNEALHRDLAGFRIQHPDLILLQYVDDLLLAATSELDCQQGTRALLQTLGDLGYRASAKKAQICQKQVKYLGYLLKEGQRWLTEARKETVMGQPIPKTPRQLREFLGTAGFCRLWIPGFAEMAAPLYPLTKPGTLFNWGPDQQKAFQEIKQALLTAPALGLPDLTKPFELFVDEKQGYAKGVLTQKLGPWRRPVAYLSKKLDPVAAGWPPCLRMVAAIAVLTKDAGKLTMGQPLVILAPHAVEALVKQPPDRWLSNARMTHYQALLLDTDRVQFGPVVALNPATLLPLPEEGLQHDCLDILAEAHGTRSDLMDQPLPDADHTWYTDGSSFLQEGQRKAGAAVTTETEVIWARALPAGTSAQRAELIALTQALKMAEGKKLNVYTDSRYAFATAHIHGEIYRRRGWLTSEGKEIKNKDEILALLKALFLPKRLSIIHCPGHQKGNSAEARGNRMADQAAREVATRETPETSTLLAGKRTADGSEFEKRTADGSEFESPKKKAKVE

SEQ ID NO: 6850 - protein, 2094 aa, synthetic construct
MPAAKRVKLDGGDKKYSIGLDIGTNSVGWAVITDEYKVPSKKFKVLGNTDRHSIKKNLIGALLFDSGETAEATRLKRTARRRYTRRKNRICYLQEIFSNEMAKVDDSFFHRLEESFLVEEDKKHERHPIFGNIVDEVAYHEKYPTIYHLRKKLVDSTDKADLRLIYLALAHMIKFRGHFLIEGDLNPDNSDVDKLFIQLVQTYNQLFEENPINASGVDAKAILSARLSKSRRLENLIAQLPGEKKNGLFGNLIALSLGLTPNFKSNFDLAEDAKLQLSKDTYDDDLDNLLAQIGDQYADLFLAAKNLSDAILLSDILRVNTEITKAPLSASMIKRYDEHHQDLTLLKALVRQQLPEKYKEIFFDQSKNGYAGYIDGGASQEEFYKFIKPILEKMDGTEELLVKLNREDLLRKQRTFDNGSIPHQIHLGELHAILRRQEDFYPFLKDNREKIEKILTFRIPYYVGPLARGNSRFAWMTRKSEETITPWNFEEVVDKGASAQSFIERMTNFDKNLPNEKVLPKHSLLYEYFTVYNELTKVKYVTEGMRKPAFLSGEQKKAIVDLLFKTNRKVTVKQLKEDYFKKIECFDSVEISGVEDRFNASLGTYHDLLKIIKDKDFLDNEENEDILEDIVLTLTLFEDREMIEERLKTYAHLFDDKVMKQLKRRRYTGWGRLSRKLINGIRDKQSGKTILDFLKSDGFANRNFMQLIHDDSLTFKEDIQKAQVSGQGDSLHEHIANLAGSPAIKKGILQTVKVVDELVKVMGRHKPENIVIEMARENQTTQKGQKNSRERMKRIEEGIKELGSQILKEHPVENTQLQNEKLYLYYLQNGRDMYVDQELDINRLSDYDVDHIVPQSFLKDDSIDNKVLTRSDKARGKSDNVPSEEVVKKMKNYWRQLLNAKLITQRKFDNLTKAERGGLSELDKAGFIKRQLVETRQITKHVAQILDSRMNTKYDENDKLIREVKVITLKSKLVSDFRKDFQFYKVREINNYHHAHDAYLNAVVGTALIKKYPKLESEFVYGDYKVYDVRKMIAKSEQEIGKATAKYFFYSNIMNFFKTEITLANGEIRKRPLIETNGETGEIVWDKGRDFATVRKVLSMPQVNIVKKTEVQTGGFSKESILPKRNSDKLIARKKDWDPKKYGGFDSPTVAYSVLVVAKVEKGKSKKLKSVKELLGITIMERSSFEKNPIDFLEAKGYKEVKKDLIIKLPKYSLFELENGRKRMLASAGELQKGNELALPSKYVNFLYLASHYEKLKGSPEDNEQKQLFVEQHKHYLDEIIEQISEFSKRVILADANLDKVLSAYNKHRDKPIREQAENIIHLFTLTNLGAPAAFKYFDTTIDRKRYTSTKEVLDATLIHQSITGLYETRIDLSQLGGDGGGGGGSSGGSGGTLNIEDEYRLHETSKGPDVPLGSTWLSDFPQAWAETGGMGLAVRQAPLIIPLKATSTPVSIKQYPMSQEARLGIKPHIQRLLDQGILVPCQSPWNTPLLPVKKPGTNDYRPVQDLREVNKRVEDIHPTVPNPYNLLSGLPPSHQWYTVLDLKDAFFCLRLHPTSQSLFAFEWRDPEMGISGQLTWTRLPQGFKNSPTLFNEALHRDLADFRIQHPDLILLQYVDDLLLAATSELDCQQGTRALLQTLGDLGYRASAKKAQICQKQVKYLGYLLKEGQRWLTEARKETVMGQPTPKTPRQLREFLGTAGFCRLWIPGFAEMAAPLYPLTKPGTLFEWGPDQQKAYQEIKQALLTAPALGLPDLTKPFELFVDEKQGYAKGVLTQKLGPWRRPVAYLSKKLDPVAAGWPPCLRMVAAIAVLTKDAGKLTMGQPLVILAPHAVEALVKQPPDRWLSNARMTHYQALLLDTDRVQFGPIVALNPATLLPLPEEGLQHDCLDILAEAHGTRPDLTDQPLPDADHTWYTDGSSFLQEGQRKAGAAVTTETEVVWAKALPAGTSAQRAELIALTQALKMAEGKKLNVYTDSRYAFATAHIHGEIYRRRGWLTSEGKEIKNKDEILALLKALFLPKRLSIIHCPGHQKGNRAEARGNRMADQAAREVATRETPETSTLLAGKRTADGSEFEKRTADGSEFESPKKKAKVE

SEQ ID NO: 6851 - protein, 2114 aa, synthetic construct
MPAAKRVKLDGGDKKYSIGLDIGTNSVGWAVITDEYKVPSKKFKVLGNTDRHSIKKNLIGALLFDSGETAEATRLKRTARRRYTRRKNRICYLQEIFSNEMAKVDDSFFHRLEESFLVEEDKKHERHPIFGNIVDEVAYHEKYPTIYHLRKKLVDSTDKADLRLIYLALAHMIKFRGHFLIEGDLNPDNSDVDKLFIQLVQTYNQLFEENPINASGVDAKAILSARLSKSRRLENLIAQLPGEKKNGLFGNLIALSLGLTPNFKSNFDLAEDAKLQLSKDTYDDDLDNLLAQIGDQYADLFLAAKNLSDAILLSDILRVNTEITKAPLSASMIKRYDEHHQDLTLLKALVRQQLPEKYKEIFFDQSKNGYAGYIDGGASQEEFYKFIKPILEKMDGTEELLVKLNREDLLRKQRTFDNGSIPHQIHLGELHAILRRQEDFYPFLKDNREKIEKILTFRIPYYVGPLARGNSRFAWMTRKSEETITPWNFEEVVDKGASAQSFIERMTNFDKNLPNEKVLPKHSLLYEYFTVYNELTKVKYVTEGMRKPAFLSGEQKKAIVDLLFKTNRKVTVKQLKEDYFKKIECFDSVEISGVEDRFNASLGTYHDLLKIIKDKDFLDNEENEDILEDIVLTLTLFEDREMIEERLKTYAHLFDDKVMKQLKRRRYTGWGRLSRKLINGIRDKQSGKTILDFLKSDGFANRNFMQLIHDDSLTFKEDIQKAQVSGQGDSLHEHIANLAGSPAIKKGILQTVKVVDELVKVMGRHKPENIVIEMARENQTTQKGQKNSRERMKRIEEGIKELGSQILKEHPVENTQLQNEKLYLYYLQNGRDMYVDQELDINRLSDYDVDHIVPQSFLKDDSIDNKVLTRSDKARGKSDNVPSEEVVKKMKNYWRQLLNAKLITQRKFDNLTKAERGGLSELDKAGFIKRQLVETRQITKHVAQILDSRMNTKYDENDKLIREVKVITLKSKLVSDFRKDFQFYKVREINNYHHAHDAYLNAVVGTALIKKYPKLESEFVYGDYKVYDVRKMIAKSEQEIGKATAKYFFYSNIMNFFKTEITLANGEIRKRPLIETNGETGEIVWDKGRDFATVRKVLSMPQVNIVKKTEVQTGGFSKESILPKRNSDKLIARKKDWDPKKYGGFDSPTVAYSVLVVAKVEKGKSKKLKSVKELLGITIMERSSFEKNPIDFLEAKGYKEVKKDLIIKLPKYSLFELENGRKRMLASAGELQKGNELALPSKYVNFLYLASHYEKLKGSPEDNEQKQLFVEQHKHYLDEIIEQISEFSKRVILADANLDKVLSAYNKHRDKPIREQAENIIHLFTLTNLGAPAAFKYFDTTIDRKRYTSTKEVLDATLIHQSITGLYETRIDLSQLGGDGGGGGGSSGGSGGVQEISDSRPMLHIYLNGRRFLGLLDTGADKTCIAGRDWPANWPIHQTESSLQGLGMACGVARSSQPLRWQHEDKSGIIHPFVIPTLPFTLWGRDIMKDIKVRLMTDSPDDSQDLMIGAIESNLFADQISWKSDQPVWLNQWPLKQEKLQALQQLVTEQLQLGHLEESNSPWNTPVFVIKKKSGKWRLLQDLRAVNATMHDMGALQPGLPSPPAVPKGWEIIIIDLQDCFFNIKLHPEDCKRFAFSVPSPNFKRPYQRFQWKVLPQGMKNSPTLCQKFVDKAILTVRDKYQDSYIVHYMDDILLAHPSRSIVDEILTSMIQALNKHGLVVSTEKIQKYDNLKYLGTHIQGDSVSYQKLQIRTDKLRTLNDFQKLLGNINWIRPFLKLTTGELKPLFEILNPDSNPISTRKLTPEACKALQLMNERLSTARVKRLDLSQPWSLCILKTEYTPTACLWQDGVVEWIHLPHISPKVITPYDIFCTQLIIKGRHRSKELFSKDPDYIVVPYTKVQFDLLLQEKEDWPISLLGFLGEVHFHLPKDPLLTFTLQTAIIFPHMTSTTPLEKGIVIFTDGSANGRSVTYIQGREPIIKENTQNTAQQAEIVAVITAFEEVSQPFNLYTDSKYVTGLFPEIETATLSPRTKIYTELKHLQRLIHKRQEKFYIGHIRGHTGLPGPLAQGNAYADSLTRILTAAGKRTADGSEFEKRTADGSEFESPKKKAKVE

SEQ ID NO: 6852 - protein, 2088 aa, synthetic construct
MPAAKRVKLDGGDKKYSIGLDIGTNSVGWAVITDEYKVPSKKFKVLGNTDRHSIKKNLIGALLFDSGETAEATRLKRTARRRYTRRKNRICYLQEIFSNEMAKVDDSFFHRLEESFLVEEDKKHERHPIFGNIVDEVAYHEKYPTIYHLRKKLVDSTDKADLRLIYLALAHMIKFRGHFLIEGDLNPDNSDVDKLFIQLVQTYNQLFEENPINASGVDAKAILSARLSKSRRLENLIAQLPGEKKNGLFGNLIALSLGLTPNFKSNFDLAEDAKLQLSKDTYDDDLDNLLAQIGDQYADLFLAAKNLSDAILLSDILRVNTEITKAPLSASMIKRYDEHHQDLTLLKALVRQQLPEKYKEIFFDQSKNGYAGYIDGGASQEEFYKFIKPILEKMDGTEELLVKLNREDLLRKQRTFDNGSIPHQIHLGELHAILRRQEDFYPFLKDNREKIEKILTFRIPYYVGPLARGNSRFAWMTRKSEETITPWNFEEVVDKGASAQSFIERMTNFDKNLPNEKVLPKHSLLYEYFTVYNELTKVKYVTEGMRKPAFLSGEQKKAIVDLLFKTNRKVTVKQLKEDYFKKIECFDSVEISGVEDRFNASLGTYHDLLKIIKDKDFLDNEENEDILEDIVLTLTLFEDREMIEERLKTYAHLFDDKVMKQLKRRRYTGWGRLSRKLINGIRDKQSGKTILDFLKSDGFANRNFMQLIHDDSLTFKEDIQKAQVSGQGDSLHEHIANLAGSPAIKKGILQTVKVVDELVKVMGRHKPENIVIEMARENQTTQKGQKNSRERMKRIEEGIKELGSQILKEHPVENTQLQNEKLYLYYLQNGRDMYVDQELDINRLSDYDVDHIVPQSFLKDDSIDNKVLTRSDKARGKSDNVPSEEVVKKMKNYWRQLLNAKLITQRKFDNLTKAERGGLSELDKAGFIKRQLVETRQITKHVAQILDSRMNTKYDENDKLIREVKVITLKSKLVSDFRKDFQFYKVREINNYHHAHDAYLNAVVGTALIKKYPKLESEFVYGDYKVYDVRKMIAKSEQEIGKATAKYFFYSNIMNFFKTEITLANGEIRKRPLIETNGETGEIVWDKGRDFATVRKVLSMPQVNIVKKTEVQTGGFSKESILPKRNSDKLIARKKDWDPKKYGGFDSPTVAYSVLVVAKVEKGKSKKLKSVKELLGITIMERSSFEKNPIDFLEAKGYKEVKKDLIIKLPKYSLFELENGRKRMLASAGELQKGNELALPSKYVNFLYLASHYEKLKGSPEDNEQKQLFVEQHKHYLDEIIEQISEFSKRVILADANLDKVLSAYNKHRDKPIREQAENIIHLFTLTNLGAPAAFKYFDTTIDRKRYTSTKEVLDATLIHQSITGLYETRIDLSQLGGDGGGGGGSSGGSGGTLQLDDEYRLYSPLVKPDQNIQFWLEQFPQAWAETAGMGLAKQVPPQVIQLKASATPVSVRQYPLSKEAQEGIRPHVQRLIQQGILVPVQSPWNTPLLPVRKPGTNDYRPVQDLREVNKRVQDIHPTVPNPYNLLCALPPQRSWYTVLDLKDAFFCLRLHPTSQPLFAFEWRDPGTGRTGQLTWTRLPQGFKNSPTIFDEALHRDLANFRIQHPQVTLLQYVDDLLLAGATKQDCLEGTKALLLELSDLGYRASAKKAQICRREVTYLGYSLRDGQRWLTEARKKTVVQIPAPTTAKQVREFLGTAGFCRLWIPGFATLAAPLYPLTKEKGEFSWAPEHQKAFDAIKKALLSAPALALPDVTKPFTLYVDERKGVARGVLTQTLGPWRRPVAYLSKKLDPVASGWPVCLKAIAAVAILVKDADKLTLGQNITVIAPHALENIVRQPPDRWMTNARMTHYQSLLLTERVTFAPPAALNPATLLPEETDEPVTHDCHQLLIEETGVRKDLTDIPLTGEVLTWFTDGSSYVVEGKRMAGAAVVDGTRTIWASSLPEGTSAQKAELMALTQALRLAEGKSINIYTDSRYAFATAHVHGAIYKQRGLLTSAGREIKNKEEILSLLEALHLPKRLAIIHCPGHQKAKDPISRGNQMADRVAKQAAQGVNLLAGKRTADGSEFEKRTADGSEFESPKKKAKVE

SEQ ID NO: 6853 - protein, 2085 aa, synthetic construct
MPAAKRVKLDGGDKKYSIGLDIGTNSVGWAVITDEYKVPSKKFKVLGNTDRHSIKKNLIGALLFDSGETAEATRLKRTARRRYTRRKNRICYLQEIFSNEMAKVDDSFFHRLEESFLVEEDKKHERHPIFGNIVDEVAYHEKYPTIYHLRKKLVDSTDKADLRLIYLALAHMIKFRGHFLIEGDLNPDNSDVDKLFIQLVQTYNQLFEENPINASGVDAKAILSARLSKSRRLENLIAQLPGEKKNGLFGNLIALSLGLTPNFKSNFDLAEDAKLQLSKDTYDDDLDNLLAQIGDQYADLFLAAKNLSDAILLSDILRVNTEITKAPLSASMIKRYDEHHQDLTLLKALVRQQLPEKYKEIFFDQSKNGYAGYIDGGASQEEFYKFIKPILEKMDGTEELLVKLNREDLLRKQRTFDNGSIPHQIHLGELHAILRRQEDFYPFLKDNREKIEKILTFRIPYYVGPLARGNSRFAWMTRKSEETITPWNFEEVVDKGASAQSFIERMTNFDKNLPNEKVLPKHSLLYEYFTVYNELTKVKYVTEGMRKPAFLSGEQKKAIVDLLFKTNRKVTVKQLKEDYFKKIECFDSVEISGVEDRFNASLGTYHDLLKIIKDKDFLDNEENEDILEDIVLTLTLFEDREMIEERLKTYAHLFDDKVMKQLKRRRYTGWGRLSRKLINGIRDKQSGKTILDFLKSDGFANRNFMQLIHDDSLTFKEDIQKAQVSGQGDSLHEHIANLAGSPAIKKGILQTVKVVDELVKVMGRHKPENIVIEMARENQTTQKGQKNSRERMKRIEEGIKELGSQILKEHPVENTQLQNEKLYLYYLQNGRDMYVDQELDINRLSDYDVDHIVPQSFLKDDSIDNKVLTRSDKARGKSDNVPSEEVVKKMKNYWRQLLNAKLITQRKFDNLTKAERGGLSELDKAGFIKRQLVETRQITKHVAQILDSRMNTKYDENDKLIREVKVITLKSKLVSDFRKDFQFYKVREINNYHHAHDAYLNAVVGTALIKKYPKLESEFVYGDYKVYDVRKMIAKSEQEIGKATAKYFFYSNIMNFFKTEITLANGEIRKRPLIETNGETGEIVWDKGRDFATVRKVLSMPQVNIVKKTEVQTGGFSKESILPKRNSDKLIARKKDWDPKKYGGFDSPTVAYSVLVVAKVEKGKSKKLKSVKELLGITIMERSSFEKNPIDFLEAKGYKEVKKDLIIKLPKYSLFELENGRKRMLASAGELQKGNELALPSKYVNFLYLASHYEKLKGSPEDNEQKQLFVEQHKHYLDEIIEQISEFSKRVILADANLDKVLSAYNKHRDKPIREQAENIIHLFTLTNLGAPAAFKYFDTTIDRKRYTSTKEVLDATLIHQSITGLYETRIDLSQLGGDGGGGGGSSGGSGGIPWLMKKPLQLTTLVPLQEYEERLLKQTMLTGSYKEKLQSLFLKYDALWQHWENQVGHRRIKPHHIATGTVNPRPQKQYPINPKAKASIQTVINDLLKQGVLIQQNSIMNTPVYPVPKPDGKWRMVLDYREVNKTIPLIAAQNQHSAGILSSIFRGKYKTTLDLSNGFWAHSITPESYWLTAFTWLGQQYCWTRLPQGFLNSPALFNADVVDLLKEVPNVQVYVDDIYISHDDPREHLEQLEKVFSLLLNAGYVVSLKKSEIAQHEVEFLGFNITKEGRGLTETFKQKLLNITPPRDLKQLQSILGKLNFARNFIPNFSELVKPLYNIIATAPGKYITWTTDNSQQLQNIISMLNSAENLEERNPEVRLIMKVNTSPSAGYIRFYNEFAKRPIMYLNYVYTKAEVKFTNTEKLLTTIHKGLIKALDLGMGQEILVYSPIVSMTKIQKTPLPERKALPIRWITWMSYLEDPRIQFHYDKTLPELQQVPTVTDDIIAKIKHPSEFSMVFYTDGSAIKHPNVNKSHNAGMGIAQVQFKPEFTVINTWSIPLGDHTAQLAEVAAVEFACKKALKIDGPVLIVTDSFYVAESVNKELPYWQSNGFFNNKKKPLKHVSKWKSIADCIQLKPDIIIIHEKGHQPTASTFHTEGNNLADKLATQGSYVVNAGKRTADGSEFEKRTADGSEFESPKKKAKVE

SEQ ID NO: 6854 - protein, 2174 aa, synthetic construct
MPAAKRVKLDGGDKKYSIGLDIGTNSVGWAVITDEYKVPSKKFKVLGNTDRHSIKKNLIGALLFDSGETAEATRLKRTARRRYTRRKNRICYLQEIFSNEMAKVDDSFFHRLEESFLVEEDKKHERHPIFGNIVDEVAYHEKYPTIYHLRKKLVDSTDKADLRLIYLALAHMIKFRGHFLIEGDLNPDNSDVDKLFIQLVQTYNQLFEENPINASGVDAKAILSARLSKSRRLENLIAQLPGEKKNGLFGNLIALSLGLTPNFKSNFDLAEDAKLQLSKDTYDDDLDNLLAQIGDQYADLFLAAKNLSDAILLSDILRVNTEITKAPLSASMIKRYDEHHQDLTLLKALVRQQLPEKYKEIFFDQSKNGYAGYIDGGASQEEFYKFIKPILEKMDGTEELLVKLNREDLLRKQRTFDNGSIPHQIHLGELHAILRRQEDFYPFLKDNREKIEKILTFRIPYYVGPLARGNSRFAWMTRKSEETITPWNFEEVVDKGASAQSFIERMTNFDKNLPNEKVLPKHSLLYEYFTVYNELTKVKYVTEGMRKPAFLSGEQKKAIVDLLFKTNRKVTVKQLKEDYFKKIECFDSVEISGVEDRFNASLGTYHDLLKIIKDKDFLDNEENEDILEDIVLTLTLFEDREMIEERLKTYAHLFDDKVMKQLKRRRYTGWGRLSRKLINGIRDKQSGKTILDFLKSDGFANRNFMQLIHDDSLTFKEDIQKAQVSGQGDSLHEHIANLAGSPAIKKGILQTVKVVDELVKVMGRHKPENIVIEMARENQTTQKGQKNSRERMKRIEEGIKELGSQILKEHPVENTQLQNEKLYLYYLQNGRDMYVDQELDINRLSDYDVDHIVPQSFLKDDSIDNKVLTRSDKARGKSDNVPSEEVVKKMKNYWRQLLNAKLITQRKFDNLTKAERGGLSELDKAGFIKRQLVETRQITKHVAQILDSRMNTKYDENDKLIREVKVITLKSKLVSDFRKDFQFYKVREINNYHHAHDAYLNAVVGTALIKKYPKLESEFVYGDYKVYDVRKMIAKSEQEIGKATAKYFFYSNIMNFFKTEITLANGEIRKRPLIETNGETGEIVWDKGRDFATVRKVLSMPQVNIVKKTEVQTGGFSKESILPKRNSDKLIARKKDWDPKKYGGFDSPTVAYSVLVVAKVEKGKSKKLKSVKELLGITIMERSSFEKNPIDFLEAKGYKEVKKDLIIKLPKYSLFELENGRKRMLASAGELQKGNELALPSKYVNFLYLASHYEKLKGSPEDNEQKQLFVEQHKHYLDEIIEQISEFSKRVILADANLDKVLSAYNKHRDKPIREQAENIIHLFTLTNLGAPAAFKYFDTTIDRKRYTSTKEVLDATLIHQSITGLYETRIDLSQLGGDGGGGGGSSGGSGGMDPLQLLQPLEAEIKGTKLKAHWNSGATITCVPQAFLEEEVPIKNIWIKTIHGEKEQPVYYLTFKIQGRKVEAEVISSPYDYILVSPSDIPWLMKKPLQLTTLVPLQEYEERLLKQTMLTGSYKEKLQSLFLKYDALWQHWENQVGHRRIKPHHIATGTVNPRPQKQYPINPKAKASIQTVINDLLKQGVLIQQNSIMNTPVYPVPKPDGKWRMVLDYREVNKTIPLIAAQNQHSAGILSSIFRGKYKTTLDLSNGFWAHSITPESYWLTAFTWLGQQYCWTRLPQGFLNSPALFNADVVDLLKEVPNVQVYVDDIYISHDDPREHLEQLEKVFSLLLNAGYVVSLKKSEIAQHEVEFLGFNITKEGRGLTETFKQKLLNITPPRDLKQLQSILGLLNFARNFIPNFSELVKPLYNIIATAPGKYITWTTDNSQQLQNIISMLNSAENLEERNPEVRLIMKVNTSPSAGYIRFYNEFAKRPIMYLNYVYTKAEVKFTNTEKLLTTIHKGLIKALDLGMGQEILVYSPIVSMTKIQKTPLPERKALPIRWITWMSYLEDPRIQFHYDKTLPELQQVPTVTDDIIAKIKHPSEFSMVFYTDGSAIKHPNVNKSHNAGMGIAQVQFKPEFTVINTWSIPLGDHTAQLAEVAAVEFACKKALKIDGPVLIVTDSFYVAESVNKELPYWQSNGFFNNKKKPLKHVSKWKSIADCIQLKPDIIIIHEKGHQPTASTFHTEGNNLADKLATQGSYVVNAGKRTADGSEFEKRTADGSEFESPKKKAKVE

SEQ ID NO: 6855 - protein, 2094 aa, synthetic construct
MPAAKRVKLDGGDKKYSIGLDIGTNSVGWAVITDEYKVPSKKFKVLGNTDRHSIKKNLIGALLFDSGETAEATRLKRTARRRYTRRKNRICYLQEIFSNEMAKVDDSFFHRLEESFLVEEDKKHERHPIFGNIVDEVAYHEKYPTIYHLRKKLVDSTDKADLRLIYLALAHMIKFRGHFLIEGDLNPDNSDVDKLFIQLVQTYNQLFEENPINASGVDAKAILSARLSKSRRLENLIAQLPGEKKNGLFGNLIALSLGLTPNFKSNFDLAEDAKLQLSKDTYDDDLDNLLAQIGDQYADLFLAAKNLSDAILLSDILRVNTEITKAPLSASMIKRYDEHHQDLTLLKALVRQQLPEKYKEIFFDQSKNGYAGYIDGGASQEEFYKFIKPILEKMDGTEELLVKLNREDLLRKQRTFDNGSIPHQIHLGELHAILRRQEDFYPFLKDNREKIEKILTFRIPYYVGPLARGNSRFAWMTRKSEETITPWNFEEVVDKGASAQSFIERMTNFDKNLPNEKVLPKHSLLYEYFTVYNELTKVKYVTEGMRKPAFLSGEQKKAIVDLLFKTNRKVTVKQLKEDYFKKIECFDSVEISGVEDRFNASLGTYHDLLKIIKDKDFLDNEENEDILEDIVLTLTLFEDREMIEERLKTYAHLFDDKVMKQLKRRRYTGWGRLSRKLINGIRDKQSGKTILDFLKSDGFANRNFMQLIHDDSLTFKEDIQKAQVSGQGDSLHEHIANLAGSPAIKKGILQTVKVVDELVKVMGRHKPENIVIEMARENQTTQKGQKNSRERMKRIEEGIKELGSQILKEHPVENTQLQNEKLYLYYLQNGRDMYVDQELDINRLSDYDVDHIVPQSFLKDDSIDNKVLTRSDKARGKSDNVPSEEVVKKMKNYWRQLLNAKLITQRKFDNLTKAERGGLSELDKAGFIKRQLVETRQITKHVAQILDSRMNTKYDENDKLIREVKVITLKSKLVSDFRKDFQFYKVREINNYHHAHDAYLNAVVGTALIKKYPKLESEFVYGDYKVYDVRKMIAKSEQEIGKATAKYFFYSNIMNFFKTEITLANGEIRKRPLIETNGETGEIVWDKGRDFATVRKVLSMPQVNIVKKTEVQTGGFSKESILPKRNSDKLIARKKDWDPKKYGGFDSPTVAYSVLVVAKVEKGKSKKLKSVKELLGITIMERSSFEKNPIDFLEAKGYKEVKKDLIIKLPKYSLFELENGRKRMLASAGELQKGNELALPSKYVNFLYLASHYEKLKGSPEDNEQKQLFVEQHKHYLDEIIEQISEFSKRVILADANLDKVLSAYNKHRDKPIREQAENIIHLFTLTNLGAPAAFKYFDTTIDRKRYTSTKEVLDATLIHQSITGLYETRIDLSQLGGDGGGGGGSSGGSGGTLNIEDEYRLHETSKEPDVPLGSTWLSDFPQAWAETGGMGLAVRQAPLIIPLKATSTPVSIKQYPMSQEARLGIKPHIQRLLDQGILVPCQSPWNTPLLPVKKPGTNDYRPVQDLREVNKRVEDIHPTVPNPYNLLSGLPPSHQWYTVLDLKDAFFCLRLHPTSQPLFAFEWRDPEMGISGQLTWTRLPQGFKNSPTLFNEALHRDLADFRIQHPDLILLQYVDDLLLAATSEQDCQRGTRALLQTLGNLGYRASAKKAQICQKQVKYLGYLLKEGQRWLTEARKETVMGQPTPKTPRQLREFLGTAGFCRLWIPGFAEMAAPLYPLTKPGTLFNWGPDQQKAYQEIKQALLTAPALGLPDLTKPFELFVDEKQGYAKGVLTQKLGPWRRPVAYLSKKLDPVAAGWPPCLRMVAAIAVLTKDAGKLTMGQPLVILAPHAVEALVKQPPDRWLSNARMTHYQAMLLDTDRVQFGPVVALNPATLLPLPEKEAPHDCLEILAETHGTRPDLTDQPIPDADYTWYTDGSSFLQEGQRRAGAAVTTETEVIWARALPAGTSAQRAELIALTQALKMAEGKKLNVYTDSRYAFATAHVHGEIYRRRGWLTSEGREIKNKNEILALLKALFLPKRLSIIHCPGHQKGNSAEARGNRMADQAAREAAMKAVLETSTLLAGKRTADGSEFEKRTADGSEFESPKKKAKVE

SEQ ID NO: 6856 - protein, 2171 aa, synthetic construct
MPAAKRVKLDGGDKKYSIGLDIGTNSVGWAVITDEYKVPSKKFKVLGNTDRHSIKKNLIGALLFDSGETAEATRLKRTARRRYTRRKNRICYLQEIFSNEMAKVDDSFFHRLEESFLVEEDKKHERHPIFGNIVDEVAYHEKYPTIYHLRKKLVDSTDKADLRLIYLALAHMIKFRGHFLIEGDLNPDNSDVDKLFIQLVQTYNQLFEENPINASGVDAKAILSARLSKSRRLENLIAQLPGEKKNGLFGNLIALSLGLTPNFKSNFDLAEDAKLQLSKDTYDDDLDNLLAQIGDQYADLFLAAKNLSDAILLSDILRVNTEITKAPLSASMIKRYDEHHQDLTLLKALVRQQLPEKYKEIFFDQSKNGYAGYIDGGASQEEFYKFIKPILEKMDGTEELLVKLNREDLLRKQRTFDNGSIPHQIHLGELHAILRRQEDFYPFLKDNREKIEKILTFRIPYYVGPLARGNSRFAWMTRKSEETITPWNFEEVVDKGASAQSFIERMTNFDKNLPNEKVLPKHSLLYEYFTVYNELTKVKYVTEGMRKPAFLSGEQKKAIVDLLFKTNRKVTVKQLKEDYFKKIECFDSVEISGVEDRFNASLGTYHDLLKIIKDKDFLDNEENEDILEDIVLTLTLFEDREMIEERLKTYAHLFDDKVMKQLKRRRYTGWGRLSRKLINGIRDKQSGKTILDFLKSDGFANRNFMQLIHDDSLTFKEDIQKAQVSGQGDSLHEHIANLAGSPAIKKGILQTVKVVDELVKVMGRHKPENIVIEMARENQTTQKGQKNSRERMKRIEEGIKELGSQILKEHPVENTQLQNEKLYLYYLQNGRDMYVDQELDINRLSDYDVDHIVPQSFLKDDSIDNKVLTRSDKARGKSDNVPSEEVVKKMKNYWRQLLNAKLITQRKFDNLTKAERGGLSELDKAGFIKRQLVETRQITKHVAQILDSRMNTKYDENDKLIREVKVITLKSKLVSDFRKDFQFYKVREINNYHHAHDAYLNAVVGTALIKKYPKLESEFVYGDYKVYDVRKMIAKSEQEIGKATAKYFFYSNIMNFFKTEITLANGEIRKRPLIETNGETGEIVWDKGRDFATVRKVLSMPQVNIVKKTEVQTGGFSKESILPKRNSDKLIARKKDWDPKKYGGFDSPTVAYSVLVVAKVEKGKSKKLKSVKELLGITIMERSSFEKNPIDFLEAKGYKEVKKDLIIKLPKYSLFELENGRKRMLASAGELQKGNELALPSKYVNFLYLASHYEKLKGSPEDNEQKQLFVEQHKHYLDEIIEQISEFSKRVILADANLDKVLSAYNKHRDKPIREQAENIIHLFTLTNLGAPAAFKYFDTTIDRKRYTSTKEVLDATLIHQSITGLYETRIDLSQLGGDGGGSSGGSGGGGGMDLLKPLTVERKGVKIKGYWNSQADITCVPKDLLQGEEPVRQQNVTTIHGTQEGDVYYVNLKIDGRRINTEVIGTTLDYAIITPGDVPWILKKPLELTIKLDLEEQQGTLLNNSILSKKGKEELKQLFEKYSALWQSWENQVGHRRIRPHKIATGTVKPTPQKQYHINPKAKPDIQIVINDLLKQGVLIQKESTMNTPVYPVPKPNGRWRMVLDYRAVNKVTPLIAVQNQHSYGILGSLFKGRYKTTIDLSNGFWAHPIVPEDYWITAFTWQGKQYCWTVLPQGFLNSPGLFTGDVVDLLQGIPNVEVYVDDVYISHDSEKEHLEYLDILFNRLKEAGYIISLKKSNIANSIVDFLGFQITNEGRGLTDTFKEKLENITAPTTLKQLQSILGLLNFARNFIPDFTELIAPLYALIPKSTKNYVPWQIEHSTTLETLITKLNGAEYLQGRKGDKTLIMKVNASYTTGYIRYYNEGEKKPISYVSIVFSKTELKFTELEKLLTTVHKGLLKALDLSMGQNIHVYSPIVSMQNIQKTPQTAKKALASRWLSWLSYLEDPRIRFFYDPQMPALKDLPAVDTGKDNKKHPSNFQHIFYTDGSAITSPTKEGHLNAGMGIVYFINKDGNLQKQQEWSISLGNHTAQFAEIAAFEFALKKCLPLGGNILVVTDSNYVAKAYNEELDVWASNGFVNNRKKPLKHISKWKSVADLKRLRPDVVVTHEPGHQKLDSSPHAYGNNLADQLATQASFKVHAGKRTADGSEFEKRTADGSEFESPKKKAKVE

SEQ ID NO: 6857 - protein, 2093 aa, synthetic construct
MPAAKRVKLDGGDKKYSIGLDIGTNSVGWAVITDEYKVPSKKFKVLGNTDRHSIKKNLIGALLFDSGETAEATRLKRTARRRYTRRKNRICYLQEIFSNEMAKVDDSFFHRLEESFLVEEDKKHERHPIFGNIVDEVAYHEKYPTIYHLRKKLVDSTDKADLRLIYLALAHMIKFRGHFLIEGDLNPDNSDVDKLFIQLVQTYNQLFEENPINASGVDAKAILSARLSKSRRLENLIAQLPGEKKNGLFGNLIALSLGLTPNFKSNFDLAEDAKLQLSKDTYDDDLDNLLAQIGDQYADLFLAAKNLSDAILLSDILRVNTEITKAPLSASMIKRYDEHHQDLTLLKALVRQQLPEKYKEIFFDQSKNGYAGYIDGGASQEEFYKFIKPILEKMDGTEELLVKLNREDLLRKQRTFDNGSIPHQIHLGELHAILRRQEDFYPFLKDNREKIEKILTFRIPYYVGPLARGNSRFAWMTRKSEETITPWNFEEVVDKGASAQSFIERMTNFDKNLPNEKVLPKHSLLYEYFTVYNELTKVKYVTEGMRKPAFLSGEQKKAIVDLLFKTNRKVTVKQLKEDYFKKIECFDSVEISGVEDRFNASLGTYHDLLKIIKDKDFLDNEENEDILEDIVLTLTLFEDREMIEERLKTYAHLFDDKVMKQLKRRRYTGWGRLSRKLINGIRDKQSGKTILDFLKSDGFANRNFMQLIHDDSLTFKEDIQKAQVSGQGDSLHEHIANLAGSPAIKKGILQTVKVVDELVKVMGRHKPENIVIEMARENQTTQKGQKNSRERMKRIEEGIKELGSQILKEHPVENTQLQNEKLYLYYLQNGRDMYVDQELDINRLSDYDVDHIVPQSFLKDDSIDNKVLTRSDKARGKSDNVPSEEVVKKMKNYWRQLLNAKLITQRKFDNLTKAERGGLSELDKAGFIKRQLVETRQITKHVAQILDSRMNTKYDENDKLIREVKVITLKSKLVSDFRKDFQFYKVREINNYHHAHDAYLNAVVGTALIKKYPKLESEFVYGDYKVYDVRKMIAKSEQEIGKATAKYFFYSNIMNFFKTEITLANGEIRKRPLIETNGETGEIVWDKGRDFATVRKVLSMPQVNIVKKTEVQTGGFSKESILPKRNSDKLIARKKDWDPKKYGGFDSPTVAYSVLVVAKVEKGKSKKLKSVKELLGITIMERSSFEKNPIDFLEAKGYKEVKKDLIIKLPKYSLFELENGRKRMLASAGELQKGNELALPSKYVNFLYLASHYEKLKGSPEDNEQKQLFVEQHKHYLDEIIEQISEFSKRVILADANLDKVLSAYNKHRDKPIREQAENIIHLFTLTNLGAPAAFKYFDTTIDRKRYTSTKEVLDATLIHQSITGLYETRIDLSQLGGDGGGSSGGSGGGGGTLQLEEEYRLFEPESTQKQEMDIWLKNFPQAWAETGGMGTAHCQAPVLIQLKATATPISIRQYPMPHEAYQGIKPHIRRMLDQGILKPCQSPWNTPLLPVKKPGTEDYRPVQDLREVNKRVEDIHPTVPNPYNLLSTLPPSHPWYTVLDLKDAFFCLRLHSESQLLFAFEWRDPEIGLSGQLTWTRLPQGFKNSPTLFNEALHSDLADFRVRYPALVLLQYVDDLLLAAATRTECLEGTKALLETLGNKGYRASAKKAQICLQEVTYLGYSLKDGQRWLTKARKEAILSIPVPKNSRQVREFLGKAGYCRLFIPGFAELAAPLYPLTRPGTLFQWGTEQQLAFEDIKKALLSSPALGLPDITKPFELFIDENSGFAKGVLVQKLGPWKRPVAYLSKKLDTVASGWPPCLRMVAAIAILVKDAGKLTLGQPLTILTSHPVEALVRQPPNKWLSNARMTHYQAMLLDAERVHFGPTVSLNPATLLPLPSGGNHHDCLQILAETHGTRPDLTDQPLPDADLTWYTDGSSFIRNGEREAGAAVTTESEVIWAAPLPPGTSAQRAELIALTQALKMAEGKKLTVYTDSRYAFATTHVHGEIYRRRGWLTSEGKEIKNKNEILALLEALFLPKRLSIIHCPGHQKGDSPQAKGNRLADDTAKKAATETHSSLTVLPAGKRTADGSEFEKRTADGSEFESPKKKAKVE

SEQ ID NO: 6858 - protein, 2216 aa, synthetic construct
MPAAKRVKLDGGDKKYSIGLDIGTNSVGWAVITDEYKVPSKKFKVLGNTDRHSIKKNLIGALLFDSGETAEATRLKRTARRRYTRRKNRICYLQEIFSNEMAKVDDSFFHRLEESFLVEEDKKHERHPIFGNIVDEVAYHEKYPTIYHLRKKLVDSTDKADLRLIYLALAHMIKFRGHFLIEGDLNPDNSDVDKLFIQLVQTYNQLFEENPINASGVDAKAILSARLSKSRRLENLIAQLPGEKKNGLFGNLIALSLGLTPNFKSNFDLAEDAKLQLSKDTYDDDLDNLLAQIGDQYADLFLAAKNLSDAILLSDILRVNTEITKAPLSASMIKRYDEHHQDLTLLKALVRQQLPEKYKEIFFDQSKNGYAGYIDGGASQEEFYKFIKPILEKMDGTEELLVKLNREDLLRKQRTFDNGSIPHQIHLGELHAILRRQEDFYPFLKDNREKIEKILTFRIPYYVGPLARGNSRFAWMTRKSEETITPWNFEEVVDKGASAQSFIERMTNFDKNLPNEKVLPKHSLLYEYFTVYNELTKVKYVTEGMRKPAFLSGEQKKAIVDLLFKTNRKVTVKQLKEDYFKKIECFDSVEISGVEDRFNASLGTYHDLLKIIKDKDFLDNEENEDILEDIVLTLTLFEDREMIEERLKTYAHLFDDKVMKQLKRRRYTGWGRLSRKLINGIRDKQSGKTILDFLKSDGFANRNFMQLIHDDSLTFKEDIQKAQVSGQGDSLHEHIANLAGSPAIKKGILQTVKVVDELVKVMGRHKPENIVIEMARENQTTQKGQKNSRERMKRIEEGIKELGSQILKEHPVENTQLQNEKLYLYYLQNGRDMYVDQELDINRLSDYDVDHIVPQSFLKDDSIDNKVLTRSDKARGKSDNVPSEEVVKKMKNYWRQLLNAKLITQRKFDNLTKAERGGLSELDKAGFIKRQLVETRQITKHVAQILDSRMNTKYDENDKLIREVKVITLKSKLVSDFRKDFQFYKVREINNYHHAHDAYLNAVVGTALIKKYPKLESEFVYGDYKVYDVRKMIAKSEQEIGKATAKYFFYSNIMNFFKTEITLANGEIRKRPLIETNGETGEIVWDKGRDFATVRKVLSMPQVNIVKKTEVQTGGFSKESILPKRNSDKLIARKKDWDPKKYGGFDSPTVAYSVLVVAKVEKGKSKKLKSVKELLGITIMERSSFEKNPIDFLEAKGYKEVKKDLIIKLPKYSLFELENGRKRMLASAGELQKGNELALPSKYVNFLYLASHYEKLKGSPEDNEQKQLFVEQHKHYLDEIIEQISEFSKRVILADANLDKVLSAYNKHRDKPIREQAENIIHLFTLTNLGAPAAFKYFDTTIDRKRYTSTKEVLDATLIHQSITGLYETRIDLSQLGGDGGGSSGGSGGGGGTLGDQGSRGSDPLPEPRVTLTVEGIPTEFLVNTGAEHSVLTKPMGKMGSKRTVVAGATGSKVYPWTTKRLLKIGQKQVTHSFLVIPECPAPLLGRDLLTKLKAQIQFSTEGPQVTWEDRPAMCLVLNLEEEYRLHEKPVPPSIDPSWLQLFPMVWAEKAGMGLANQVPPVVVELKSDASPVAVRQYPMSKEAREGIRPHIQRFLDLGILVPCQSPWNTPLLPVKKPGTNDYRPVQDLREVNKRVQDIHPTVPNPYNLLSSLPPSHTWYSVLDLKDAFFCLKLHPNSQPLFAFEWRDPEKGNTGQLTWTRLPQGFKNSPTLFDEALHRDLASFRALNPQVVMLQYVDDLLVAAPTYRDCKEGTRRLLQELSKLGYRVSAKKAQLCREEVTYLGYLLKGGKRWLTPARKATVMKIPTPTTPRQVREFLGTAGFCRLWIPGFASLAAPLYPLTREKVPFTWTEAHQEAFGRIKEALLSAPALALPDLTKPFALYVDEKEGVARGVLTQTLGPWRRPVAYLSKKLDPVASGWPTCLKAIAAVALLLKDADKLTLGQNVLVIAPHNLESIVRQPPDRWMTNARMTHYQSLLLNERVSFAPPAILNPATLLPVESDDTPIHICSEILAEETGTRPDLRDQPLPGVPAWYTDGSSFIMDGRRQAGAAIVDNKRTVWASNLPEGTSAQKAELIALTQALRLAEGKSINIYTDSRYAFATAHVHGAIYKQRGLLTSAGKDIKNKEEILALLEAIHLPKRVAIIHCPGHQRGTDPVATGNRKADEAAKQAAQSTRILTETTKNAGKRTADGSEFEKRTADGSEFESPKKKAKVE

SEQ ID NO: 6859 - protein, 2125 aa, synthetic construct
MPAAKRVKLDGGDKKYSIGLDIGTNSVGWAVITDEYKVPSKKFKVLGNTDRHSIKKNLIGALLFDSGETAEATRLKRTARRRYTRRKNRICYLQEIFSNEMAKVDDSFFHRLEESFLVEEDKKHERHPIFGNIVDEVAYHEKYPTIYHLRKKLVDSTDKADLRLIYLALAHMIKFRGHFLIEGDLNPDNSDVDKLFIQLVQTYNQLFEENPINASGVDAKAILSARLSKSRRLENLIAQLPGEKKNGLFGNLIALSLGLTPNFKSNFDLAEDAKLQLSKDTYDDDLDNLLAQIGDQYADLFLAAKNLSDAILLSDILRVNTEITKAPLSASMIKRYDEHHQDLTLLKALVRQQLPEKYKEIFFDQSKNGYAGYIDGGASQEEFYKFIKPILEKMDGTEELLVKLNREDLLRKQRTFDNGSIPHQIHLGELHAILRRQEDFYPFLKDNREKIEKILTFRIPYYVGPLARGNSRFAWMTRKSEETITPWNFEEVVDKGASAQSFIERMTNFDKNLPNEKVLPKHSLLYEYFTVYNELTKVKYVTEGMRKPAFLSGEQKKAIVDLLFKTNRKVTVKQLKEDYFKKIECFDSVEISGVEDRFNASLGTYHDLLKIIKDKDFLDNEENEDILEDIVLTLTLFEDREMIEERLKTYAHLFDDKVMKQLKRRRYTGWGRLSRKLINGIRDKQSGKTILDFLKSDGFANRNFMQLIHDDSLTFKEDIQKAQVSGQGDSLHEHIANLAGSPAIKKGILQTVKVVDELVKVMGRHKPENIVIEMARENQTTQKGQKNSRERMKRIEEGIKELGSQILKEHPVENTQLQNEKLYLYYLQNGRDMYVDQELDINRLSDYDVDHIVPQSFLKDDSIDNKVLTRSDKARGKSDNVPSEEVVKKMKNYWRQLLNAKLITQRKFDNLTKAERGGLSELDKAGFIKRQLVETRQITKHVAQILDSRMNTKYDENDKLIREVKVITLKSKLVSDFRKDFQFYKVREINNYHHAHDAYLNAVVGTALIKKYPKLESEFVYGDYKVYDVRKMIAKSEQEIGKATAKYFFYSNIMNFFKTEITLANGEIRKRPLIETNGETGEIVWDKGRDFATVRKVLSMPQVNIVKKTEVQTGGFSKESILPKRNSDKLIARKKDWDPKKYGGFDSPTVAYSVLVVAKVEKGKSKKLKSVKELLGITIMERSSFEKNPIDFLEAKGYKEVKKDLIIKLPKYSLFELENGRKRMLASAGELQKGNELALPSKYVNFLYLASHYEKLKGSPEDNEQKQLFVEQHKHYLDEIIEQISEFSKRVILADANLDKVLSAYNKHRDKPIREQAENIIHLFTLTNLGAPAAFKYFDTTIDRKRYTSTKEVLDATLIHQSITGLYETRIDLSQLGGDGGGSSGGSGGGGGLLGRDLLTKLKAQIQFSTEGPQVTWEDRPAMCLVLNLEEEYRLHEKPVPPSIDPSWLQLFPMVWAEKAGMGLANQVPPVVVELKSDASPVAVRQYPMSKEAREGIRPHIQRFLDLGILVPCQSPWNTPLLPVKKPGTNDYRPVQDLREVNKRVQDIHPTVPNPYNLLSSLPPSHTWYSVLDLKDAFFCLKLHPNSQPLFAFEWRDPEKGNTGQLTWTRLPQGFKNSPTLFNEALHRDLASFRALNPQVVMLQYVDDLLVAAPTYRDCKEGTRRLLQELSKLGYRVSAKKAQLCREEVTYLGYLLKGGKRWLTPARKATVMKIPTPTTPRQVREFLGTAGFCRLWIPGFASLAAPLYPLTRPKVPFTWTEAHQEAFGRIKEALLSAPALALPDLTKPFALYVDEKEGVARGVLTQTLGPWRRPVAYLSKKLDPVASGWPTCLKAIAAVALLLKDADKLTLGQNVLVIAPHNLESIVRQPPDRWMTNARMTHYQSLLLNERVSFAPPAILNPATLLPVESDDTPIHICSEILAEETGTRPDLRDQPLPGVPAWYTDGSSFIMDGRRQAGAAIVDNKRTVWASNLPEGTSAQKAELIALTQALRLAEGKSINIYTDSRYAFATAHVHGAIYKQRGWLTSAGKDIKNKEEILALLEAIHLPKRVAIIHCPGHQRGTDPVATGNRKADEAAKQAAQSTRILTETTKNAGKRTADGSEFEKRTADGSEFESPKKKAKVE

SEQ ID NO: 6860 - protein, 2125 aa, synthetic construct
MPAAKRVKLDGGDKKYSIGLDIGTNSVGWAVITDEYKVPSKKFKVLGNTDRHSIKKNLIGALLFDSGETAEATRLKRTARRRYTRRKNRICYLQEIFSNEMAKVDDSFFHRLEESFLVEEDKKHERHPIFGNIVDEVAYHEKYPTIYHLRKKLVDSTDKADLRLIYLALAHMIKFRGHFLIEGDLNPDNSDVDKLFIQLVQTYNQLFEENPINASGVDAKAILSARLSKSRRLENLIAQLPGEKKNGLFGNLIALSLGLTPNFKSNFDLAEDAKLQLSKDTYDDDLDNLLAQIGDQYADLFLAAKNLSDAILLSDILRVNTEITKAPLSASMIKRYDEHHQDLTLLKALVRQQLPEKYKEIFFDQSKNGYAGYIDGGASQEEFYKFIKPILEKMDGTEELLVKLNREDLLRKQRTFDNGSIPHQIHLGELHAILRRQEDFYPFLKDNREKIEKILTFRIPYYVGPLARGNSRFAWMTRKSEETITPWNFEEVVDKGASAQSFIERMTNFDKNLPNEKVLPKHSLLYEYFTVYNELTKVKYVTEGMRKPAFLSGEQKKAIVDLLFKTNRKVTVKQLKEDYFKKIECFDSVEISGVEDRFNASLGTYHDLLKIIKDKDFLDNEENEDILEDIVLTLTLFEDREMIEERLKTYAHLFDDKVMKQLKRRRYTGWGRLSRKLINGIRDKQSGKTILDFLKSDGFANRNFMQLIHDDSLTFKEDIQKAQVSGQGDSLHEHIANLAGSPAIKKGILQTVKVVDELVKVMGRHKPENIVIEMARENQTTQKGQKNSRERMKRIEEGIKELGSQILKEHPVENTQLQNEKLYLYYLQNGRDMYVDQELDINRLSDYDVDHIVPQSFLKDDSIDNKVLTRSDKARGKSDNVPSEEVVKKMKNYWRQLLNAKLITQRKFDNLTKAERGGLSELDKAGFIKRQLVETRQITKHVAQILDSRMNTKYDENDKLIREVKVITLKSKLVSDFRKDFQFYKVREINNYHHAHDAYLNAVVGTALIKKYPKLESEFVYGDYKVYDVRKMIAKSEQEIGKATAKYFFYSNIMNFFKTEITLANGEIRKRPLIETNGETGEIVWDKGRDFATVRKVLSMPQVNIVKKTEVQTGGFSKESILPKRNSDKLIARKKDWDPKKYGGFDSPTVAYSVLVVAKVEKGKSKKLKSVKELLGITIMERSSFEKNPIDFLEAKGYKEVKKDLIIKLPKYSLFELENGRKRMLASAGELQKGNELALPSKYVNFLYLASHYEKLKGSPEDNEQKQLFVEQHKHYLDEIIEQISEFSKRVILADANLDKVLSAYNKHRDKPIREQAENIIHLFTLTNLGAPAAFKYFDTTIDRKRYTSTKEVLDATLIHQSITGLYETRIDLSQLGGDGGGSSGGSGGGGGLLGRDLLTKLKAQIQFSTEGPQVTWEDRPAMCLVLNLEEEYRLHEKPVPPSIDPSWLQLFPMVWAEKAGMGLANQVPPVVVELKSDASPVAVRQYPMSKEAREGIRPHIQRFLDLGILVPCQSPWNTPLLPVKKPGTNDYRPVQDLREVNKRVQDIHPTVPNPYNLLSSLPPSHTWYSVLDLKDAFFCLKLHPNSQPLFAFEWRDPEKGNTGQLTWTRLPQGFKNSPTLFNEALHRDLASFRALNPQVVMLQYVDDLLVAAPTYRDCKEGTRRLLQELSKLGYRVSAKKAQLCREEVTYLGYLLKGGKRWLTPARKATVMKIPTPTTPRQVREFLGKAGFCRLFIPGFASLAAPLYPLTRPKVPFTWTEAHQEAFGRIKEALLSAPALALPDLTKPFALYVDEKEGVARGVLTQTLGPWRRPVAYLSKKLDPVASGWPTCLKAIAAVALLLKDADKLTLGQNVLVIAPHNLESIVRQPPDRWMTNARMTHYQSLLLNERVSFAPPAILNPATLLPVESDDTPIHICSEILAEETGTRPDLRDQPLPGVPAWYTDGSSFIMDGRRQAGAAIVDNKRTVWASNLPEGTSAQKAELIALTQALRLAEGKSINIYTDSRYAFATAHVHGAIYKQRGWLTSAGKDIKNKEEILALLEAIHLPKRVAIIHCPGHQRGTDPVATGNRKADEAAKQAAQSTRILTETTKNAGKRTADGSEFEKRTADGSEFESPKKKAKVE

SEQ ID NO: 6861 - protein, 2216 aa, synthetic construct
MPAAKRVKLDGGDKKYSIGLDIGTNSVGWAVITDEYKVPSKKFKVLGNTDRHSIKKNLIGALLFDSGETAEATRLKRTARRRYTRRKNRICYLQEIFSNEMAKVDDSFFHRLEESFLVEEDKKHERHPIFGNIVDEVAYHEKYPTIYHLRKKLVDSTDKADLRLIYLALAHMIKFRGHFLIEGDLNPDNSDVDKLFIQLVQTYNQLFEENPINASGVDAKAILSARLSKSRRLENLIAQLPGEKKNGLFGNLIALSLGLTPNFKSNFDLAEDAKLQLSKDTYDDDLDNLLAQIGDQYADLFLAAKNLSDAILLSDILRVNTEITKAPLSASMIKRYDEHHQDLTLLKALVRQQLPEKYKEIFFDQSKNGYAGYIDGGASQEEFYKFIKPILEKMDGTEELLVKLNREDLLRKQRTFDNGSIPHQIHLGELHAILRRQEDFYPFLKDNREKIEKILTFRIPYYVGPLARGNSRFAWMTRKSEETITPWNFEEVVDKGASAQSFIERMTNFDKNLPNEKVLPKHSLLYEYFTVYNELTKVKYVTEGMRKPAFLSGEQKKAIVDLLFKTNRKVTVKQLKEDYFKKIECFDSVEISGVEDRFNASLGTYHDLLKIIKDKDFLDNEENEDILEDIVLTLTLFEDREMIEERLKTYAHLFDDKVMKQLKRRRYTGWGRLSRKLINGIRDKQSGKTILDFLKSDGFANRNFMQLIHDDSLTFKEDIQKAQVSGQGDSLHEHIANLAGSPAIKKGILQTVKVVDELVKVMGRHKPENIVIEMARENQTTQKGQKNSRERMKRIEEGIKELGSQILKEHPVENTQLQNEKLYLYYLQNGRDMYVDQELDINRLSDYDVDHIVPQSFLKDDSIDNKVLTRSDKARGKSDNVPSEEVVKKMKNYWRQLLNAKLITQRKFDNLTKAERGGLSELDKAGFIKRQLVETRQITKHVAQILDSRMNTKYDENDKLIREVKVITLKSKLVSDFRKDFQFYKVREINNYHHAHDAYLNAVVGTALIKKYPKLESEFVYGDYKVYDVRKMIAKSEQEIGKATAKYFFYSNIMNFFKTEITLANGEIRKRPLIETNGETGEIVWDKGRDFATVRKVLSMPQVNIVKKTEVQTGGFSKESILPKRNSDKLIARKKDWDPKKYGGFDSPTVAYSVLVVAKVEKGKSKKLKSVKELLGITIMERSSFEKNPIDFLEAKGYKEVKKDLIIKLPKYSLFELENGRKRMLASAGELQKGNELALPSKYVNFLYLASHYEKLKGSPEDNEQKQLFVEQHKHYLDEIIEQISEFSKRVILADANLDKVLSAYNKHRDKPIREQAENIIHLFTLTNLGAPAAFKYFDTTIDRKRYTSTKEVLDATLIHQSITGLYETRIDLSQLGGDGGGSSGGSGGGGGTLGDQGSRGSDPLPEPRVTLTVEGIPTEFLVNTGAEHSVLTKPMGKMGSKRTVVAGATGSKVYPWTTKRLLKIGQKQVTHSFLVIPECPAPLLGRDLLTKLKAQIQFSTEGPQVTWEDRPAMCLVLNLEEEYRLHEKPVPPSIDPSWLQLFPMVWAEKAGMGLANQVPPVVVELKSDASPVAVRQYPMSKEAREGIRPHIQRFLDLGILVPCQSPWNTPLLPVKKPGTNDYRPVQDLREVNKRVQDIHPTVPNPYNLLSSLPPSHTWYSVLDLKDAFFCLKLHPNSQPLFAFEWRDPEKGNTGQLTWTRLPQGFKNSPTLFNEALHRDLASFRALNPQVVMLQYVDDLLVAAPTYRDCKEGTRRLLQELSKLGYRVSAKKAQLCREEVTYLGYLLKGGKRWLTPARKATVMKIPTPTTPRQVREFLGTAGFCRLWIPGFASLAAPLYPLTRPKVPFTWTEAHQEAFGRIKEALLSAPALALPDLTKPFALYVDEKEGVARGVLTQTLGPWRRPVAYLSKKLDPVASGWPTCLKAIAAVALLLKDADKLTLGQNVLVIAPHNLESIVRQPPDRWMTNARMTHYQSLLLNERVSFAPPAILNPATLLPVESDDTPIHICSEILAEETGTRPDLRDQPLPGVPAWYTDGSSFIMDGRRQAGAAIVDNKRTVWASNLPEGTSAQKAELIALTQALRLAEGKSINIYTDSRYAFATAHVHGAIYKQRGWLTSAGKDIKNKEEILALLEAIHLPKRVAIIHCPGHQRGTDPVATGNRKADEAAKQAAQSTRILTETTKNAGKRTADGSEFEKRTADGSEFESPKKKAKVE

SEQ ID NO: 6862 - protein, 2216 aa, synthetic construct
MPAAKRVKLDGGDKKYSIGLDIGTNSVGWAVITDEYKVPSKKFKVLGNTDRHSIKKNLIGALLFDSGETAEATRLKRTARRRYTRRKNRICYLQEIFSNEMAKVDDSFFHRLEESFLVEEDKKHERHPIFGNIVDEVAYHEKYPTIYHLRKKLVDSTDKADLRLIYLALAHMIKFRGHFLIEGDLNPDNSDVDKLFIQLVQTYNQLFEENPINASGVDAKAILSARLSKSRRLENLIAQLPGEKKNGLFGNLIALSLGLTPNFKSNFDLAEDAKLQLSKDTYDDDLDNLLAQIGDQYADLFLAAKNLSDAILLSDILRVNTEITKAPLSASMIKRYDEHHQDLTLLKALVRQQLPEKYKEIFFDQSKNGYAGYIDGGASQEEFYKFIKPILEKMDGTEELLVKLNREDLLRKQRTFDNGSIPHQIHLGELHAILRRQEDFYPFLKDNREKIEKILTFRIPYYVGPLARGNSRFAWMTRKSEETITPWNFEEVVDKGASAQSFIERMTNFDKNLPNEKVLPKHSLLYEYFTVYNELTKVKYVTEGMRKPAFLSGEQKKAIVDLLFKTNRKVTVKQLKEDYFKKIECFDSVEISGVEDRFNASLGTYHDLLKIIKDKDFLDNEENEDILEDIVLTLTLFEDREMIEERLKTYAHLFDDKVMKQLKRRRYTGWGRLSRKLINGIRDKQSGKTILDFLKSDGFANRNFMQLIHDDSLTFKEDIQKAQVSGQGDSLHEHIANLAGSPAIKKGILQTVKVVDELVKVMGRHKPENIVIEMARENQTTQKGQKNSRERMKRIEEGIKELGSQILKEHPVENTQLQNEKLYLYYLQNGRDMYVDQELDINRLSDYDVDHIVPQSFLKDDSIDNKVLTRSDKARGKSDNVPSEEVVKKMKNYWRQLLNAKLITQRKFDNLTKAERGGLSELDKAGFIKRQLVETRQITKHVAQILDSRMNTKYDENDKLIREVKVITLKSKLVSDFRKDFQFYKVREINNYHHAHDAYLNAVVGTALIKKYPKLESEFVYGDYKVYDVRKMIAKSEQEIGKATAKYFFYSNIMNFFKTEITLANGEIRKRPLIETNGETGEIVWDKGRDFATVRKVLSMPQVNIVKKTEVQTGGFSKESILPKRNSDKLIARKKDWDPKKYGGFDSPTVAYSVLVVAKVEKGKSKKLKSVKELLGITIMERSSFEKNPIDFLEAKGYKEVKKDLIIKLPKYSLFELENGRKRMLASAGELQKGNELALPSKYVNFLYLASHYEKLKGSPEDNEQKQLFVEQHKHYLDEIIEQISEFSKRVILADANLDKVLSAYNKHRDKPIREQAENIIHLFTLTNLGAPAAFKYFDTTIDRKRYTSTKEVLDATLIHQSITGLYETRIDLSQLGGDGGGSSGGSGGGGGTLGDQGSRGSDPLPEPRVTLTVEGIPTEFLVNTGAEHSVLTKPMGKMGSKRTVVAGATGSKVYPWTTKRLLKIGQKQVTHSFLVIPECPAPLLGRDLLTKLKAQIQFSTEGPQVTWEDRPAMCLVLNLEEEYRLHEKPVPPSIDPSWLQLFPMVWAEKAGMGLANQVPPVVVELKSDASPVAVRQYPMSKEAREGIRPHIQRFLDLGILVPCQSPWNTPLLPVKKPGTNDYRPVQDLREVNKRVQDIHPTVPNPYNLLSSLPPSHTWYSVLDLKDAFFCLKLHPNSQPLFAFEWRDPEKGNTGQLTWTRLPQGFKNSPTLFNEALHRDLASFRALNPQVVMLQYVDDLLVAAPTYRDCKEGTRRLLQELSKLGYRVSAKKAQLCREEVTYLGYLLKGGKRWLTPARKATVMKIPTPTTPRQVREFLGKAGFCRLFIPGFASLAAPLYPLTRPKVPFTWTEAHQEAFGRIKEALLSAPALALPDLTKPFALYVDEKEGVARGVLTQTLGPWRRPVAYLSKKLDPVASGWPTCLKAIAAVALLLKDADKLTLGQNVLVIAPHNLESIVRQPPDRWMTNARMTHYQSLLLNERVSFAPPAILNPATLLPVESDDTPIHICSEILAEETGTRPDLRDQPLPGVPAWYTDGSSFIMDGRRQAGAAIVDNKRTVWASNLPEGTSAQKAELIALTQALRLAEGKSINIYTDSRYAFATAHVHGAIYKQRGWLTSAGKDIKNKEEILALLEAIHLPKRVAIIHCPGHQRGTDPVATGNRKADEAAKQAAQSTRILTETTKNAGKRTADGSEFEKRTADGSEFESPKKKAKVE

SEQ ID NO: 6863 - protein, 2094 aa, synthetic construct
MPAAKRVKLDGGDKKYSIGLDIGTNSVGWAVITDEYKVPSKKFKVLGNTDRHSIKKNLIGALLFDSGETAEATRLKRTARRRYTRRKNRICYLQEIFSNEMAKVDDSFFHRLEESFLVEEDKKHERHPIFGNIVDEVAYHEKYPTIYHLRKKLVDSTDKADLRLIYLALAHMIKFRGHFLIEGDLNPDNSDVDKLFIQLVQTYNQLFEENPINASGVDAKAILSARLSKSRRLENLIAQLPGEKKNGLFGNLIALSLGLTPNFKSNFDLAEDAKLQLSKDTYDDDLDNLLAQIGDQYADLFLAAKNLSDAILLSDILRVNTEITKAPLSASMIKRYDEHHQDLTLLKALVRQQLPEKYKEIFFDQSKNGYAGYIDGGASQEEFYKFIKPILEKMDGTEELLVKLNREDLLRKQRTFDNGSIPHQIHLGELHAILRRQEDFYPFLKDNREKIEKILTFRIPYYVGPLARGNSRFAWMTRKSEETITPWNFEEVVDKGASAQSFIERMTNFDKNLPNEKVLPKHSLLYEYFTVYNELTKVKYVTEGMRKPAFLSGEQKKAIVDLLFKTNRKVTVKQLKEDYFKKIECFDSVEISGVEDRFNASLGTYHDLLKIIKDKDFLDNEENEDILEDIVLTLTLFEDREMIEERLKTYAHLFDDKVMKQLKRRRYTGWGRLSRKLINGIRDKQSGKTILDFLKSDGFANRNFMQLIHDDSLTFKEDIQKAQVSGQGDSLHEHIANLAGSPAIKKGILQTVKVVDELVKVMGRHKPENIVIEMARENQTTQKGQKNSRERMKRIEEGIKELGSQILKEHPVENTQLQNEKLYLYYLQNGRDMYVDQELDINRLSDYDVDHIVPQSFLKDDSIDNKVLTRSDKARGKSDNVPSEEVVKKMKNYWRQLLNAKLITQRKFDNLTKAERGGLSELDKAGFIKRQLVETRQITKHVAQILDSRMNTKYDENDKLIREVKVITLKSKLVSDFRKDFQFYKVREINNYHHAHDAYLNAVVGTALIKKYPKLESEFVYGDYKVYDVRKMIAKSEQEIGKATAKYFFYSNIMNFFKTEITLANGEIRKRPLIETNGETGEIVWDKGRDFATVRKVLSMPQVNIVKKTEVQTGGFSKESILPKRNSDKLIARKKDWDPKKYGGFDSPTVAYSVLVVAKVEKGKSKKLKSVKELLGITIMERSSFEKNPIDFLEAKGYKEVKKDLIIKLPKYSLFELENGRKRMLASAGELQKGNELALPSKYVNFLYLASHYEKLKGSPEDNEQKQLFVEQHKHYLDEIIEQISEFSKRVILADANLDKVLSAYNKHRDKPIREQAENIIHLFTLTNLGAPAAFKYFDTTIDRKRYTSTKEVLDATLIHQSITGLYETRIDLSQLGGDGGGSSGGSGGGGGTLNLEDEYRLYETSAEPEVSPGSTWLSDFPQAWAETGGMGLAVRQAPLIIPLKATSTPVSIKQYPMSQEAKLGIKPHIQRLLDQGILVPCQSPWNTPLLPVKKPGTNDYRPVQDLREVNKRVEDIHPTVPNPYNLLSGLPPSHRWYTVLDLKDAFFCLRLHPTSQPLFAFEWRDPGMGISGQLTWTRLPQGFKNSPTLFNEALHRDLADFRIQHPDLILLQYVDDILLAATSELDCQQGTRALLLTLGNLGYRASAKKAQLCQKQVKYLGYLLKEGQRWLTEARKETVMGQPTPKTPRQLREFLGTAGFCRLWIPGFAEMAAPLYPLTKPGTLFNWGPDQQKAYQEIKQALLTAPALGLPDLTKPFELFVDEKQGYAKGVLTQKLGPWRRPVAYLSKKLDPVAAGWPPCLRMVAAIAVLRKDAGKLTMGQPLVILAPHAVEALVKQPPDRWLSNARMTHYQAMLLDTDRVQFGPVVALNPATLLPLPEEGAPHDCLEILAETHGTRPDLTDQPIPDADHTWYTDGSSFLQEGQRKAGAAVTTETEVIWARALPAGTSAQRAELIALTQALKMAEGKRLNVYTDSRYAFATAHIHGEIYRRRGWLTSEGREIKNKSEILALLKALFLPKRLSIIHCLGHQKGDSAEARGNRLADQAAREAAIKTPPDTSTLLAGKRTADGSEFEKRTADGSEFESPKKKAKVE

SEQ ID NO: 6864 - protein, 2094 aa, synthetic construct
MPAAKRVKLDGGDKKYSIGLDIGTNSVGWAVITDEYKVPSKKFKVLGNTDRHSIKKNLIGALLFDSGETAEATRLKRTARRRYTRRKNRICYLQEIFSNEMAKVDDSFFHRLEESFLVEEDKKHERHPIFGNIVDEVAYHEKYPTIYHLRKKLVDSTDKADLRLIYLALAHMIKFRGHFLIEGDLNPDNSDVDKLFIQLVQTYNQLFEENPINASGVDAKAILSARLSKSRRLENLIAQLPGEKKNGLFGNLIALSLGLTPNFKSNFDLAEDAKLQLSKDTYDDDLDNLLAQIGDQYADLFLAAKNLSDAILLSDILRVNTEITKAPLSASMIKRYDEHHQDLTLLKALVRQQLPEKYKEIFFDQSKNGYAGYIDGGASQEEFYKFIKPILEKMDGTEELLVKLNREDLLRKQRTFDNGSIPHQIHLGELHAILRRQEDFYPFLKDNREKIEKILTFRIPYYVGPLARGNSRFAWMTRKSEETITPWNFEEVVDKGASAQSFIERMTNFDKNLPNEKVLPKHSLLYEYFTVYNELTKVKYVTEGMRKPAFLSGEQKKAIVDLLFKTNRKVTVKQLKEDYFKKIECFDSVEISGVEDRFNASLGTYHDLLKIIKDKDFLDNEENEDILEDIVLTLTLFEDREMIEERLKTYAHLFDDKVMKQLKRRRYTGWGRLSRKLINGIRDKQSGKTILDFLKSDGFANRNFMQLIHDDSLTFKEDIQKAQVSGQGDSLHEHIANLAGSPAIKKGILQTVKVVDELVKVMGRHKPENIVIEMARENQTTQKGQKNSRERMKRIEEGIKELGSQILKEHPVENTQLQNEKLYLYYLQNGRDMYVDQELDINRLSDYDVDHIVPQSFLKDDSIDNKVLTRSDKARGKSDNVPSEEVVKKMKNYWRQLLNAKLITQRKFDNLTKAERGGLSELDKAGFIKRQLVETRQITKHVAQILDSRMNTKYDENDKLIREVKVITLKSKLVSDFRKDFQFYKVREINNYHHAHDAYLNAVVGTALIKKYPKLESEFVYGDYKVYDVRKMIAKSEQEIGKATAKYFFYSNIMNFFKTEITLANGEIRKRPLIETNGETGEIVWDKGRDFATVRKVLSMPQVNIVKKTEVQTGGFSKESILPKRNSDKLIARKKDWDPKKYGGFDSPTVAYSVLVVAKVEKGKSKKLKSVKELLGITIMERSSFEKNPIDFLEAKGYKEVKKDLIIKLPKYSLFELENGRKRMLASAGELQKGNELALPSKYVNFLYLASHYEKLKGSPEDNEQKQLFVEQHKHYLDEIIEQISEFSKRVILADANLDKVLSAYNKHRDKPIREQAENIIHLFTLTNLGAPAAFKYFDTTIDRKRYTSTKEVLDATLIHQSITGLYETRIDLSQLGGDGGGSSGGSGGGGGTLNIEDEHRLHETSKEPDVSLGSTWLSDFPQAWAETGGMGLAVRQAPLIIPLKATSTPVSIKQYPMSQEARLGIKPHIQRLLDQGILVPCQSPWNTPLLPVKKPGTNDYRPVQDLREVNKRVEDIHPTVPNPYNLLSGLPPSHQWYTVLDLKDAFFCLRLHPTSQPLFAFEWRDPEMGISGQLTWTRLPQGFKNSPTLFNEALHRDLADFRIQHPDLILLQYVDDLLLAATSELDCQQGTRALLQTLGNLGYRASAKKAQICQKQVKYLGYLLKEGQRWLTEARKETVMGQPTPKTPRQLREFLGTAGFCRLWIPGFAEMAAPLYPLTKPGTLFNWGPDQQKAYQEIKQALLTAPALGLPDLTKPFELFVDEKQGYAKGVLTQKLGPWRRPVAYLSKKLDPVAAGWPPCLRMVAAIAVLTKDAGKLTMGQPLVILAPHAVEALVKQPPDRWLSNARMTHYQALLLDTDRVQFGPVVALNPATLLPLPEEGLQHNCLDILAEAHGTRPDLTDQPLPDADHTWYTDGSSLLQEGQRKAGAAVTTETEVIWAKALPAGTSAQRAELIALTQALKMAEGKKLNVYTDSRYAFATAHIHGEIYRRRGWLTSEGKEIKNKDEILALLKALFLPKRLSIIHCPGHQKGHSAEARGNRMADQAARKAAITETPDTSTLLAGKRTADGSEFEKRTADGSEFESPKKKAKVE

SEQ ID NO: 6865 - protein, 2094 aa, synthetic construct
MPAAKRVKLDGGDKKYSIGLDIGTNSVGWAVITDEYKVPSKKFKVLGNTDRHSIKKNLIGALLFDSGETAEATRLKRTARRRYTRRKNRICYLQEIFSNEMAKVDDSFFHRLEESFLVEEDKKHERHPIFGNIVDEVAYHEKYPTIYHLRKKLVDSTDKADLRLIYLALAHMIKFRGHFLIEGDLNPDNSDVDKLFIQLVQTYNQLFEENPINASGVDAKAILSARLSKSRRLENLIAQLPGEKKNGLFGNLIALSLGLTPNFKSNFDLAEDAKLQLSKDTYDDDLDNLLAQIGDQYADLFLAAKNLSDAILLSDILRVNTEITKAPLSASMIKRYDEHHQDLTLLKALVRQQLPEKYKEIFFDQSKNGYAGYIDGGASQEEFYKFIKPILEKMDGTEELLVKLNREDLLRKQRTFDNGSIPHQIHLGELHAILRRQEDFYPFLKDNREKIEKILTFRIPYYVGPLARGNSRFAWMTRKSEETITPWNFEEVVDKGASAQSFIERMTNFDKNLPNEKVLPKHSLLYEYFTVYNELTKVKYVTEGMRKPAFLSGEQKKAIVDLLFKTNRKVTVKQLKEDYFKKIECFDSVEISGVEDRFNASLGTYHDLLKIIKDKDFLDNEENEDILEDIVLTLTLFEDREMIEERLKTYAHLFDDKVMKQLKRRRYTGWGRLSRKLINGIRDKQSGKTILDFLKSDGFANRNFMQLIHDDSLTFKEDIQKAQVSGQGDSLHEHIANLAGSPAIKKGILQTVKVVDELVKVMGRHKPENIVIEMARENQTTQKGQKNSRERMKRIEEGIKELGSQILKEHPVENTQLQNEKLYLYYLQNGRDMYVDQELDINRLSDYDVDHIVPQSFLKDDSIDNKVLTRSDKARGKSDNVPSEEVVKKMKNYWRQLLNAKLITQRKFDNLTKAERGGLSELDKAGFIKRQLVETRQITKHVAQILDSRMNTKYDENDKLIREVKVITLKSKLVSDFRKDFQFYKVREINNYHHAHDAYLNAVVGTALIKKYPKLESEFVYGDYKVYDVRKMIAKSEQEIGKATAKYFFYSNIMNFFKTEITLANGEIRKRPLIETNGETGEIVWDKGRDFATVRKVLSMPQVNIVKKTEVQTGGFSKESILPKRNSDKLIARKKDWDPKKYGGFDSPTVAYSVLVVAKVEKGKSKKLKSVKELLGITIMERSSFEKNPIDFLEAKGYKEVKKDLIIKLPKYSLFELENGRKRMLASAGELQKGNELALPSKYVNFLYLASHYEKLKGSPEDNEQKQLFVEQHKHYLDEIIEQISEFSKRVILADANLDKVLSAYNKHRDKPIREQAENIIHLFTLTNLGAPAAFKYFDTTIDRKRYTSTKEVLDATLIHQSITGLYETRIDLSQLGGDGGGSSGGSGGGGGTLNIEDEHRLHETSKEPDVSLGSTWLSDFPQAWAETGGMGLAVRQAPLIIPLKATSTPVSIKQYPMSQEARLGIKPHIQRLLDQGILVPCQSPWNTPLLPVKKPGTNDYRPVQDLREVNKRVEDIHPTVPNPYNLLSGLPPSHQWYTVLDLKDAFFCLRLHPTSQPLFAFEWRDPEMGISGQLTWTRLPQGFKNSPTLFDEALHRDLADFRIQHPDLILLQYVDDLLLAATSELDCQQGTRALLQTLGNLGYRASAKKAQICQKQVKYLGYLLKEGQRWLTEARKETVMGQPTPKTPRQLREFLGTAGFCRLWIPGFAEMAAPLYPLTKTGTLFNWGPDQQKAYQEIKQALLTAPALGLPDLTKPFELFVDEKQGYAKGVLTQKLGPWRRPVAYLSKKLDPVAAGWPPCLRMVAAIAVLTKDAGKLTMGQPLVILAPHAVEALVKQPPDRWLSNARMTHYQALLLDTDRVQFGPVVALNPATLLPLPEEGLQHNCLDILAEAHGTRPDLTDQPLPDADHTWYTDGSSLLQEGQRKAGAAVTTETEVIWAKALPAGTSAQRAELIALTQALKMAEGKKLNVYTDSRYAFATAHIHGEIYRRRGLLTSEGKEIKNKDEILALLKALFLPKRLSIIHCPGHQKGHSAEARGNRMADQAARKAAITETPDTSTLLAGKRTADGSEFEKRTADGSEFESPKKKAKVE

SEQ ID NO: 6866 - protein, 2094 aa, synthetic construct; identical to SEQ ID NO: 6864

SEQ ID NO: 6867 - protein, 2088 aa, synthetic construct
MPAAKRVKLDGGDKKYSIGLDIGTNSVGWAVITDEYKVPSKKFKVLGNTDRHSIKKNLIGALLFDSGETAEATRLKRTARRRYTRRKNRICYLQEIFSNEMAKVDDSFFHRLEESFLVEEDKKHERHPIFGNIVDEVAYHEKYPTIYHLRKKLVDSTDKADLRLIYLALAHMIKFRGHFLIEGDLNPDNSDVDKLFIQLVQTYNQLFEENPINASGVDAKAILSARLSKSRRLENLIAQLPGEKKNGLFGNLIALSLGLTPNFKSNFDLAEDAKLQLSKDTYDDDLDNLLAQIGDQYADLFLAAKNLSDAILLSDILRVNTEITKAPLSASMIKRYDEHHQDLTLLKALVRQQLPEKYKEIFFDQSKNGYAGYIDGGASQEEFYKFIKPILEKMDGTEELLVKLNREDLLRKQRTFDNGSIPHQIHLGELHAILRRQEDFYPFLKDNREKIEKILTFRIPYYVGPLARGNSRFAWMTRKSEETITPWNFEEVVDKGASAQSFIERMTNFDKNLPNEKVLPKHSLLYEYFTVYNELTKVKYVTEGMRKPAFLSGEQKKAIVDLLFKTNRKVTVKQLKEDYFKKIECFDSVEISGVEDRFNASLGTYHDLLKIIKDKDFLDNEENEDILEDIVLTLTLFEDREMIEERLKTYAHLFDDKVMKQLKRRRYTGWGRLSRKLINGIRDKQSGKTILDFLKSDGFANRNFMQLIHDDSLTFKEDIQKAQVSGQGDSLHEHIANLAGSPAIKKGILQTVKVVDELVKVMGRHKPENIVIEMARENQTTQKGQKNSRERMKRIEEGIKELGSQILKEHPVENTQLQNEKLYLYYLQNGRDMYVDQELDINRLSDYDVDHIVPQSFLKDDSIDNKVLTRSDKARGKSDNVPSEEVVKKMKNYWRQLLNAKLITQRKFDNLTKAERGGLSELDKAGFIKRQLVETRQITKHVAQILDSRMNTKYDENDKLIREVKVITLKSKLVSDFRKDFQFYKVREINNYHHAHDAYLNAVVGTALIKKYPKLESEFVYGDYKVYDVRKMIAKSEQEIGKATAKYFFYSNIMNFFKTEITLANGEIRKRPLIETNGETGEIVWDKGRDFATVRKVLSMPQVNIVKKTEVQTGGFSKESILPKRNSDKLIARKKDWDPKKYGGFDSPTVAYSVLVVAKVEKGKSKKLKSVKELLGITIMERSSFEKNPIDFLEAKGYKEVKKDLIIKLPKYSLFELENGRKRMLASAGELQKGNELALPSKYVNFLYLASHYEKLKGSPEDNEQKQLFVEQHKHYLDEIIEQISEFSKRVILADANLDKVLSAYNKHRDKPIREQAENIIHLFTLTNLGAPAAFKYFDTTIDRKRYTSTKEVLDATLIHQSITGLYETRIDLSQLGGDGGGSSGGSGGGGGTLQLDDEYRLYSPLVKPDQNIQFWLEQFPQAWAETAGMGLAKQVPPQVIQLKASATPVSVRQYPLSKEAQEGIRPHVQRLIQQGILVPVQSPWNTPLLPVRKPGTNDYRPVQDLREVNKRVQDIHPTVPNPYNLLCALPPQRSWYTVLDLKDAFFCLRLHPTSQPLFAFEWRDPGTGRTGQLTWTRLPQGFKNSPTIFDEALHRDLANFRIQHPQVTLLQYVDDLLLAGATKQDCLEGTKALLLELSDLGYRASAKKAQICRREVTYLGYSLRDGQRWLTEARKKTVVQIPAPTTAKQVREFLGTAGFCRLWIPGFATLAAPLYPLTKEKGEFSWAPEHQKAFDAIKKALLSAPALALPDVTKPFTLYVDERKGVARGVLTQTLGPWRRPVAYLSKKLDPVASGWPVCLKAIAAVAILVKDADKLTLGQNITVIAPHALENIVRQPPDRWMTNARMTHYQSLLLTERVTFAPPAALNPATLLPEETDEPVTHDCHQLLIEETGVRKDLTDIPLTGEVLTWFTDGSSYVVEGKRMAGAAVVDGTRTIWASSLPEGTSAQKAELMALTQALRLAEGKSINIYTDSRYAFATAHVHGAIYKQRGLLTSAGREIKNKEEILSLLEALHLPKRLAIIHCPGHQKAKDPISRGNQMADRVAKQAAQGVNLLAGKRTADGSEFEKRTADGSEFESPKKKAKVE

SEQ ID NO: 6868 - protein, 2088 aa, synthetic construct; identical to SEQ ID NO: 6867

SEQ ID NO: 6869 - protein, 2092 aa, synthetic construct
MPAAKRVKLDGGDKKYSIGLDIGTNSVGWAVITDEYKVPSKKFKVLGNTDRHSIKKNLIGALLFDSGETAEATRLKRTARRRYTRRKNRICYLQEIFSNEMAKVDDSFFHRLEESFLVEEDKKHERHPIFGNIVDEVAYHEKYPTIYHLRKKLVDSTDKADLRLIYLALAHMIKFRGHFLIEGDLNPDNSDVDKLFIQLVQTYNQLFEENPINASGVDAKAILSARLSKSRRLENLIAQLPGEKKNGLFGNLIALSLGLTPNFKSNFDLAEDAKLQLSKDTYDDDLDNLLAQIGDQYADLFLAAKNLSDAILLSDILRVNTEITKAPLSASMIKRYDEHHQDLTLLKALVRQQLPEKYKEIFFDQSKNGYAGYIDGGASQEEFYKFIKPILEKMDGTEELLVKLNREDLLRKQRTFDNGSIPHQIHLGELHAILRRQEDFYPFLKDNREKIEKILTFRIPYYVGPLARGNSRFAWMTRKSEETITPWNFEEVVDKGASAQSFIERMTNFDKNLPNEKVLPKHSLLYEYFTVYNELTKVKYVTEGMRKPAFLSGEQKKAIVDLLFKTNRKVTVKQLKEDYFKKIECFDSVEISGVEDRFNASLGTYHDLLKIIKDKDFLDNEENEDILEDIVLTLTLFEDREMIEERLKTYAHLFDDKVMKQLKRRRYTGWGRLSRKLINGIRDKQSGKTILDFLKSDGFANRNFMQLIHDDSLTFKEDIQKAQVSGQGDSLHEHIANLAGSPAIKKGILQTVKVVDELVKVMGRHKPENIVIEMARENQTTQKGQKNSRERMKRIEEGIKELGSQILKEHPVENTQLQNEKLYLYYLQNGRDMYVDQELDINRLSDYDVDHIVPQSFLKDDSIDNKVLTRSDKARGKSDNVPSEEVVKKMKNYWRQLLNAKLITQRKFDNLTKAERGGLSELDKAGFIKRQLVETRQITKHVAQILDSRMNTKYDENDKLIREVKVITLKSKLVSDFRKDFQFYKVREINNYHHAHDAYLNAVVGTALIKKYPKLESEFVYGDYKVYDVRKMIAKSEQEIGKATAKYFFYSNIMNFFKTEITLANGEIRKRPLIETNGETGEIVWDKGRDFATVRKVLSMPQVNIVKKTEVQTGGFSKESILPKRNSDKLIARKKDWDPKKYGGFDSPTVAYSVLVVAKVEKGKSKKLKSVKELLGITIMERSSFEKNPIDFLEAKGYKEVKKDLIIKLPKYSLFELENGRKRMLASAGELQKGNELALPSKYVNFLYLASHYEKLKGSPEDNEQKQLFVEQHKHYLDEIIEQISEFSKRVILADANLDKVLSAYNKHRDKPIREQAENIIHLFTLTNLGAPAAFKYFDTTIDRKRYTSTKEVLDATLIHQSITGLYETRIDLSQLGGDGGGSSGGSGGGGGVLNLEEEYRLHEKPVPSSIDPSWLQLFPTVWAERAGMGLANQVPPVVVELRSGASPVAVRQYPMSKEAREGIRPHIQRFLDLGVLVPCQSPWNTPLLPVKKPGTNDYRPVQDLREINKRVQDIHPTVPNPYNLLSSLPPSHTWYSVLDLKDAFFCLKLHPNSQPLFAFEWRDPEKGNTGQLTWTRLPQGFKNSPTLFNEALHRDLAPFRALNPQVVLLQYVDDLLVAAPTYRDCKEGTQKLLQELSKLGYRVSAKKAQLCQKEVTYLGYLLKEGKRWLTPARKATVMKIPPPTTPRQVREFLGTAGFCRLWIPGFASLAAPLYPLTKPSIPFIWTEEHQKAFDRIKEALLSAPALALPDLTKPFTLYVDERAGVARGVLTQTLGPWRRPVAYLSKKLDPVASGWPTCLKAVAAVALLLKDADKLTLGQNVTVIASHSLESIVRQPPDRWMTNARMTHYQSLLLNERVSFAPPAVLNPATLLPVESEATPVHRCSEILAEETGTRRDLKDQPLPGVPAWYTDGSSFIAEGKRRAGAAIVDGKRTVWASSLPEGTSAQKAELVALTQALRLAEGKDINIYTDSRYAFATAHIHGAIYKQRGWLTSAGKDIKNKEEILALLEAIHLPKRVAIIHCPGHQKGNDPVATGNRRADEAAKQAALSTRVLAETTKPAGKRTADGSEFEKRTADGSEFESPKKKAKVE

SEQ ID NO: 6870 - protein, 2092 aa, synthetic construct
MPAAKRVKLDGGDKKYSIGLDIGTNSVGWAVITDEYKVPSKKFKVLGNTDRHSIKKNLIGALLFDSGETAEATRLKRTARRRYTRRKNRICYLQEIFSNEMAKVDDSFFHRLEESFLVEEDKKHERHPIFGNIVDEVAYHEKYPTIYHLRKKLVDSTDKADLRLIYLALAHMIKFRGHFLIEGDLNPDNSDVDKLFIQLVQTYNQLFEENPINASGVDAKAILSARLSKSRRLENLIAQLPGEKKNGLFGNLIALSLGLTPNFKSNFDLAEDAKLQLSKDTYDDDLDNLLAQIGDQYADLFLAAKNLSDAILLSDILRVNTEITKAPLSASMIKRYDEHHQDLTLLKALVRQQLPEKYKEIFFDQSKNGYAGYIDGGASQEEFYKFIKPILEKMDGTEELLVKLNREDLLRKQRTFDNGSIPHQIHLGELHAILRRQEDFYPFLKDNREKIEKILTFRIPYYVGPLARGNSRFAWMTRKSEETITPWNFEEVVDKGASAQSFIERMTNFDKNLPNEKVLPKHSLLYEYFTVYNELTKVKYVTEGMRKPAFLSGEQKKAIVDLLFKTNRKVTVKQLKEDYFKKIECFDSVEISGVEDRFNASLGTYHDLLKIIKDKDFLDNEENEDILEDIVLTLTLFEDREMIEERLKTYAHLFDDKVMKQLKRRRYTGWGRLSRKLINGIRDKQSGKTILDFLKSDGFANRNFMQLIHDDSLTFKEDIQKAQVSGQGDSLHEHIANLAGSPAIKKGILQTVKVVDELVKVMGRHKPENIVIEMARENQTTQKGQKNSRERMKRIEEGIKELGSQILKEHPVENTQLQNEKLYLYYLQNGRDMYVDQELDINRLSDYDVDHIVPQSFLKDDSIDNKVLTRSDKARGKSDNVPSEEVVKKMKNYWRQLLNAKLITQRKFDNLTKAERGGLSELDKAGFIKRQLVETRQITKHVAQILDSRMNTKYDENDKLIREVKVITLKSKLVSDFRKDFQFYKVREINNYHHAHDAYLNAVVGTALIKKYPKLESEFVYGDYKVYDVRKMIAKSEQEIGKATAKYFFYSNIMNFFKTEITLANGEIRKRPLIETNGETGEIVWDKGRDFATVRKVLSMPQVNIVKKTEVQTGGFSKESILPKRNSDKLIARKKDWDPKKYGGFDSPTVAYSVLVVAKVEKGKSKKLKSVKELLGITIMERSSFEKNPIDFLEAKGYKEVKKDLIIKLPKYSLFELENGRKRMLASAGELQKGNELALPSKYVNFLYLASHYEKLKGSPEDNEQKQLFVEQHKHYLDEIIEQISEFSKRVILADANLDKVLSAYNKHRDKPIREQAENIIHLFTLTNLGAPAAFKYFDTTIDRKRYTSTKEVLDATLIHQSITGLYETRIDLSQLGGDGGGSSGGSGGGGGVLNLEEEYRLHEKPVPSSIDPSWLQLFPTVWAERAGMGLANQVPPVVVELRSGASPVAVRQYPMSKEAREGIRPHIQRFLDLGVLVPCQSPWNTPLLPVKKPGTNDYRPVQDLREINKRVQDIHPTVPNPYNLLSSLPPSHTWYSVLDLKDAFFCLKLHPNSQPLFAFEWRDPEKGNTGQLTWTRLPQGFKNSPTLFNEALHRDLAPFRALNPQVVLLQYVDDLLVAAPTYRDCKEGTQKLLQELSKLGYRVSAKKAQLCQKEVTYLGYLLKEGKRWLTPARKATVMKIPPPTTPRQVREFLGKAGFCRLFIPGFASLAAPLYPLTKPSIPFIWTEEHQKAFDRIKEALLSAPALALPDLTKPFTLYVDERAGVARGVLTQTLGPWRRPVAYLSKKLDPVASGWPTCLKAVAAVALLLKDADKLTLGQNVTVIASHSLESIVRQPPDRWMTNARMTHYQSLLLNERVSFAPPAVLNPATLLPVESEATPVHRCSEILAEETGTRRDLKDQPLPGVPAWYTDGSSFIAEGKRRAGAAIVDGKRTVWASSLPEGTSAQKAELVALTQALRLAEGKDINIYTDSRYAFATAHIHGAIYKQRGWLTSAGKDIKNKEEILALLEAIHLPKRVAIIHCPGHQKGNDPVATGNRRADEAAKQAALSTRVLAETTKPAGKRTADGSEFEKRTADGSEFESPKKKAKVE

SEQ ID NO: 6871 - protein, 2096 aa, synthetic construct
MPAAKRVKLDGGDKKYSIGLDIGTNSVGWAVITDEYKVPSKKFKVLGNTDRHSIKKNLIGALLFDSGETAEATRLKRTARRRYTRRKNRICYLQEIFSNEMAKVDDSFFHRLEESFLVEEDKKHERHPIFGNIVDEVAYHEKYPTIYHLRKKLVDSTDKADLRLIYLALAHMIKFRGHFLIEGDLNPDNSDVDKLFIQLVQTYNQLFEENPINASGVDAKAILSARLSKSRRLENLIAQLPGEKKNGLFGNLIALSLGLTPNFKSNFDLAEDAKLQLSKDTYDDDLDNLLAQIGDQYADLFLAAKNLSDAILLSDILRVNTEITKAPLSASMIKRYDEHHQDLTLLKALVRQQLPEKYKEIFFDQSKNGYAGYIDGGASQEEFYKFIKPILEKMDGTEELLVKLNREDLLRKQRTFDNGSIPHQIHLGELHAILRRQEDFYPFLKDNREKIEKILTFRIPYYVGPLARGNSRFAWMTRKSEETITPWNFEEVVDKGASAQSFIERMTNFDKNLPNEKVLPKHSLLYEYFTVYNELTKVKYVTEGMRKPAFLSGEQKKAIVDLLFKTNRKVTVKQLKEDYFKKIECFDSVEISGVEDRFNASLGTYHDLLKIIKDKDFLDNEENEDILEDIVLTLTLFEDREMIEERLKTYAHLFDDKVMKQLKRRRYTGWGRLSRKLINGIRDKQSGKTILDFLKSDGFANRNFMQLIHDDSLTFKEDIQKAQVSGQGDSLHEHIANLAGSPAIKKGILQTVKVVDELVKVMGRHKPENIVIEMARENQTTQKGQKNSRERMKRIEEGIKELGSQILKEHPVENTQLQNEKLYLYYLQNGRDMYVDQELDINRLSDYDVDHIVPQSFLKDDSIDNKVLTRSDKARGKSDNVPSEEVVKKMKNYWRQLLNAKLITQRKFDNLTKAERGGLSELDKAGFIKRQLVETRQITKHVAQILDSRMNTKYDENDKLIREVKVITLKSKLVSDFRKDFQFYKVREINNYHHAHDAYLNAVVGTALIKKYPKLESEFVYGDYKVYDVRKMIAKSEQEIGKATAKYFFYSNIMNFFKTEITLANGEIRKRPLIETNGETGEIVWDKGRDFATVRKVLSMPQVNIVKKTEVQTGGFSKESILPKRNSDKLIARKKDWDPKKYGGFDSPTVAYSVLVVAKVEKGKSKKLKSVKELLGITIMERSSFEKNPIDFLEAKGYKEVKKDLIIKLPKYSLFELENGRKRMLASAGELQKGNELALPSKYVNFLYLASHYEKLKGSPEDNEQKQLFVEQHKHYLDEIIEQISEFSKRVILADANLDKVLSAYNKHRDKPIREQAENIIHLFTLTNLGAPAAFKYFDTTIDRKRYTSTKEVLDATLIHQSITGLYETRIDLSQLGGDGGGSSGGGGGSGGTAPLEEEYRLFLEAPIQNVTLLEQWKREIPKVWAEINPPGLASTQAPIHVQLLSTALPVRVRQYPITLEAKRSLRETIRKFRAAGILRPVHSPWNTPLLPVRKSGTSEYRMVQDLREVNKRVETIHPTVPNPYTLLSLLPPDRIWYSVLDLKDAFFCIPLAPESQLIFAFEWADAEEGESGQLTWTRLPQGFKNSPTLFNEALNRDLQGFRLDHPSVSLLQYVDDLLIAADTQAACLSATRDLLMTLAELGYRVSGKKAQLCQEEVTYLGFKIHKGSRSLSNSRTQAILQIPVPKTKRQVREFLGTIGYCRLWIPGFAELAQPLYAATRPGNDPLVWGEKEEEAFQSLKLALTQPPALALPSLDKPFQLFVEETSGAAKGVLTQALGPWKRPVAYLSKRLDPVAAGWPRCLRAIAAAALLTREASKLTFGQDIEITSSHNLESLLRSPPDKWLTNARITQYQVLLLDPPRVRFKQTAALNPATLLPETDDTLPIHHCLDTLDSLTSTRPDLTDQPLAQAEATLFTDGSSYIRDGKRYAGAAVVTLDSVIWAEPLPIGTSAQKAELIALTKALEWSKDKSVNIYTDSRYAFATLHVHGMIYRERGWLTAGGKAIKNAPEILALLTAVWLPKRVAVMHCKGHQKDDAPTSTGNRRADEVAREVAIRPLSTQATISAGKRTADGSEFEKRTADGSEFESPKKKAKVE

SEQ ID NO: 6872 - protein, 2100 aa, synthetic construct
MPAAKRVKLDGGDKKYSIGLDIGTNSVGWAVITDEYKVPSKKFKVLGNTDRHSIKKNLIGALLFDSGETAEATRLKRTARRRYTRRKNRICYLQEIFSNEMAKVDDSFFHRLEESFLVEEDKKHERHPIFGNIVDEVAYHEKYPTIYHLRKKLVDSTDKADLRLIYLALAHMIKFRGHFLIEGDLNPDNSDVDKLFIQLVQTYNQLFEENPINASGVDAKAILSARLSKSRRLENLIAQLPGEKKNGLFGNLIALSLGLTPNFKSNFDLAEDAKLQLSKDTYDDDLDNLLAQIGDQYADLFLAAKNLSDAILLSDILRVNTEITKAPLSASMIKRYDEHHQDLTLLKALVRQQLPEKYKEIFFDQSKNGYAGYIDGGASQEEFYKFIKPILEKMDGTEELLVKLNREDLLRKQRTFDNGSIPHQIHLGELHAILRRQEDFYPFLKDNREKIEKILTFRIPYYVGPLARGNSRFAWMTRKSEETITPWNFEEVVDKGASAQSFIERMTNFDKNLPNEKVLPKHSLLYEYFTVYNELTKVKYVTEGMRKPAFLSGEQKKAIVDLLFKTNRKVTVKQLKEDYFKKIECFDSVEISGVEDRFNASLGTYHDLLKIIKDKDFLDNEENEDILEDIVLTLTLFEDREMIEERLKTYAHLFDDKVMKQLKRRRYTGWGRLSRKLINGIRDKQSGKTILDFLKSDGFANRNFMQLIHDDSLTFKEDIQKAQVSGQGDSLHEHIANLAGSPAIKKGILQTVKVVDELVKVMGRHKPENIVIEMARENQTTQKGQKNSRERMKRIEEGIKELGSQILKEHPVENTQLQNEKLYLYYLQNGRDMYVDQELDINRLSDYDVDHIVPQSFLKDDSIDNKVLTRSDKARGKSDNVPSEEVVKKMKNYWRQLLNAKLITQRKFDNLTKAERGGLSELDKAGFIKRQLVETRQITKHVAQILDSRMNTKYDENDKLIREVKVITLKSKLVSDFRKDFQFYKVREINNYHHAHDAYLNAVVGTALIKKYPKLESEFVYGDYKVYDVRKMIAKSEQEIGKATAKYFFYSNIMNFFKTEITLANGEIRKRPLIETNGETGEIVWDKGRDFATVRKVLSMPQVNIVKKTEVQTGGFSKESILPKRNSDKLIARKKDWDPKKYGGFDSPTVAYSVLVVAKVEKGKSKKLKSVKELLGITIMERSSFEKNPIDFLEAKGYKEVKKDLIIKLPKYSLFELENGRKRMLASAGELQKGNELALPSKYVNFLYLASHYEKLKGSPEDNEQKQLFVEQHKHYLDEIIEQISEFSKRVILADANLDKVLSAYNKHRDKPIREQAENIIHLFTLTNLGAPAAFKYFDTTIDRKRYTSTKEVLDATLIHQSITGLYETRIDLSQLGGDGGGSSGGGGGSGGTVSLQDEHRLFDIPVTTSLPDVWLQDFPQAWAETGGLGRAKCQAPIIIDLKPTAVPVSIKQYPMSLEAHMGIRQHIIKFLELGVLRPCRSPWNTPLLPVKKPGTQDYRPVQDLREINKRTVDIHPTVPNPYNLLSTLKPDYSWYTVLDLKDAFFCLPLAPQSQELFAFEWKDPERGISGQLTWTRLPQGFKNSPTLFNEALHRDLTDFRTQHPEVTLLQYVDDLLLAAPTKKACTQGTRHLLQELGEKGYRASAKKAQICQTKVTYLGYILSEGKRWLTPGRIETVARIPPPRNPREVREFLGTAGFCRLWIPGFAELAAPLYALTKPSTPFTWQTEHQLAFEALKKALLSAPALGLPDTSKPFTLFLDERQGIAKGVLTQKLGPWKRPVAYLSKKLDPVAAGWPPCLRIMAATAMLVKDSAKLTLGQPLTVITPHTLEAIVRQPPDRWITNARLTHYQALLLDTDRVQFGPPVTLNPATLLPVPENQPSPHDCRQVLAETHGTREDLKDQELPDADHTWYTDGSSYLDSGTRRAGAAVVDGHNTIWAQSLPPGTSAQKAELIALTKALELSKGKKANIYTDSRYAFATAHTHGSIYERRGWLTSEGKEIKNKAEIIALLKALFLPQEVAIIHCPGHQKGQDPVAVGNRQADRVARQAAMAEVLTLATEPDNTSHITAGKRTADGSEFEKRTADGSEFESPKKKAKVE

SEQ ID NO: 6873 - protein, 2216 aa, synthetic construct
MPAAKRVKLDGGDKKYSIGLDIGTNSVGWAVITDEYKVPSKKFKVLGNTDRHSIKKNLIGALLFDSGETAEATRLKRTARRRYTRRKNRICYLQEIFSNEMAKVDDSFFHRLEESFLVEEDKKHERHPIFGNIVDEVAYHEKYPTIYHLRKKLVDSTDKADLRLIYLALAHMIKFRGHFLIEGDLNPDNSDVDKLFIQLVQTYNQLFEENPINASGVDAKAILSARLSKSRRLENLIAQLPGEKKNGLFGNLIALSLGLTPNFKSNFDLAEDAKLQLSKDTYDDDLDNLLAQIGDQYADLFLAAKNLSDAILLSDILRVNTEITKAPLSASMIKRYDEHHQDLTLLKALVRQQLPEKYKEIFFDQSKNGYAGYIDGGASQEEFYKFIKPILEKMDGTEELLVKLNREDLLRKQRTFDNGSIPHQIHLGELHAILRRQEDFYPFLKDNREKIEKILTFRIPYYVGPLARGNSRFAWMTRKSEETITPWNFEEVVDKGASAQSFIERMTNFDKNLPNEKVLPKHSLLYEYFTVYNELTKVKYVTEGMRKPAFLSGEQKKAIVDLLFKTNRKVTVKQLKEDYFKKIECFDSVEISGVEDRFNASLGTYHDLLKIIKDKDFLDNEENEDILEDIVLTLTLFEDREMIEERLKTYAHLFDDKVMKQLKRRRYTGWGRLSRKLINGIRDKQSGKTILDFLKSDGFANRNFMQLIHDDSLTFKEDIQKAQVSGQGDSLHEHIANLAGSPAIKKGILQTVKVVDELVKVMGRHKPENIVIEMARENQTTQKGQKNSRERMKRIEEGIKELGSQILKEHPVENTQLQNEKLYLYYLQNGRDMYVDQELDINRLSDYDVDHIVPQSFLKDDSIDNKVLTRSDKARGKSDNVPSEEVVKKMKNYWRQLLNAKLITQRKFDNLTKAERGGLSELDKAGFIKRQLVETRQITKHVAQILDSRMNTKYDENDKLIREVKVITLKSKLVSDFRKDFQFYKVREINNYHHAHDAYLNAVVGTALIKKYPKLESEFVYGDYKVYDVRKMIAKSEQEIGKATAKYFFYSNIMNFFKTEITLANGEIRKRPLIETNGETGEIVWDKGRDFATVRKVLSMPQVNIVKKTEVQTGGFSKESILPKRNSDKLIARKKDWDPKKYGGFDSPTVAYSVLVVAKVEKGKSKKLKSVKELLGITIMERSSFEKNPIDFLEAKGYKEVKKDLIIKLPKYSLFELENGRKRMLASAGELQKGNELALPSKYVNFLYLASHYEKLKGSPEDNEQKQLFVEQHKHYLDEIIEQISEFSKRVILADANLDKVLSAYNKHRDKPIREQAENIIHLFTLTNLGAPAAFKYFDTTIDRKRYTSTKEVLDATLIHQSITGLYETRIDLSQLGGDGGGSSGGGGGSGGTLGDQGSRGSDPLPEPRVTLTVEGIPTEFLVNTGAEHSVLTKPMGKMGSKRTVVAGATGSKVYPWTTKRLLKIGQKQVTHSFLVIPECPAPLLGRDLLTKLKAQIQFSTEGPQVTWEDRPAMCLVLNLEEEYRLHEKPVPPSIDPSWLQLFPMVWAEKAGMGLANQVPPVVVELKSDASPVAVRQYPMSKEAREGIRPHIQRFLDLGILVPCQSPWNTPLLPVKKPGTNDYRPVQDLREVNKRVQDIHPTVPNPYNLLSSLPPSHTWYSVLDLKDAFFCLKLHPNSQPLFAFEWRDPEKGNTGQLTWTRLPQGFKNSPTLFDEALHRDLASFRALNPQVVMLQYVDDLLVAAPTYRDCKEGTRRLLQELSKLGYRVSAKKAQLCREEVTYLGYLLKGGKRWLTPARKATVMKIPTPTTPRQVREFLGTAGFCRLWIPGFASLAAPLYPLTREKVPFTWTEAHQEAFGRIKEALLSAPALALPDLTKPFALYVDEKEGVARGVLTQTLGPWRRPVAYLSKKLDPVASGWPTCLKAIAAVALLLKDADKLTLGQNVLVIAPHNLESIVRQPPDRWMTNARMTHYQSLLLNERVSFAPPAILNPATLLPVESDDTPIHICSEILAEETGTRPDLRDQPLPGVPAWYTDGSSFIMDGRRQAGAAIVDNKRTVWASNLPEGTSAQKAELIALTQALRLAEGKSINIYTDSRYAFATAHVHGAIYKQRGLLTSAGKDIKNKEEILALLEAIHLPKRVAIIHCPGHQRGTDPVATGNRKADEAAKQAAQSTRILTETTKNAGKRTADGSEFEKRTADGSEFESPKKKAKVE

SEQ ID NO: 6874 - protein, 2125 aa, synthetic construct
MPAAKRVKLDGGDKKYSIGLDIGTNSVGWAVITDEYKVPSKKFKVLGNTDRHSIKKNLIGALLFDSGETAEATRLKRTARRRYTRRKNRICYLQEIFSNEMAKVDDSFFHRLEESFLVEEDKKHERHPIFGNIVDEVAYHEKYPTIYHLRKKLVDSTDKADLRLIYLALAHMIKFRGHFLIEGDLNPDNSDVDKLFIQLVQTYNQLFEENPINASGVDAKAILSARLSKSRRLENLIAQLPGEKKNGLFGNLIALSLGLTPNFKSNFDLAEDAKLQLSKDTYDDDLDNLLAQIGDQYADLFLAAKNLSDAILLSDILRVNTEITKAPLSASMIKRYDEHHQDLTLLKALVRQQLPEKYKEIFFDQSKNGYAGYIDGGASQEEFYKFIKPILEKMDGTEELLVKLNREDLLRKQRTFDNGSIPHQIHLGELHAILRRQEDFYPFLKDNREKIEKILTFRIPYYVGPLARGNSRFAWMTRKSEETITPWNFEEVVDKGASAQSFIERMTNFDKNLPNEKVLPKHSLLYEYFTVYNELTKVKYVTEGMRKPAFLSGEQKKAIVDLLFKTNRKVTVKQLKEDYFKKIECFDSVEISGVEDRFNASLGTYHDLLKIIKDKDFLDNEENEDILEDIVLTLTLFEDREMIEERLKTYAHLFDDKVMKQLKRRRYTGWGRLSRKLINGIRDKQSGKTILDFLKSDGFANRNFMQLIHDDSLTFKEDIQKAQVSGQGDSLHEHIANLAGSPAIKKGILQTVKVVDELVKVMGRHKPENIVIEMARENQTTQKGQKNSRERMKRIEEGIKELGSQILKEHPVENTQLQNEKLYLYYLQNGRDMYVDQELDINRLSDYDVDHIVPQSFLKDDSIDNKVLTRSDKARGKSDNVPSEEVVKKMKNYWRQLLNAKLITQRKFDNLTKAERGGLSELDKAGFIKRQLVETRQITKHVAQILDSRMNTKYDENDKLIREVKVITLKSKLVSDFRKDFQFYKVREINNYHHAHDAYLNAVVGTALIKKYPKLESEFVYGDYKVYDVRKMIAKSEQEIGKATAKYFFYSNIMNFFKTEITLANGEIRKRPLIETNGETGEIVWDKGRDFATVRKVLSMPQVNIVKKTEVQTGGFSKESILPKRNSDKLIARKKDWDPKKYGGFDSPTVAYSVLVVAKVEKGKSKKLKSVKELLGITIMERSSFEKNPIDFLEAKGYKEVKKDLIIKLPKYSLFELENGRKRMLASAGELQKGNELALPSKYVNFLYLASHYEKLKGSPEDNEQKQLFVEQHKHYLDEIIEQISEFSKRVILADANLDKVLSAYNKHRDKPIREQAENIIHLFTLTNLGAPAAFKYFDTTIDRKRYTSTKEVLDATLIHQSITGLYETRIDLSQLGGDGGGSSGGGGGSGGLLGRDLLTKLKAQIQFSTEGPQVTWEDRPAMCLVLNLEEEYRLHEKPVPPSIDPSWLQLFPMVWAEKAGMGLANQVPPVVVELKSDASPVAVRQYPMSKEAREGIRPHIQRFLDLGILVPCQSPWNTPLLPVKKPGTNDYRPVQDLREVNKRVQDIHPTVPNPYNLLSSLPPSHTWYSVLDLKDAFFCLKLHPNSQPLFAFEWRDPEKGNTGQLTWTRLPQGFKNSPTLFNEALHRDLASFRALNPQVVMLQYVDDLLVAAPTYRDCKEGTRRLLQELSKLGYRVSAKKAQLCREEVTYLGYLLKGGKRWLTPARKATVMKIPTPTTPRQVREFLGTAGFCRLWIPGFASLAAPLYPLTRPKVPFTWTEAHQEAFGRIKEALLSAPALALPDLTKPFALYVDEKEGVARGVLTQTLGPWRRPVAYLSKKLDPVASGWPTCLKAIAAVALLLKDADKLTLGQNVLVIAPHNLESIVRQPPDRWMTNARMTHYQSLLLNERVSFAPPAILNPATLLPVESDDTPIHICSEILAEETGTRPDLRDQPLPGVPAWYTDGSSFIMDGRRQAGAAIVDNKRTVWASNLPEGTSAQKAELIALTQALRLAEGKSINIYTDSRYAFATAHVHGAIYKQRGWLTSAGKDIKNKEEILALLEAIHLPKRVAIIHCPGHQRGTDPVATGNRKADEAAKQAAQSTRILTETTKNAGKRTADGSEFEKRTADGSEFESPKKKAKVE

SEQ ID NO: 6875 - protein, 2094 aa, synthetic construct; identical to SEQ ID NO: 4517

SEQ ID NO: 6876 - protein, 2094 aa, synthetic construct; identical to SEQ ID NO: 4517

SEQ ID NO: 6877 - protein, 2094 aa, synthetic construct
MPAAKRVKLDGGDKKYSIGLDIGTNSVGWAVITDEYKVPSKKFKVLGNTDRHSIKKNLIGALLFDSGETAEATRLKRTARRRYTRRKNRICYLQEIFSNEMAKVDDSFFHRLEESFLVEEDKKHERHPIFGNIVDEVAYHEKYPTIYHLRKKLVDSTDKADLRLIYLALAHMIKFRGHFLIEGDLNPDNSDVDKLFIQLVQTYNQLFEENPINASGVDAKAILSARLSKSRRLENLIAQLPGEKKNGLFGNLIALSLGLTPNFKSNFDLAEDAKLQLSKDTYDDDLDNLLAQIGDQYADLFLAAKNLSDAILLSDILRVNTEITKAPLSASMIKRYDEHHQDLTLLKALVRQQLPEKYKEIFFDQSKNGYAGYIDGGASQEEFYKFIKPILEKMDGTEELLVKLNREDLLRKQRTFDNGSIPHQIHLGELHAILRRQEDFYPFLKDNREKIEKILTFRIPYYVGPLARGNSRFAWMTRKSEETITPWNFEEVVDKGASAQSFIERMTNFDKNLPNEKVLPKHSLLYEYFTVYNELTKVKYVTEGMRKPAFLSGEQKKAIVDLLFKTNRKVTVKQLKEDYFKKIECFDSVEISGVEDRFNASLGTYHDLLKIIKDKDFLDNEENEDILEDIVLTLTLFEDREMIEERLKTYAHLFDDKVMKQLKRRRYTGWGRLSRKLINGIRDKQSGKTILDFLKSDGFANRNFMQLIHDDSLTFKEDIQKAQVSGQGDSLHEHIANLAGSPAIKKGILQTVKVVDELVKVMGRHKPENIVIEMARENQTTQKGQKNSRERMKRIEEGIKELGSQILKEHPVENTQLQNEKLYLYYLQNGRDMYVDQELDINRLSDYDVDHIVPQSFLKDDSIDNKVLTRSDKARGKSDNVPSEEVVKKMKNYWRQLLNAKLITQRKFDNLTKAERGGLSELDKAGFIKRQLVETRQITKHVAQILDSRMNTKYDENDKLIREVKVITLKSKLVSDFRKDFQFYKVREINNYHHAHDAYLNAVVGTALIKKYPKLESEFVYGDYKVYDVRKMIAKSEQEIGKATAKYFFYSNIMNFFKTEITLANGEIRKRPLIETNGETGEIVWDKGRDFATVRKVLSMPQVNIVKKTEVQTGGFSKESILPKRNSDKLIARKKDWDPKKYGGFDSPTVAYSVLVVAKVEKGKSKKLKSVKELLGITIMERSSFEKNPIDFLEAKGYKEVKKDLIIKLPKYSLFELENGRKRMLASAGELQKGNELALPSKYVNFLYLASHYEKLKGSPEDNEQKQLFVEQHKHYLDEIIEQISEFSKRVILADANLDKVLSAYNKHRDKPIREQAENIIHLFTLTNLGAPAAFKYFDTTIDRKRYTSTKEVLDATLIHQSITGLYETRIDLSQLGGDGGGSSGGGGGSGGTLGIEDEYRLHETSTEPDVSLGSTWLSDFPQAWAETGGMGLAVRQAPLIIPLKATSTPVSIQQYPMSHEARLGIKPHIQRLLDQGILVPCQSPWNTPLLPVKKPGTNDYRPVQDLREVNKRVEDIHPTVPNPYNLLSGLPPSHQWYTVLDLKDAFFCLRLHPTSQPLFAFEWRDPGMGISGQLTWTRLPQGFKNSPTLFNEALHRDLADFRIQHPDLILLQYVDDILLAATSELDCQQGTRALLQTLGDLGYRASAKKAQICQKQVKYLGYLLREGQRWLTEARKETVMGQPVPKTPRQLREFLGTAGFCRLWIPGFAEMAAPLYPLTKPGTLFSWGPDQQKAYQEIKQALLTAPALGLPDLTKPFELFVDEKQGYAKGVLTQKLGPWRRPVAYLSKKLDPVAAGWPPCLRMVAAIAVLTKDAGKLTMGQPLVILAPHAVEALVKQPPDRWLSNARMTHYQAMLLDTDRVQFGPVVALNPATLLPLPEEGAPHDCLEILAETHGTRPDLTDQPIPDADHTWYTDGSSFLQEGQRKAGAAVTTETEVIWAGALPAGTSAQRAELIALTQALKMAEGKRLNVYTDSRYAFATAHIHGEIYRRRGWLTSEGREIKNKSEILALLKALFLPKRLSIIHCLGHQKGDSAEARGNRLADQAAREAAIKTPPDTSTLLAGKRTADGSEFEKRTADGSEFESPKKKAKVE

SEQ ID NO: 6878 - protein, 2094 aa, synthetic construct
MPAAKRVKLDGGDKKYSIGLDIGTNSVGWAVITDEYKVPSKKFKVLGNTDRHSIKKNLIGALLFDSGETAEATRLKRTARRRYTRRKNRICYLQEIFSNEMAKVDDSFFHRLEESFLVEEDKKHERHPIFGNIVDEVAYHEKYPTIYHLRKKLVDSTDKADLRLIYLALAHMIKFRGHFLIEGDLNPDNSDVDKLFIQLVQTYNQLFEENPINASGVDAKAILSARLSKSRRLENLIAQLPGEKKNGLFGNLIALSLGLTPNFKSNFDLAEDAKLQLSKDTYDDDLDNLLAQIGDQYADLFLAAKNLSDAILLSDILRVNTEITKAPLSASMIKRYDEHHQDLTLLKALVRQQLPEKYKEIFFDQSKNGYAGYIDGGASQEEFYKFIKPILEKMDGTEELLVKLNREDLLRKQRTFDNGSIPHQIHLGELHAILRRQEDFYPFLKDNREKIEKILTFRIPYYVGPLARGNSRFAWMTRKSEETITPWNFEEVVDKGASAQSFIERMTNFDKNLPNEKVLPKHSLLYEYFTVYNELTKVKYVTEGMRKPAFLSGEQKKAIVDLLFKTNRKVTVKQLKEDYFKKIECFDSVEISGVEDRFNASLGTYHDLLKIIKDKDFLDNEENEDILEDIVLTLTLFEDREMIEERLKTYAHLFDDKVMKQLKRRRYTGWGRLSRKLINGIRDKQSGKTILDFLKSDGFANRNFMQLIHDDSLTFKEDIQKAQVSGQGDSLHEHIANLAGSPAIKKGILQTVKVVDELVKVMGRHKPENIVIEMARENQTTQKGQKNSRERMKRIEEGIKELGSQILKEHPVENTQLQNEKLYLYYLQNGRDMYVDQELDINRLSDYDVDHIVPQSFLKDDSIDNKVLTRSDKARGKSDNVPSEEVVKKMKNYWRQLLNAKLITQRKFDNLTKAERGGLSELDKAGFIKRQLVETRQITKHVAQILDSRMNTKYDENDKLIREVKVITLKSKLVSDFRKDFQFYKVREINNYHHAHDAYLNAVVGTALIKKYPKLESEFVYGDYKVYDVRKMIAKSEQEIGKATAKYFFYSNIMNFFKTEITLANGEIRKRPLIETNGETGEIVWDKGRDFATVRKVLSMPQVNIVKKTEVQTGGFSKESILPKRNSDKLIARKKDWDPKKYGGFDSPTVAYSVLVVAKVEKGKSKKLKSVKELLGITIMERSSFEKNPIDFLEAKGYKEVKKDLIIKLPKYSLFELENGRKRMLASAGELQKGNELALPSKYVNFLYLASHYEKLKGSPEDNEQKQLFVEQHKHYLDEIIEQISEFSKRVILADANLDKVLSAYNKHRDKPIREQAENIIHLFTLTNLGAPAAFKYFDTTIDRKRYTSTKEVLDATLIHQSITGLYETRIDLSQLGGDGGGSSGGGGGSGGTLNIEDEYRLHETSKEPDVSLGSTWLSDFPQAWAETGGMGLAVRQAPLIIPLKATSTPVSIKQYPMSQEARLGIKPHIQRLLDQGILVPCQSPWNTPLLPVKKPGTNDYRPVQDLREVNKRVEDIHPTVPNPYNLLSGLPPSHQWYTVLDLKDAFFCLRLHPTSQPLFAFEWRDPEMGISGQLTWTRLPQGFKNSPTLFNEALHRDLAGFRIQHPDLILLQYVDDLLLAATSELDCQQGTRALLQTLGDLGYRASAKKAQICQKQVKYLGYLLKEGQRWLTEARKETVMGQPIPKTPRQLREFLGTAGFCRLWIPGFAEMAAPLYPLTKPGTLFNWGPDQQKAFQEIKQALLTAPALGLPDLTKPFELFVDEKQGYAKGVLTQKLGPWRRPVAYLSKKLDPVAAGWPPCLRMVAAIAVLTKDAGKLTMGQPLVILAPHAVEALVKQPPDRWLSNARMTHYQALLLDTDRVQFGPVVALNPATLLPLPEEGLQHDCLDILAEAHGTRSDLMDQPLPDADHTWYTDGSSFLQEGQRKAGAAVTTETEVIWARALPAGTSAQRAELIALTQALKMAEGKKLNVYTDSRYAFATAHIHGEIYRRRGWLTSEGKEIKNKDEILALLKALFLPKRLSIIHCPGHQKGNSAEARGNRMADQAAREVATRETPETSTLLAGKRTADGSEFEKRTADGSEFESPKKKAKVE

SEQ ID NO: 6879 - protein, 2094 aa, synthetic construct
MPAAKRVKLDGGDKKYSIGLDIGTNSVGWAVITDEYKVPSKKFKVLGNTDRHSIKKNLIGALLFDSGETAEATRLKRTARRRYTRRKNRICYLQEIFSNEMAKVDDSFFHRLEESFLVEEDKKHERHPIFGNIVDEVAYHEKYPTIYHLRKKLVDSTDKADLRLIYLALAHMIKFRGHFLIEGDLNPDNSDVDKLFIQLVQTYNQLFEENPINASGVDAKAILSARLSKSRRLENLIAQLPGEKKNGLFGNLIALSLGLTPNFKSNFDLAEDAKLQLSKDTYDDDLDNLLAQIGDQYADLFLAAKNLSDAILLSDILRVNTEITKAPLSASMIKRYDEHHQDLTLLKALVRQQLPEKYKEIFFDQSKNGYAGYIDGGASQEEFYKFIKPILEKMDGTEELLVKLNREDLLRKQRTFDNGSIPHQIHLGELHAILRRQEDFYPFLKDNREKIEKILTFRIPYYVGPLARGNSRFAWMTRKSEETITPWNFEEVVDKGASAQSFIERMTNFDKNLPNEKVLPKHSLLYEYFTVYNELTKVKYVTEGMRKPAFLSGEQKKAIVDLLFKTNRKVTVKQLKEDYFKKIECFDSVEISGVEDRFNASLGTYHDLLKIIKDKDFLDNEENEDILEDIVLTLTLFEDREMIEERLKTYAHLFDDKVMKQLKRRRYTGWGRLSRKLINGIRDKQSGKTILDFLKSDGFANRNFMQLIHDDSLTFKEDIQKAQVSGQGDSLHEHIANLAGSPAIKKGILQTVKVVDELVKVMGRHKPENIVIEMARENQTTQKGQKNSRERMKRIEEGIKELGSQILKEHPVENTQLQNEKLYLYYLQNGRDMYVDQELDINRLSDYDVDHIVPQSFLKDDSIDNKVLTRSDKARGKSDNVPSEEVVKKMKNYWRQLLNAKLITQRKFDNLTKAERGGLSELDKAGFIKRQLVETRQITKHVAQILDSRMNTKYDENDKLIREVKVITLKSKLVSDFRKDFQFYKVREINNYHHAHDAYLNAVVGTALIKKYPKLESEFVYGDYKVYDVRKMIAKSEQEIGKATAKYFFYSNIMNFFKTEITLANGEIRKRPLIETNGETGEIVWDKGRDFATVRKVLSMPQVNIVKKTEVQTGGFSKESILPKRNSDKLIARKKDWDPKKYGGFDSPTVAYSVLVVAKVEKGKSKKLKSVKELLGITIMERSSFEKNPIDFLEAKGYKEVKKDLIIKLPKYSLFELENGRKRMLASAGELQKGNELALPSKYVNFLYLASHYEKLKGSPEDNEQKQLFVEQHKHYLDEIIEQISEFSKRVILADANLDKVLSAYNKHRDKPIREQAENIIHLFTLTNLGAPAAFKYFDTTIDRKRYTSTKEVLDATLIHQSITGLYETRIDLSQLGGDGGGSSGGGGGSGGTLNIEDEYRLHETSKEPDVSLGSTWLSDFPQAWAETGGMGLAVRQAPLIIPLKATSTPVSIKQYPMSQEARLGIKPHIQRLLDQGILVPCQSPWNTPLLPVKKPGTNDYRPVQDLREVNKRVEDIHPTVPNPYNLLSGLPPSHQWYTVLDLKDAFFCLRLHPTSQPLFAFEWRDPEMGISGQLTWTRLPQGFKNSPTLFNEALHRDLAGFRIQHPDLILLQYVDDLLLAATSELDCQQGTRALLQTLGDLGYRASAKKAQICQKQVKYLGYLLKEGQRWLTEARKETVMGQPIPKTPRQLREFLGKAGFCRLFIPGFAEMAAPLYPLTKPGTLFNWGPDQQKAFQEIKQALLTAPALGLPDLTKPFELFVDEKQGYAKGVLTQKLGPWRRPVAYLSKKLDPVAAGWPPCLRMVAAIAVLTKDAGKLTMGQPLVILAPHAVEALVKQPPDRWLSNARMTHYQALLLDTDRVQFGPVVALNPATLLPLPEEGLQHDCLDILAEAHGTRSDLMDQPLPDADHTWYTDGSSFLQEGQRKAGAAVTTETEVIWARALPAGTSAQRAELIALTQALKMAEGKKLNVYTDSRYAFATAHIHGEIYRRRGWLTSEGKEIKNKDEILALLKALFLPKRLSIIHCPGHQKGNSAEARGNRMADQAAREVATRETPETSTLLAGKRTADGSEFEKRTADGSEFESPKKKAKVE

SEQ ID NO: 6880 - protein, 2114 aa, synthetic construct
MPAAKRVKLDGGDKKYSIGLDIGTNSVGWAVITDEYKVPSKKFKVLGNTDRHSIKKNLIGALLFDSGETAEATRLKRTARRRYTRRKNRICYLQEIFSNEMAKVDDSFFHRLEESFLVEEDKKHERHPIFGNIVDEVAYHEKYPTIYHLRKKLVDSTDKADLRLIYLALAHMIKFRGHFLIEGDLNPDNSDVDKLFIQLVQTYNQLFEENPINASGVDAKAILSARLSKSRRLENLIAQLPGEKKNGLFGNLIALSLGLTPNFKSNFDLAEDAKLQLSKDTYDDDLDNLLAQIGDQYADLFLAAKNLSDAILLSDILRVNTEITKAPLSASMIKRYDEHHQDLTLLKALVRQQLPEKYKEIFFDQSKNGYAGYIDGGASQEEFYKFIKPILEKMDGTEELLVKLNREDLLRKQRTFDNGSIPHQIHLGELHAILRRQEDFYPFLKDNREKIEKILTFRIPYYVGPLARGNSRFAWMTRKSEETITPWNFEEVVDKGASAQSFIERMTNFDKNLPNEKVLPKHSLLYEYFTVYNELTKVKYVTEGMRKPAFLSGEQKKAIVDLLFKTNRKVTVKQLKEDYFKKIECFDSVEISGVEDRFNASLGTYHDLLKIIKDKDFLDNEENEDILEDIVLTLTLFEDREMIEERLKTYAHLFDDKVMKQLKRRRYTGWGRLSRKLINGIRDKQSGKTILDFLKSDGFANRNFMQLIHDDSLTFKEDIQKAQVSGQGDSLHEHIANLAGSPAIKKGILQTVKVVDELVKVMGRHKPENIVIEMARENQTTQKGQKNSRERMKRIEEGIKELGSQILKEHPVENTQLQNEKLYLYYLQNGRDMYVDQELDINRLSDYDVDHIVPQSFLKDDSIDNKVLTRSDKARGKSDNVPSEEVVKKMKNYWRQLLNAKLITQRKFDNLTKAERGGLSELDKAGFIKRQLVETRQITKHVAQILDSRMNTKYDENDKLIREVKVITLKSKLVSDFRKDFQFYKVREINNYHHAHDAYLNAVVGTALIKKYPKLESEFVYGDYKVYDVRKMIAKSEQEIGKATAKYFFYSNIMNFFKTEITLANGEIRKRPLIETNGETGEIVWDKGRDFATVRKVLSMPQVNIVKKTEVQTGGFSKESILPKRNSDKLIARKKDWDPKKYGGFDSPTVAYSVLVVAKVEKGKSKKLKSVKELLGITIMERSSFEKNPIDFLEAKGYKEVKKDLIIKLPKYSLFELENGRKRMLASAGELQKGNELALPSKYVNFLYLASHYEKLKGSPEDNEQKQLFVEQHKHYLDEIIEQISEFSKRVILADANLDKVLSAYNKHRDKPIREQAENIIHLFTLTNLGAPAAFKYFDTTIDRKRYTSTKEVLDATLIHQSITGLYETRIDLSQLGGDGGGSSGGGGGSGGVQEISDSRPMLHIYLNGRRFLGLLDTGADKTCIAGRDWPANWPIHQTESSLQGLGMACGVARSSQPLRWQHEDKSGIIHPFVIPTLPFTLWGRDIMKDIKVRLMTDSPDDSQDLMIGAIESNLFADQISWKSDQPVWLNQWPLKQEKLQALQQLVTEQLQLGHLEESNSPWNTPVFVIKKKSGKWRLLQDLRAVNATMHDMGALQPGLPSPVAVPKGWEIIIIDLQDCFFNIKLHPEDCKRFAFSVPSPNFKRPYQRFQWKVLPQGMKNSPTLCQKFVDKAILTVRDKYQDSYIVHYMDDILLAHPSRSIVDEILTSMIQALNKHGLVVSTEKIQKYDNLKYLGTHIQGDSVSYQKLQIRTDKLRTLNDFQKLLGNINWIRPFLKLTTGELKPLFEILNGDSNPISTRKLTPEACKALQLMNERLSTARVKRLDLSQPWSLCILKTEYTPTACLWQDGVVEWIHLPHISPKVITPYDIFCTQLIIKGRHRSKELFSKDPDYIVVPYTKVQFDLLLQEKEDWPISLLGFLGEVHFHLPKDPLLTFTLQTAIIFPHMTSTTPLEKGIVIFTDGSANGRSVTYIQGREPIIKENTQNTAQQAEIVAVITAFEEVSQPFNLYTDSKYVTGLFPEIETATLSPRTKIYTELKHLQRLIHKRQEKFYIGHIRGHTGLPGPLAQGNAYADSLTRILTAAGKRTADGSEFEKRTADGSEFESPKKKAKVE

SEQ ID NO: 6881 - protein, 2086 aa, synthetic construct
MPAAKRVKLDGGDKKYSIGLDIGTNSVGWAVITDEYKVPSKKFKVLGNTDRHSIKKNLIGALLFDSGETAEATRLKRTARRRYTRRKNRICYLQEIFSNEMAKVDDSFFHRLEESFLVEEDKKHERHPIFGNIVDEVAYHEKYPTIYHLRKKLVDSTDKADLRLIYLALAHMIKFRGHFLIEGDLNPDNSDVDKLFIQLVQTYNQLFEENPINASGVDAKAILSARLSKSRRLENLIAQLPGEKKNGLFGNLIALSLGLTPNFKSNFDLAEDAKLQLSKDTYDDDLDNLLAQIGDQYADLFLAAKNLSDAILLSDILRVNTEITKAPLSASMIKRYDEHHQDLTLLKALVRQQLPEKYKEIFFDQSKNGYAGYIDGGASQEEFYKFIKPILEKMDGTEELLVKLNREDLLRKQRTFDNGSIPHQIHLGELHAILRRQEDFYPFLKDNREKIEKILTFRIPYYVGPLARGNSRFAWMTRKSEETITPWNFEEVVDKGASAQSFIERMTNFDKNLPNEKVLPKHSLLYEYFTVYNELTKVKYVTEGMRKPAFLSGEQKKAIVDLLFKTNRKVTVKQLKEDYFKKIECFDSVEISGVEDRFNASLGTYHDLLKIIKDKDFLDNEENEDILEDIVLTLTLFEDREMIEERLKTYAHLFDDKVMKQLKRRRYTGWGRLSRKLINGIRDKQSGKTILDFLKSDGFANRNFMQLIHDDSLTFKEDIQKAQVSGQGDSLHEHIANLAGSPAIKKGILQTVKVVDELVKVMGRHKPENIVIEMARENQTTQKGQKNSRERMKRIEEGIKELGSQILKEHPVENTQLQNEKLYLYYLQNGRDMYVDQELDINRLSDYDVDHIVPQSFLKDDSIDNKVLTRSDKARGKSDNVPSEEVVKKMKNYWRQLLNAKLITQRKFDNLTKAERGGLSELDKAGFIKRQLVETRQITKHVAQILDSRMNTKYDENDKLIREVKVITLKSKLVSDFRKDFQFYKVREINNYHHAHDAYLNAVVGTALIKKYPKLESEFVYGDYKVYDVRKMIAKSEQEIGKATAKYFFYSNIMNFFKTEITLANGEIRKRPLIETNGETGEIVWDKGRDFATVRKVLSMPQVNIVKKTEVQTGGFSKESILPKRNSDKLIARKKDWDPKKYGGFDSPTVAYSVLVVAKVEKGKSKKLKSVKELLGITIMERSSFEKNPIDFLEAKGYKEVKKDLIIKLPKYSLFELENGRKRMLASAGELQKGNELALPSKYVNFLYLASHYEKLKGSPEDNEQKQLFVEQHKHYLDEIIEQISEFSKRVILADANLDKVLSAYNKHRDKPIREQAENIIHLFTLTNLGAPAAFKYFDTTIDRKRYTSTKEVLDATLIHQSITGLYETRIDLSQLGGDGGGSSGGGGGSGGLDDEYRLYSPLVKPDQNIQFWLEQFPQAWAETAGMGLAKQVPPQVIQLKASATPVSVRQYPLSKEAQEGIRPHVQRLIQQGILVPVQSPWNTPLLPVRKPGTNDYRPVQDLREVNKRVQDIHPTVPNPYNLLCALPPQRSWYTVLDLKDAFFCLRLHPTSQPLFAFEWRDPGTGRTGQLTWTRLPQGFKNSPTIFNEALHRDLANFRIQHPQVTLLQYVDDLLLAGATKQDCLEGTKALLLELSDLGYRASAKKAQICRREVTYLGYSLRDGQRWLTEARKKTVVQIPAPTTAKQVREFLGKAGFCRLFIPGFATLAAPLYPLTKPKGEFSWAPEHQKAFDAIKKALLSAPALALPDVTKPFTLYVDERKGVARGVLTQTLGPWRRPVAYLSKKLDPVASGWPVCLKAIAAVAILVKDADKLTLGQNITVIAPHALENIVRQPPDRWMTNARMTHYQSLLLTERVTFAPPAALNPATLLPEETDEPVTHDCHQLLIEETGVRKDLTDIPLTGEVLTWFTDGSSYVVEGKRMAGAAVVDGTRTIWASSLPEGTSAQKAELMALTQALRLAEGKSINIYTDSRYAFATAHVHGAIYKQRGWLTSAGREIKNKEEILSLLEALHLPKRLAIIHCPGHQKAKDPISRGNQMADRVAKQAAQGVNLLPAGKRTADGSEFEKRTADGSEFESPKKKAKVE

SEQ ID NO: 6882 - protein, 2094 aa, synthetic construct
MPAAKRVKLDGGDKKYSIGLDIGTNSVGWAVITDEYKVPSKKFKVLGNTDRHSIKKNLIGALLFDSGETAEATRLKRTARRRYTRRKNRICYLQEIFSNEMAKVDDSFFHRLEESFLVEEDKKHERHPIFGNIVDEVAYHEKYPTIYHLRKKLVDSTDKADLRLIYLALAHMIKFRGHFLIEGDLNPDNSDVDKLFIQLVQTYNQLFEENPINASGVDAKAILSARLSKSRRLENLIAQLPGEKKNGLFGNLIALSLGLTPNFKSNFDLAEDAKLQLSKDTYDDDLDNLLAQIGDQYADLFLAAKNLSDAILLSDILRVNTEITKAPLSASMIKRYDEHHQDLTLLKALVRQQLPEKYKEIFFDQSKNGYAGYIDGGASQEEFYKFIKPILEKMDGTEELLVKLNREDLLRKQRTFDNGSIPHQIHLGELHAILRRQEDFYPFLKDNREKIEKILTFRIPYYVGPLARGNSRFAWMTRKSEETITPWNFEEVVDKGASAQSFIERMTNFDKNLPNEKVLPKHSLLYEYFTVYNELTKVKYVTEGMRKPAFLSGEQKKAIVDLLFKTNRKVTVKQLKEDYFKKIECFDSVEISGVEDRFNASLGTYHDLLKIIKDKDFLDNEENEDILEDIVLTLTLFEDREMIEERLKTYAHLFDDKVMKQLKRRRYTGWGRLSRKLINGIRDKQSGKTILDFLKSDGFANRNFMQLIHDDSLTFKEDIQKAQVSGQGDSLHEHIANLAGSPAIKKGILQTVKVVDELVKVMGRHKPENIVIEMARENQTTQKGQKNSRERMKRIEEGIKELGSQILKEHPVENTQLQNEKLYLYYLQNGRDMYVDQELDINRLSDYDVDHIVPQSFLKDDSIDNKVLTRSDKARGKSDNVPSEEVVKKMKNYWRQLLNAKLITQRKFDNLTKAERGGLSELDKAGFIKRQLVETRQITKHVAQILDSRMNTKYDENDKLIREVKVITLKSKLVSDFRKDFQFYKVREINNYHHAHDAYLNAVVGTALIKKYPKLESEFVYGDYKVYDVRKMIAKSEQEIGKATAKYFFYSNIMNFFKTEITLANGEIRKRPLIETNGETGEIVWDKGRDFATVRKVLSMPQVNIVKKTEVQTGGFSKESILPKRNSDKLIARKKDWDPKKYGGFDSPTVAYSVLVVAKVEKGKSKKLKSVKELLGITIMERSSFEKNPIDFLEAKGYKEVKKDLIIKLPKYSLFELENGRKRMLASAGELQKGNELALPSKYVNFLYLASHYEKLKGSPEDNEQKQLFVEQHKHYLDEIIEQISEFSKRVILADANLDKVLSAYNKHRDKPIREQAENIIHLFTLTNLGAPAAFKYFDTTIDRKRYTSTKEVLDATLIHQSITGLYETRIDLSQLGGDGGGSSGGGGGSGGTLNIEDEYRLHETSKEPDVPLGSTWLSDFPQAWAETGGMGLAVRQAPLIIPLKATSTPVSIKQYPMSQEARLGIKPHIQRLLDQGILVPCQSPWNTPLLPVKKPGTNDYRPVQDLREVNKRVEDIHPTVPNPYNLLSGLPPSHQWYTVLDLKDAFFCLRLHPTSQPLFAFEWRDPEMGISGQLTWTRLPQGFKNSPTLFNEALHRDLADFRIQHPDLILLQYVDDLLLAATSEQDCQRGTRALLQTLGNLGYRASAKKAQICQKQVKYLGYLLKEGQRWLTEARKETVMGQPTPKTPRQLREFLGTAGFCRLWIPGFAEMAAPLYPLTKPGTLFNWGPDQQKAYQEIKQALLTAPALGLPDLTKPFELFVDEKQGYAKGVLTQKLGPWRRPVAYLSKKLDPVAAGWPPCLRMVAAIAVLTKDAGKLTMGQPLVILAPHAVEALVKQPPDRWLSNARMTHYQAMLLDTDRVQFGPVVALNPATLLPLPEKEAPHDCLEILAETHGTRPDLTDQPIPDADYTWYTDGSSFLQEGQRRAGAAVTTETEVIWARALPAGTSAQRAELIALTQALKMAEGKKLNVYTDSRYAFATAHVHGEIYRRRGWLTSEGREIKNKNEILALLKALFLPKRLSIIHCPGHQKGNSAEARGNRMADQAAREAAMKAVLETSTLLAGKRTADGSEFEKRTADGSEFESPKKKAKVE

SEQ ID NO: 6883 - protein, 2094 aa, synthetic construct; identical to SEQ ID NO: 4518

SEQ ID NO: 6884 - protein, 2098 aa, synthetic construct
MPAAKRVKLDGGDKKYSIGLDIGTNSVGWAVITDEYKVPSKKFKVLGNTDRHSIKKNLIGALLFDSGETAEATRLKRTARRRYTRRKNRICYLQEIFSNEMAKVDDSFFHRLEESFLVEEDKKHERHPIFGNIVDEVAYHEKYPTIYHLRKKLVDSTDKADLRLIYLALAHMIKFRGHFLIEGDLNPDNSDVDKLFIQLVQTYNQLFEENPINASGVDAKAILSARLSKSRRLENLIAQLPGEKKNGLFGNLIALSLGLTPNFKSNFDLAEDAKLQLSKDTYDDDLDNLLAQIGDQYADLFLAAKNLSDAILLSDILRVNTEITKAPLSASMIKRYDEHHQDLTLLKALVRQQLPEKYKEIFFDQSKNGYAGYIDGGASQEEFYKFIKPILEKMDGTEELLVKLNREDLLRKQRTFDNGSIPHQIHLGELHAILRRQEDFYPFLKDNREKIEKILTFRIPYYVGPLARGNSRFAWMTRKSEETITPWNFEEVVDKGASAQSFIERMTNFDKNLPNEKVLPKHSLLYEYFTVYNELTKVKYVTEGMRKPAFLSGEQKKAIVDLLFKTNRKVTVKQLKEDYFKKIECFDSVEISGVEDRFNASLGTYHDLLKIIKDKDFLDNEENEDILEDIVLTLTLFEDREMIEERLKTYAHLFDDKVMKQLKRRRYTGWGRLSRKLINGIRDKQSGKTILDFLKSDGFANRNFMQLIHDDSLTFKEDIQKAQVSGQGDSLHEHIANLAGSPAIKKGILQTVKVVDELVKVMGRHKPENIVIEMARENQTTQKGQKNSRERMKRIEEGIKELGSQILKEHPVENTQLQNEKLYLYYLQNGRDMYVDQELDINRLSDYDVDHIVPQSFLKDDSIDNKVLTRSDKARGKSDNVPSEEVVKKMKNYWRQLLNAKLITQRKFDNLTKAERGGLSELDKAGFIKRQLVETRQITKHVAQILDSRMNTKYDENDKLIREVKVITLKSKLVSDFRKDFQFYKVREINNYHHAHDAYLNAVVGTALIKKYPKLESEFVYGDYKVYDVRKMIAKSEQEIGKATAKYFFYSNIMNFFKTEITLANGEIRKRPLIETNGETGEIVWDKGRDFATVRKVLSMPQVNIVKKTEVQTGGFSKESILPKRNSDKLIARKKDWDPKKYGGFDSPTVAYSVLVVAKVEKGKSKKLKSVKELLGITIMERSSFEKNPIDFLEAKGYKEVKKDLIIKLPKYSLFELENGRKRMLASAGELQKGNELALPSKYVNFLYLASHYEKLKGSPEDNEQKQLFVEQHKHYLDEIIEQISEFSKRVILADANLDKVLSAYNKHRDKPIREQAENIIHLFTLTNLGAPAAFKYFDTTIDRKRYTSTKEVLDATLIHQSITGLYETRIDLSQLGGDGGGGSGGGEAAAKGGTAPLEEEYRLFLEAPIQNVTLLEQWKREIPKVWAEINPPGLASTQAPIHVQLLSTALPVRVRQYPITLEAKRSLRETIRKFRAAGILRPVHSPWNTPLLPVRKSGTSEYRMVQDLREVNKRVETIHPTVPNPYTLLSLLPPDRIWYSVLDLKDAFFCIPLAPESQLIFAFEWADAEEGESGQLTWTRLPQGFKNSPTLFDEALNRDLQGFRLDHPSVSLLQYVDDLLIAADTQAACLSATRDLLMTLAELGYRVSGKKAQLCQEEVTYLGFKIHKGSRSLSNSRTQAILQIPVPKTKRQVREFLGTIGYCRLWIPGFAELAQPLYAATRGGNDPLVWGEKEEEAFQSLKLALTQPPALALPSLDKPFQLFVEETSGAAKGVLTQALGPWKRPVAYLSKRLDPVAAGWPRCLRAIAAAALLTREASKLTFGQDIEITSSHNLESLLRSPPDKWLTNARITQYQVLLLDPPRVRFKQTAALNPATLLPETDDTLPIHHCLDTLDSLTSTRPDLTDQPLAQAEATLFTDGSSYIRDGKRYAGAAVVTLDSVIWAEPLPIGTSAQKAELIALTKALEWSKDKSVNIYTDSRYAFATLHVHGMIYRERGLLTAGGKAIKNAPEILALLTAVWLPKRVAVMHCKGHQKDDAPTSTGNRRADEVAREVAIRPLSTQATISAGKRTADGSEFEKRTADGSEFESPKKKAKVE

SEQ ID NO: 6885 - protein, 2098 aa, synthetic construct
MPAAKRVKLDGGDKKYSIGLDIGTNSVGWAVITDEYKVPSKKFKVLGNTDRHSIKKNLIGALLFDSGETAEATRLKRTARRRYTRRKNRICYLQEIFSNEMAKVDDSFFHRLEESFLVEEDKKHERHPIFGNIVDEVAYHEKYPTIYHLRKKLVDSTDKADLRLIYLALAHMIKFRGHFLIEGDLNPDNSDVDKLFIQLVQTYNQLFEENPINASGVDAKAILSARLSKSRRLENLIAQLPGEKKNGLFGNLIALSLGLTPNFKSNFDLAEDAKLQLSKDTYDDDLDNLLAQIGDQYADLFLAAKNLSDAILLSDILRVNTEITKAPLSASMIKRYDEHHQDLTLLKALVRQQLPEKYKEIFFDQSKNGYAGYIDGGASQEEFYKFIKPILEKMDGTEELLVKLNREDLLRKQRTFDNGSIPHQIHLGELHAILRRQEDFYPFLKDNREKIEKILTFRIPYYVGPLARGNSRFAWMTRKSEETITPWNFEEVVDKGASAQSFIERMTNFDKNLPNEKVLPKHSLLYEYFTVYNELTKVKYVTEGMRKPAFLSGEQKKAIVDLLFKTNRKVTVKQLKEDYFKKIECFDSVEISGVEDRFNASLGTYHDLLKIIKDKDFLDNEENEDILEDIVLTLTLFEDREMIEERLKTYAHLFDDKVMKQLKRRRYTGWGRLSRKLINGIRDKQSGKTILDFLKSDGFANRNFMQLIHDDSLTFKEDIQKAQVSGQGDSLHEHIANLAGSPAIKKGILQTVKVVDELVKVMGRHKPENIVIEMARENQTTQKGQKNSRERMKRIEEGIKELGSQILKEHPVENTQLQNEKLYLYYLQNGRDMYVDQELDINRLSDYDVDHIVPQSFLKDDSIDNKVLTRSDKARGKSDNVPSEEVVKKMKNYWRQLLNAKLITQRKFDNLTKAERGGLSELDKAGFIKRQLVETRQITKHVAQILDSRMNTKYDENDKLIREVKVITLKSKLVSDFRKDFQFYKVREINNYHHAHDAYLNAVVGTALIKKYPKLESEFVYGDYKVYDVRKMIAKSEQEIGKATAKYFFYSNIMNFFKTEITLANGEIRKRPLIETNGETGEIVWDKGRDFATVRKVLSMPQVNIVKKTEVQTGGFSKESILPKRNSDKLIARKKDWDPKKYGGFDSPTVAYSVLVVAKVEKGKSKKLKSVKELLGITIMERSSFEKNPIDFLEAKGYKEVKKDLIIKLPKYSLFELENGRKRMLASAGELQKGNELALPSKYVNFLYLASHYEKLKGSPEDNEQKQLFVEQHKHYLDEIIEQISEFSKRVILADANLDKVLSAYNKHRDKPIREQAENIIHLFTLTNLGAPAAFKYFDTTIDRKRYTSTKEVLDATLIHQSITGLYETRIDLSQLGGDGGGGSGGGEAAAKGGTAPLEEEYRLFLEAPIQNVTLLEQWKREIPKVWAEINPPGLASTQAPIHVQLLSTALPVRVRQYPITLEAKRSLRETIRKFRAAGILRPVHSPWNTPLLPVRKSGTSEYRMVQDLREVNKRVETIHPTVPNPYTLLSLLPPDRIWYSVLDLKDAFFCIPLAPESQLIFAFEWADAEEGESGQLTWTRLPQGFKNSPTLFNEALNRDLQGFRLDHPSVSLLQYVDDLLIAADTQAACLSATRDLLMTLAELGYRVSGKKAQLCQEEVTYLGFKIHKGSRSLSNSRTQAILQIPVPKTKRQVREFLGTIGYCRLWIPGFAELAQPLYAATRPGNDPLVWGEKEEEAFQSLKLALTQPPALALPSLDKPFQLFVEETSGAAKGVLTQALGPWKRPVAYLSKRLDPVAAGWPRCLRAIAAAALLTREASKLTFGQDIEITSSHNLESLLRSPPDKWLTNARITQYQVLLLDPPRVRFKQTAALNPATLLPETDDTLPIHHCLDTLDSLTSTRPDLTDQPLAQAEATLFTDGSSYIRDGKRYAGAAVVTLDSVIWAEPLPIGTSAQKAELIALTKALEWSKDKSVNIYTDSRYAFATLHVHGMIYRERGWLTAGGKAIKNAPEILALLTAVWLPKRVAVMHCKGHQKDDAPTSTGNRRADEVAREVAIRPLSTQATISAGKRTADGSEFEKRTADGSEFESPKKKAKVE

SEQ ID NO: 6886 - protein, 2102 aa, synthetic construct
MPAAKRVKLDGGDKKYSIGLDIGTNSVGWAVITDEYKVPSKKFKVLGNTDRHSIKKNLIGALLFDSGETAEATRLKRTARRRYTRRKNRICYLQEIFSNEMAKVDDSFFHRLEESFLVEEDKKHERHPIFGNIVDEVAYHEKYPTIYHLRKKLVDSTDKADLRLIYLALAHMIKFRGHFLIEGDLNPDNSDVDKLFIQLVQTYNQLFEENPINASGVDAKAILSARLSKSRRLENLIAQLPGEKKNGLFGNLIALSLGLTPNFKSNFDLAEDAKLQLSKDTYDDDLDNLLAQIGDQYADLFLAAKNLSDAILLSDILRVNTEITKAPLSASMIKRYDEHHQDLTLLKALVRQQLPEKYKEIFFDQSKNGYAGYIDGGASQEEFYKFIKPILEKMDGTEELLVKLNREDLLRKQRTFDNGSIPHQIHLGELHAILRRQEDFYPFLKDNREKIEKILTFRIPYYVGPLARGNSRFAWMTRKSEETITPWNFEEVVDKGASAQSFIERMTNFDKNLPNEKVLPKHSLLYEYFTVYNELTKVKYVTEGMRKPAFLSGEQKKAIVDLLFKTNRKVTVKQLKEDYFKKIECFDSVEISGVEDRFNASLGTYHDLLKIIKDKDFLDNEENEDILEDIVLTLTLFEDREMIEERLKTYAHLFDDKVMKQLKRRRYTGWGRLSRKLINGIRDKQSGKTILDFLKSDGFANRNFMQLIHDDSLTFKEDIQKAQVSGQGDSLHEHIANLAGSPAIKKGILQTVKVVDELVKVMGRHKPENIVIEMARENQTTQKGQKNSRERMKRIEEGIKELGSQILKEHPVENTQLQNEKLYLYYLQNGRDMYVDQELDINRLSDYDVDHIVPQSFLKDDSIDNKVLTRSDKARGKSDNVPSEEVVKKMKNYWRQLLNAKLITQRKFDNLTKAERGGLSELDKAGFIKRQLVETRQITKHVAQILDSRMNTKYDENDKLIREVKVITLKSKLVSDFRKDFQFYKVREINNYHHAHDAYLNAVVGTALIKKYPKLESEFVYGDYKVYDVRKMIAKSEQEIGKATAKYFFYSNIMNFFKTEITLANGEIRKRPLIETNGETGEIVWDKGRDFATVRKVLSMPQVNIVKKTEVQTGGFSKESILPKRNSDKLIARKKDWDPKKYGGFDSPTVAYSVLVVAKVEKGKSKKLKSVKELLGITIMERSSFEKNPIDFLEAKGYKEVKKDLIIKLPKYSLFELENGRKRMLASAGELQKGNELALPSKYVNFLYLASHYEKLKGSPEDNEQKQLFVEQHKHYLDEIIEQISEFSKRVILADANLDKVLSAYNKHRDKPIREQAENIIHLFTLTNLGAPAAFKYFDTTIDRKRYTSTKEVLDATLIHQSITGLYETRIDLSQLGGDGGGGSGGGEAAAKGGTVSLQDEHRLFDIPVTTSLPDVWLQDFPQAWAETGGLGRAKCQAPIIIDLKPTAVPVSIKQYPMSLEAHMGIRQHIIKFLELGVLRPCRSPWNTPLLPVKKPGTQDYRPVQDLREINKRTVDIHPTVPNPYNLLSTLKPDYSWYTVLDLKDAFFCLPLAPQSQELFAFEWKDPERGISGQLTWTRLPQGFKNSPTLFNEALHRDLTDFRTQHPEVTLLQYVDDLLLAAPTKKACTQGTRHLLQELGEKGYRASAKKAQICQTKVTYLGYILSEGKRWLTPGRIETVARIPPPRNPREVREFLGTAGFCRLWIPGFAELAAPLYALTKPSTPFTWQTEHQLAFEALKKALLSAPALGLPDTSKPFTLFLDERQGIAKGVLTQKLGPWKRPVAYLSKKLDPVAAGWPPCLRIMAATAMLVKDSAKLTLGQPLTVITPHTLEAIVRQPPDRWITNARLTHYQALLLDTDRVQFGPPVTLNPATLLPVPENQPSPHDCRQVLAETHGTREDLKDQELPDADHTWYTDGSSYLDSGTRRAGAAVVDGHNTIWAQSLPPGTSAQKAELIALTKALELSKGKKANIYTDSRYAFATAHTHGSIYERRGWLTSEGKEIKNKAEIIALLKALFLPQEVAIIHCPGHQKGQDPVAVGNRQADRVARQAAMAEVLTLATEPDNTSHITAGKRTADGSEFEKRTADGSEFESPKKKAKVE

SEQ ID NO: 6887 - protein, 2173 aa, synthetic construct
MPAAKRVKLDGGDKKYSIGLDIGTNSVGWAVITDEYKVPSKKFKVLGNTDRHSIKKNLIGALLFDSGETAEATRLKRTARRRYTRRKNRICYLQEIFSNEMAKVDDSFFHRLEESFLVEEDKKHERHPIFGNIVDEVAYHEKYPTIYHLRKKLVDSTDKADLRLIYLALAHMIKFRGHFLIEGDLNPDNSDVDKLFIQLVQTYNQLFEENPINASGVDAKAILSARLSKSRRLENLIAQLPGEKKNGLFGNLIALSLGLTPNFKSNFDLAEDAKLQLSKDTYDDDLDNLLAQIGDQYADLFLAAKNLSDAILLSDILRVNTEITKAPLSASMIKRYDEHHQDLTLLKALVRQQLPEKYKEIFFDQSKNGYAGYIDGGASQEEFYKFIKPILEKMDGTEELLVKLNREDLLRKQRTFDNGSIPHQIHLGELHAILRRQEDFYPFLKDNREKIEKILTFRIPYYVGPLARGNSRFAWMTRKSEETITPWNFEEVVDKGASAQSFIERMTNFDKNLPNEKVLPKHSLLYEYFTVYNELTKVKYVTEGMRKPAFLSGEQKKAIVDLLFKTNRKVTVKQLKEDYFKKIECFDSVEISGVEDRFNASLGTYHDLLKIIKDKDFLDNEENEDILEDIVLTLTLFEDREMIEERLKTYAHLFDDKVMKQLKRRRYTGWGRLSRKLINGIRDKQSGKTILDFLKSDGFANRNFMQLIHDDSLTFKEDIQKAQVSGQGDSLHEHIANLAGSPAIKKGILQTVKVVDELVKVMGRHKPENIVIEMARENQTTQKGQKNSRERMKRIEEGIKELGSQILKEHPVENTQLQNEKLYLYYLQNGRDMYVDQELDINRLSDYDVDHIVPQSFLKDDSIDNKVLTRSDKARGKSDNVPSEEVVKKMKNYWRQLLNAKLITQRKFDNLTKAERGGLSELDKAGFIKRQLVETRQITKHVAQILDSRMNTKYDENDKLIREVKVITLKSKLVSDFRKDFQFYKVREINNYHHAHDAYLNAVVGTALIKKYPKLESEFVYGDYKVYDVRKMIAKSEQEIGKATAKYFFYSNIMNFFKTEITLANGEIRKRPLIETNGETGEIVWDKGRDFATVRKVLSMPQVNIVKKTEVQTGGFSKESILPKRNSDKLIARKKDWDPKKYGGFDSPTVAYSVLVVAKVEKGKSKKLKSVKELLGITIMERSSFEKNPIDFLEAKGYKEVKKDLIIKLPKYSLFELENGRKRMLASAGELQKGNELALPSKYVNFLYLASHYEKLKGSPEDNEQKQLFVEQHKHYLDEIIEQISEFSKRVILADANLDKVLSAYNKHRDKPIREQAENIIHLFTLTNLGAPAAFKYFDTTIDRKRYTSTKEVLDATLIHQSITGLYETRIDLSQLGGDGGGGSGGGEAAAKGGMDLLKPLTVERKGVKIKGYWNSQADITCVPKDLLQGEEPVRQQNVTTIHGTQEGDVYYVNLKIDGRRINTEVIGTTLDYAIITPGDVPWILKKPLELTIKLDLEEQQGTLLNNSILSKKGKEELKQLFEKYSALWQSWENQVGHRRIRPHKIATGTVKPTPQKQYHINPKAKPDIQIVINDLLKQGVLIQKESTMNTPVYPVPKPNGRWRMVLDYRAVNKVTPLIAVQNQHSYGILGSLFKGRYKTTIDLSNGFWAHPIVPEDYWITAFTWQGKQYCWTVLPQGFLNSPGLFTGDVVDLLQGIPNVEVYVDDVYISHDSEKEHLEYLDILFNRLKEAGYIISLKKSNIANSIVDFLGFQITNEGRGLTDTFKEKLENITAPTTLKQLQSILGLLNFARNFIPDFTELIAPLYALIPKSTKNYVPWQIEHSTTLETLITKLNGAEYLQGRKGDKTLIMKVNASYTTGYIRYYNEGEKKPISYVSIVFSKTELKFTELEKLLTTVHKGLLKALDLSMGQNIHVYSPIVSMQNIQKTPQTAKKALASRWLSWLSYLEDPRIRFFYDPQMPALKDLPAVDTGKDNKKHPSNFQHIFYTDGSAITSPTKEGHLNAGMGIVYFINKDGNLQKQQEWSISLGNHTAQFAEIAAFEFALKKCLPLGGNILVVTDSNYVAKAYNEELDVWASNGFVNNRKKPLKHISKWKSVADLKRLRPDVVVTHEPGHQKLDSSPHAYGNNLADQLATQASFKVHAGKRTADGSEFEKRTADGSEFESPKKKAKVE

SEQ ID NO: 6888 - protein, 2173 aa, synthetic construct
MPAAKRVKLDGGDKKYSIGLDIGTNSVGWAVITDEYKVPSKKFKVLGNTDRHSIKKNLIGALLFDSGETAEATRLKRTARRRYTRRKNRICYLQEIFSNEMAKVDDSFFHRLEESFLVEEDKKHERHPIFGNIVDEVAYHEKYPTIYHLRKKLVDSTDKADLRLIYLALAHMIKFRGHFLIEGDLNPDNSDVDKLFIQLVQTYNQLFEENPINASGVDAKAILSARLSKSRRLENLIAQLPGEKKNGLFGNLIALSLGLTPNFKSNFDLAEDAKLQLSKDTYDDDLDNLLAQIGDQYADLFLAAKNLSDAILLSDILRVNTEITKAPLSASMIKRYDEHHQDLTLLKALVRQQLPEKYKEIFFDQSKNGYAGYIDGGASQEEFYKFIKPILEKMDGTEELLVKLNREDLLRKQRTFDNGSIPHQIHLGELHAILRRQEDFYPFLKDNREKIEKILTFRIPYYVGPLARGNSRFAWMTRKSEETITPWNFEEVVDKGASAQSFIERMTNFDKNLPNEKVLPKHSLLYEYFTVYNELTKVKYVTEGMRKPAFLSGEQKKAIVDLLFKTNRKVTVKQLKEDYFKKIECFDSVEISGVEDRFNASLGTYHDLLKIIKDKDFLDNEENEDILEDIVLTLTLFEDREMIEERLKTYAHLFDDKVMKQLKRRRYTGWGRLSRKLINGIRDKQSGKTILDFLKSDGFANRNFMQLIHDDSLTFKEDIQKAQVSGQGDSLHEHIANLAGSPAIKKGILQTVKVVDELVKVMGRHKPENIVIEMARENQTTQKGQKNSRERMKRIEEGIKELGSQILKEHPVENTQLQNEKLYLYYLQNGRDMYVDQELDINRLSDYDVDHIVPQSFLKDDSIDNKVLTRSDKARGKSDNVPSEEVVKKMKNYWRQLLNAKLITQRKFDNLTKAERGGLSELDKAGFIKRQLVETRQITKHVAQILDSRMNTKYDENDKLIREVKVITLKSKLVSDFRKDFQFYKVREINNYHHAHDAYLNAVVGTALIKKYPKLESEFVYGDYKVYDVRKMIAKSEQEIGKATAKYFFYSNIMNFFKTEITLANGEIRKRPLIETNGETGEIVWDKGRDFATVRKVLSMPQVNIVKKTEVQTGGFSKESILPKRNSDKLIARKKDWDPKKYGGFDSPTVAYSVLVVAKVEKGKSKKLKSVKELLGITIMERSSFEKNPIDFLEAKGYKEVKKDLIIKLPKYSLFELENGRKRMLASAGELQKGNELALPSKYVNFLYLASHYEKLKGSPEDNEQKQLFVEQHKHYLDEIIEQISEFSKRVILADANLDKVLSAYNKHRDKPIREQAENIIHLFTLTNLGAPAAFKYFDTTIDRKRYTSTKEVLDATLIHQSITGLYETRIDLSQLGGDGGGGSGGGEAAAKGGMDLLKPLTVERKGVKIKGYWNSQADITCVPKDLLQGEEPVRQQNVTTIHGTQEGDVYYVNLKIDGRRINTEVIGTTLDYAIITPGDVPWILKKPLELTIKLDLEEQQGTLLNNSILSKKGKEELKQLFEKYSALWQSWENQVGHRRIRPHKIATGTVKPTPQKQYHINPKAKPDIQIVINDLLKQGVLIQKESTMNTPVYPVPKPNGRWRMVLDYRAVNKVTPLIAVQNQHSYGILGSLFKGRYKTTIDLSNGFWAHPIVPEDYWITAFTWQGKQYCWTVLPQGFLNSPGLFNGDVVDLLQGIPNVEVYVDDVYISHDSEKEHLEYLDILFNRLKEAGYIISLKKSNIANSIVDFLGFQITNEGRGLTDTFKEKLENITAPTTLKQLQSILGLLNFARNFIPDFTELIAPLYALIPKSPKNYVPWQIEHSTTLETLITKLNGAEYLQGRKGDKTLIMKVNASYTTGYIRYYNEGEKKPISYVSIVFSKTELKFTELEKLLTTVHKGLLKALDLSMGQNIHVYSPIVSMQNIQKTPQTAKKALASRWLSWLSYLEDPRIRFFYDPQMPALKDLPAVDTGKDNKKHPSNFQHIFYTDGSAITSPTKEGHLNAGMGIVYFINKDGNLQKQQEWSISLGNHTAQFAEIAAFEFALKKCLPLGGNILVVTDSNYVAKAYNEELDVWASNGFVNNRKKPLKHISKWKSVADLKRLRPDVVVTHEPGHQKLDSSPHAYGNNLADQLATQASFKVHAGKRTADGSEFEKRTADGSEFESPKKKAKVE

SEQ ID NO: 6889 - protein, 2095 aa, synthetic construct
MPAAKRVKLDGGDKKYSIGLDIGTNSVGWAVITDEYKVPSKKFKVLGNTDRHSIKKNLIGALLFDSGETAEATRLKRTARRRYTRRKNRICYLQEIFSNEMAKVDDSFFHRLEESFLVEEDKKHERHPIFGNIVDEVAYHEKYPTIYHLRKKLVDSTDKADLRLIYLALAHMIKFRGHFLIEGDLNPDNSDVDKLFIQLVQTYNQLFEENPINASGVDAKAILSARLSKSRRLENLIAQLPGEKKNGLFGNLIALSLGLTPNFKSNFDLAEDAKLQLSKDTYDDDLDNLLAQIGDQYADLFLAAKNLSDAILLSDILRVNTEITKAPLSASMIKRYDEHHQDLTLLKALVRQQLPEKYKEIFFDQSKNGYAGYIDGGASQEEFYKFIKPILEKMDGTEELLVKLNREDLLRKQRTFDNGSIPHQIHLGELHAILRRQEDFYPFLKDNREKIEKILTFRIPYYVGPLARGNSRFAWMTRKSEETITPWNFEEVVDKGASAQSFIERMTNFDKNLPNEKVLPKHSLLYEYFTVYNELTKVKYVTEGMRKPAFLSGEQKKAIVDLLFKTNRKVTVKQLKEDYFKKIECFDSVEISGVEDRFNASLGTYHDLLKIIKDKDFLDNEENEDILEDIVLTLTLFEDREMIEERLKTYAHLFDDKVMKQLKRRRYTGWGRLSRKLINGIRDKQSGKTILDFLKSDGFANRNFMQLIHDDSLTFKEDIQKAQVSGQGDSLHEHIANLAGSPAIKKGILQTVKVVDELVKVMGRHKPENIVIEMARENQTTQKGQKNSRERMKRIEEGIKELGSQILKEHPVENTQLQNEKLYLYYLQNGRDMYVDQELDINRLSDYDVDHIVPQSFLKDDSIDNKVLTRSDKARGKSDNVPSEEVVKKMKNYWRQLLNAKLITQRKFDNLTKAERGGLSELDKAGFIKRQLVETRQITKHVAQILDSRMNTKYDENDKLIREVKVITLKSKLVSDFRKDFQFYKVREINNYHHAHDAYLNAVVGTALIKKYPKLESEFVYGDYKVYDVRKMIAKSEQEIGKATAKYFFYSNIMNFFKTEITLANGEIRKRPLIETNGETGEIVWDKGRDFATVRKVLSMPQVNIVKKTEVQTGGFSKESILPKRNSDKLIARKKDWDPKKYGGFDSPTVAYSVLVVAKVEKGKSKKLKSVKELLGITIMERSSFEKNPIDFLEAKGYKEVKKDLIIKLPKYSLFELENGRKRMLASAGELQKGNELALPSKYVNFLYLASHYEKLKGSPEDNEQKQLFVEQHKHYLDEIIEQISEFSKRVILADANLDKVLSAYNKHRDKPIREQAENIIHLFTLTNLGAPAAFKYFDTTIDRKRYTSTKEVLDATLIHQSITGLYETRIDLSQLGGDGGGGSGGGEAAAKGGTLQLEEEYRLFEPESTQKQEMDIWLKNFPQAWAETGGMGTAHCQAPVLIQLKATATPISIRQYPMPHEAYQGIKPHIRRMLDQGILKPCQSPWNTPLLPVKKPGTEDYRPVQDLREVNKRVEDIHPTVPNPYNLLSTLPPSHPWYTVLDLKDAFFCLRLHSESQLLFAFEWRDPEIGLSGQLTWTRLPQGFKNSPTLFNEALHSDLADFRVRYPALVLLQYVDDLLLAAATRTECLEGTKALLETLGNKGYRASAKKAQICLQEVTYLGYSLKDGQRWLTKARKEAILSIPVPKNSRQVREFLGTAGYCRLWIPGFAELAAPLYPLTRPGTLFQWGTEQQLAFEDIKKALLSSPALGLPDITKPFELFIDENSGFAKGVLVQKLGPWKRPVAYLSKKLDTVASGWPPCLRMVAAIAILVKDAGKLTLGQPLTILTSHPVEALVRQPPNKWLSNARMTHYQAMLLDAERVHFGPTVSLNPATLLPLPSGGNHHDCLQILAETHGTRPDLTDQPLPDADLTWYTDGSSFIRNGEREAGAAVTTESEVIWAAPLPPGTSAQRAELIALTQALKMAEGKKLTVYTDSRYAFATTHVHGEIYRRRGWLTSEGKEIKNKNEILALLEALFLPKRLSIIHCPGHQKGDSPQAKGNRLADDTAKKAATETHSSLTVLPAGKRTADGSEFEKRTADGSEFESPKKKAKVE

SEQ ID NO: 6890 - protein, 2127 aa, synthetic construct
MPAAKRVKLDGGDKKYSIGLDIGTNSVGWAVITDEYKVPSKKFKVLGNTDRHSIKKNLIGALLFDSGETAEATRLKRTARRRYTRRKNRICYLQEIFSNEMAKVDDSFFHRLEESFLVEEDKKHERHPIFGNIVDEVAYHEKYPTIYHLRKKLVDSTDKADLRLIYLALAHMIKFRGHFLIEGDLNPDNSDVDKLFIQLVQTYNQLFEENPINASGVDAKAILSARLSKSRRLENLIAQLPGEKKNGLFGNLIALSLGLTPNFKSNFDLAEDAKLQLSKDTYDDDLDNLLAQIGDQYADLFLAAKNLSDAILLSDILRVNTEITKAPLSASMIKRYDEHHQDLTLLKALVRQQLPEKYKEIFFDQSKNGYAGYIDGGASQEEFYKFIKPILEKMDGTEELLVKLNREDLLRKQRTFDNGSIPHQIHLGELHAILRRQEDFYPFLKDNREKIEKILTFRIPYYVGPLARGNSRFAWMTRKSEETITPWNFEEVVDKGASAQSFIERMTNFDKNLPNEKVLPKHSLLYEYFTVYNELTKVKYVTEGMRKPAFLSGEQKKAIVDLLFKTNRKVTVKQLKEDYFKKIECFDSVEISGVEDRFNASLGTYHDLLKIIKDKDFLDNEENEDILEDIVLTLTLFEDREMIEERLKTYAHLFDDKVMKQLKRRRYTGWGRLSRKLINGIRDKQSGKTILDFLKSDGFANRNFMQLIHDDSLTFKEDIQKAQVSGQGDSLHEHIANLAGSPAIKKGILQTVKVVDELVKVMGRHKPENIVIEMARENQTTQKGQKNSRERMKRIEEGIKELGSQILKEHPVENTQLQNEKLYLYYLQNGRDMYVDQELDINRLSDYDVDHIVPQSFLKDDSIDNKVLTRSDKARGKSDNVPSEEVVKKMKNYWRQLLNAKLITQRKFDNLTKAERGGLSELDKAGFIKRQLVETRQITKHVAQILDSRMNTKYDENDKLIREVKVITLKSKLVSDFRKDFQFYKVREINNYHHAHDAYLNAVVGTALIKKYPKLESEFVYGDYKVYDVRKMIAKSEQEIGKATAKYFFYSNIMNFFKTEITLANGEIRKRPLIETNGETGEIVWDKGRDFATVRKVLSMPQVNIVKKTEVQTGGFSKESILPKRNSDKLIARKKDWDPKKYGGFDSPTVAYSVLVVAKVEKGKSKKLKSVKELLGITIMERSSFEKNPIDFLEAKGYKEVKKDLIIKLPKYSLFELENGRKRMLASAGELQKGNELALPSKYVNFLYLASHYEKLKGSPEDNEQKQLFVEQHKHYLDEIIEQISEFSKRVILADANLDKVLSAYNKHRDKPIREQAENIIHLFTLTNLGAPAAFKYFDTTIDRKRYTSTKEVLDATLIHQSITGLYETRIDLSQLGGDGGGGSGGGEAAAKGGLLGRDLLTKLKAQIQFSTEGPQVTWEDRPAMCLVLNLEEEYRLHEKPVPPSIDPSWLQLFPMVWAEKAGMGLANQVPPVVVELKSDASPVAVRQYPMSKEAREGIRPHIQRFLDLGILVPCQSPWNTPLLPVKKPGTNDYRPVQDLREVNKRVQDIHPTVPNPYNLLSSLPPSHTWYSVLDLKDAFFCLKLHPNSQPLFAFEWRDPEKGNTGQLTWTRLPQGFKNSPTLFDEALHRDLASFRALNPQVVMLQYVDDLLVAAPTYRDCKEGTRRLLQELSKLGYRVSAKKAQLCREEVTYLGYLLKGGKRWLTPARKATVMKIPTPTTPRQVREFLGTAGFCRLWIPGFASLAAPLYPLTREKVPFTWTEAHQEAFGRIKEALLSAPALALPDLTKPFALYVDEKEGVARGVLTQTLGPWRRPVAYLSKKLDPVASGWPTCLKAIAAVALLLKDADKLTLGQNVLVIAPHNLESIVRQPPDRWMTNARMTHYQSLLLNERVSFAPPAILNPATLLPVESDDTPIHICSEILAEETGTRPDLRDQPLPGVPAWYTDGSSFIMDGRRQAGAAIVDNKRTVWASNLPEGTSAQKAELIALTQALRLAEGKSINIYTDSRYAFATAHVHGAIYKQRGLLTSAGKDIKNKEEILALLEAIHLPKRVAIIHCPGHQRGTDPVATGNRKADEAAKQAAQSTRILTETTKNAGKRTADGSEFEKRTADGSEFESPKKKAKVE

SEQ ID NO: 6891 - protein, 2218 aa, synthetic construct
MPAAKRVKLDGGDKKYSIGLDIGTNSVGWAVITDEYKVPSKKFKVLGNTDRHSIKKNLIGALLFDSGETAEATRLKRTARRRYTRRKNRICYLQEIFSNEMAKVDDSFFHRLEESFLVEEDKKHERHPIFGNIVDEVAYHEKYPTIYHLRKKLVDSTDKADLRLIYLALAHMIKFRGHFLIEGDLNPDNSDVDKLFIQLVQTYNQLFEENPINASGVDAKAILSARLSKSRRLENLIAQLPGEKKNGLFGNLIALSLGLTPNFKSNFDLAEDAKLQLSKDTYDDDLDNLLAQIGDQYADLFLAAKNLSDAILLSDILRVNTEITKAPLSASMIKRYDEHHQDLTLLKALVRQQLPEKYKEIFFDQSKNGYAGYIDGGASQEEFYKFIKPILEKMDGTEELLVKLNREDLLRKQRTFDNGSIPHQIHLGELHAILRRQEDFYPFLKDNREKIEKILTFRIPYYVGPLARGNSRFAWMTRKSEETITPWNFEEVVDKGASAQSFIERMTNFDKNLPNEKVLPKHSLLYEYFTVYNELTKVKYVTEGMRKPAFLSGEQKKAIVDLLFKTNRKVTVKQLKEDYFKKIECFDSVEISGVEDRFNASLGTYHDLLKIIKDKDFLDNEENEDILEDIVLTLTLFEDREMIEERLKTYAHLFDDKVMKQLKRRRYTGWGRLSRKLINGIRDKQSGKTILDFLKSDGFANRNFMQLIHDDSLTFKEDIQKAQVSGQGDSLHEHIANLAGSPAIKKGILQTVKVVDELVKVMGRHKPENIVIEMARENQTTQKGQKNSRERMKRIEEGIKELGSQILKEHPVENTQLQNEKLYLYYLQNGRDMYVDQELDINRLSDYDVDHIVPQSFLKDDSIDNKVLTRSDKARGKSDNVPSEEVVKKMKNYWRQLLNAKLITQRKFDNLTKAERGGLSELDKAGFIKRQLVETRQITKHVAQILDSRMNTKYDENDKLIREVKVITLKSKLVSDFRKDFQFYKVREINNYHHAHDAYLNAVVGTALIKKYPKLESEFVYGDYKVYDVRKMIAKSEQEIGKATAKYFFYSNIMNFFKTEITLANGEIRKRPLIETNGETGEIVWDKGRDFATVRKVLSMPQVNIVKKTEVQTGGFSKESILPKRNSDKLIARKKDWDPKKYGGFDSPTVAYSVLVVAKVEKGKSKKLKSVKELLGITIMERSSFEKNPIDFLEAKGYKEVKKDLIIKLPKYSLFELENGRKRMLASAGELQKGNELALPSKYVNFLYLASHYEKLKGSPEDNEQKQLFVEQHKHYLDEIIEQISEFSKRVILADANLDKVLSAYNKHRDKPIREQAENIIHLFTLTNLGAPAAFKYFDTTIDRKRYTSTKEVLDATLIHQSITGLYETRIDLSQLGGDGGGGSGGGEAAAKGGTLGDQGSRGSDPLPEPRVTLTVEGIPTEFLVNTGAEHSVLTKPMGKMGSKRTVVAGATGSKVYPWTTKRLLKIGQKQVTHSFLVIPECPAPLLGRDLLTKLKAQIQFSTEGPQVTWEDRPAMCLVLNLEEEYRLHEKPVPPSIDPSWLQLFPMVWAEKAGMGLANQVPPVVVELKSDASPVAVRQYPMSKEAREGIRPHIQRFLDLGILVPCQSPWNTPLLPVKKPGTNDYRPVQDLREVNKRVQDIHPTVPNPYNLLSSLPPSHTWYSVLDLKDAFFCLKLHPNSQPLFAFEWRDPEKGNTGQLTWTRLPQGFKNSPTLFNEALHRDLASFRALNPQVVMLQYVDDLLVAAPTYRDCKEGTRRLLQELSKLGYRVSAKKAQLCREEVTYLGYLLKGGKRWLTPARKATVMKIPTPTTPRQVREFLGKAGFCRLFIPGFASLAAPLYPLTRPKVPFTWTEAHQEAFGRIKEALLSAPALALPDLTKPFALYVDEKEGVARGVLTQTLGPWRRPVAYLSKKLDPVASGWPTCLKAIAAVALLLKDADKLTLGQNVLVIAPHNLESIVRQPPDRWMTNARMTHYQSLLLNERVSFAPPAILNPATLLPVESDDTPIHICSEILAEETGTRPDLRDQPLPGVPAWYTDGSSFIMDGRRQAGAAIVDNKRTVWASNLPEGTSAQKAELIALTQALRLAEGKSINIYTDSRYAFATAHVHGAIYKQRGWLTSAGKDIKNKEEILALLEAIHLPKRVAIIHCPGHQRGTDPVATGNRKADEAAKQAAQSTRILTETTKNAGKRTADGSEFEKRTADGSEFESPKKKAKVE

SEQ ID NO: 6892 - protein, 2096 aa, synthetic construct
MPAAKRVKLDGGDKKYSIGLDIGTNSVGWAVITDEYKVPSKKFKVLGNTDRHSIKKNLIGALLFDSGETAEATRLKRTARRRYTRRKNRICYLQEIFSNEMAKVDDSFFHRLEESFLVEEDKKHERHPIFGNIVDEVAYHEKYPTIYHLRKKLVDSTDKADLRLIYLALAHMIKFRGHFLIEGDLNPDNSDVDKLFIQLVQTYNQLFEENPINASGVDAKAILSARLSKSRRLENLIAQLPGEKKNGLFGNLIALSLGLTPNFKSNFDLAEDAKLQLSKDTYDDDLDNLLAQIGDQYADLFLAAKNLSDAILLSDILRVNTEITKAPLSASMIKRYDEHHQDLTLLKALVRQQLPEKYKEIFFDQSKNGYAGYIDGGASQEEFYKFIKPILEKMDGTEELLVKLNREDLLRKQRTFDNGSIPHQIHLGELHAILRRQEDFYPFLKDNREKIEKILTFRIPYYVGPLARGNSRFAWMTRKSEETITPWNFEEVVDKGASAQSFIERMTNFDKNLPNEKVLPKHSLLYEYFTVYNELTKVKYVTEGMRKPAFLSGEQKKAIVDLLFKTNRKVTVKQLKEDYFKKIECFDSVEISGVEDRFNASLGTYHDLLKIIKDKDFLDNEENEDILEDIVLTLTLFEDREMIEERLKTYAHLFDDKVMKQLKRRRYTGWGRLSRKLINGIRDKQSGKTILDFLKSDGFANRNFMQLIHDDSLTFKEDIQKAQVSGQGDSLHEHIANLAGSPAIKKGILQTVKVVDELVKVMGRHKPENIVIEMARENQTTQKGQKNSRERMKRIEEGIKELGSQILKEHPVENTQLQNEKLYLYYLQNGRDMYVDQELDINRLSDYDVDHIVPQSFLKDDSIDNKVLTRSDKARGKSDNVPSEEVVKKMKNYWRQLLNAKLITQRKFDNLTKAERGGLSELDKAGFIKRQLVETRQITKHVAQILDSRMNTKYDENDKLIREVKVITLKSKLVSDFRKDFQFYKVREINNYHHAHDAYLNAVVGTALIKKYPKLESEFVYGDYKVYDVRKMIAKSEQEIGKATAKYFFYSNIMNFFKTEITLANGEIRKRPLIETNGETGEIVWDKGRDFATVRKVLSMPQVNIVKKTEVQTGGFSKESILPKRNSDKLIARKKDWDPKKYGGFDSPTVAYSVLVVAKVEKGKSKKLKSVKELLGITIMERSSFEKNPIDFLEAKGYKEVKKDLIIKLPKYSLFELENGRKRMLASAGELQKGNELALPSKYVNFLYLASHYEKLKGSPEDNEQKQLFVEQHKHYLDEIIEQISEFSKRVILADANLDKVLSAYNKHRDKPIREQAENIIHLFTLTNLGAPAAFKYFDTTIDRKRYTSTKEVLDATLIHQSITGLYETRIDLSQLGGDGGGGSGGGEAAAKGGTLNLEDEYRLYETSAEPEVSPGSTWLSDFPQAWAETGGMGLAVRQAPLIIPLKATSTPVSIKQYPMSQEAKLGIKPHIQRLLDQGILVPCQSPWNTPLLPVKKPGTNDYRPVQDLREVNKRVEDIHPTVPNPYNLLSGLPPSHRWYTVLDLKDAFFCLRLHPTSQPLFAFEWRDPGMGISGQLTWTRLPQGFKNSPTLFNEALHRDLADFRIQHPDLILLQYVDDILLAATSELDCQQGTRALLLTLGNLGYRASAKKAQLCQKQVKYLGYLLKEGQRWLTEARKETVMGQPTPKTPRQLREFLGKAGFCRLFIPGFAEMAAPLYPLTKPGTLFNWGPDQQKAYQEIKQALLTAPALGLPDLTKPFELFVDEKQGYAKGVLTQKLGPWRRPVAYLSKKLDPVAAGWPPCLRMVAAIAVLRKDAGKLTMGQPLVILAPHAVEALVKQPPDRWLSNARMTHYQAMLLDTDRVQFGPVVALNPATLLPLPEEGAPHDCLEILAETHGTRPDLTDQPIPDADHTWYTDGSSFLQEGQRKAGAAVTTETEVIWARALPAGTSAQRAELIALTQALKMAEGKRLNVYTDSRYAFATAHIHGEIYRRRGWLTSEGREIKNKSEILALLKALFLPKRLSIIHCLGHQKGDSAEARGNRLADQAAREAAIKTPPDTSTLLAGKRTADGSEFEKRTADGSEFESPKKKAKVE

SEQ ID NO: 6893 - protein, 2096 aa, synthetic construct
MPAAKRVKLDGGDKKYSIGLDIGTNSVGWAVITDEYKVPSKKFKVLGNTDRHSIKKNLIGALLFDSGETAEATRLKRTARRRYTRRKNRICYLQEIFSNEMAKVDDSFFHRLEESFLVEEDKKHERHPIFGNIVDEVAYHEKYPTIYHLRKKLVDSTDKADLRLIYLALAHMIKFRGHFLIEGDLNPDNSDVDKLFIQLVQTYNQLFEENPINASGVDAKAILSARLSKSRRLENLIAQLPGEKKNGLFGNLIALSLGLTPNFKSNFDLAEDAKLQLSKDTYDDDLDNLLAQIGDQYADLFLAAKNLSDAILLSDILRVNTEITKAPLSASMIKRYDEHHQDLTLLKALVRQQLPEKYKEIFFDQSKNGYAGYIDGGASQEEFYKFIKPILEKMDGTEELLVKLNREDLLRKQRTFDNGSIPHQIHLGELHAILRRQEDFYPFLKDNREKIEKILTFRIPYYVGPLARGNSRFAWMTRKSEETITPWNFEEVVDKGASAQSFIERMTNFDKNLPNEKVLPKHSLLYEYFTVYNELTKVKYVTEGMRKPAFLSGEQKKAIVDLLFKTNRKVTVKQLKEDYFKKIECFDSVEISGVEDRFNASLGTYHDLLKIIKDKDFLDNEENEDILEDIVLTLTLFEDREMIEERLKTYAHLFDDKVMKQLKRRRYTGWGRLSRKLINGIRDKQSGKTILDFLKSDGFANRNFMQLIHDDSLTFKEDIQKAQVSGQGDSLHEHIANLAGSPAIKKGILQTVKVVDELVKVMGRHKPENIVIEMARENQTTQKGQKNSRERMKRIEEGIKELGSQILKEHPVENTQLQNEKLYLYYLQNGRDMYVDQELDINRLSDYDVDHIVPQSFLKDDSIDNKVLTRSDKARGKSDNVPSEEVVKKMKNYWRQLLNAKLITQRKFDNLTKAERGGLSELDKAGFIKRQLVETRQITKHVAQILDSRMNTKYDENDKLIREVKVITLKSKLVSDFRKDFQFYKVREINNYHHAHDAYLNAVVGTALIKKYPKLESEFVYGDYKVYDVRKMIAKSEQEIGKATAKYFFYSNIMNFFKTEITLANGEIRKRPLIETNGETGEIVWDKGRDFATVRKVLSMPQVNIVKKTEVQTGGFSKESILPKRNSDKLIARKKDWDPKKYGGFDSPTVAYSVLVVAKVEKGKSKKLKSVKELLGITIMERSSFEKNPIDFLEAKGYKEVKKDLIIKLPKYSLFELENGRKRMLASAGELQKGNELALPSKYVNFLYLASHYEKLKGSPEDNEQKQLFVEQHKHYLDEIIEQISEFSKRVILADANLDKVLSAYNKHRDKPIREQAENIIHLFTLTNLGAPAAFKYFDTTIDRKRYTSTKEVLDATLIHQSITGLYETRIDLSQLGGDGGGGSGGGEAAAKGGTLNIEDEYRLHEISTEPDVSPGSTWLSDFPQAWAETGGMGLAVRQAPLIIPLKATSTPVSIKQYPMSQEAKLGIKPHIQRLLDQGILVPCQSPWNTPLLPVKKPGTNDYRPVQGLREVNKRVEDIHPTVPNPYNLLSGLPTSHRWYTVLDLKDAFFCLRLHPTSQPLFASEWRDPGMGISGQLTWTRLPQGFKNSPTLFNEALHRGLADFRIQHPDLILLQYVDDLLLAATSELDCQQGTRALLKTLGNLGYRASAKKAQICQKQVKYLGYLLREGQRWLTEARKETVMGQPTPKTPRQLREFLGTAGFCRLWIPRFAEMAAPLYPLTKPGTLFNWGPDQQKAYHEIKQALLTAPALGLPDLTKPFELFVDEKQGYAKGVLTQKLGPWRRPVAYLSKKLDPVAAGWPPCLRMVAAIAVLTKDAGKLTMGQPLVILAPHAVEALVKQPPDRWLSNARMTHYQAMLLDTDRVQFGPVVALNPATLLPLPEEGAPHDCLEILAETHGTEPDLTDQPIPDADHTWYTDGSSFLQEGQRKAGAAVTTETEVIWARALPAGTSAQRAELIALTQALKMAEGKRLNVYTDSRYAFATAHIHGEIYKRRGWLTSEGREIKNKSEILALLKALFLPKRLSIIHCLGHQKGDSAEARGNRLADQAAREAAIKTPPDTSTLLAGKRTADGSEFEKRTADGSEFESPKKKAKVE

SEQ ID NO: 6894 - protein, 2087 aa, synthetic construct
MPAAKRVKLDGGDKKYSIGLDIGTNSVGWAVITDEYKVPSKKFKVLGNTDRHSIKKNLIGALLFDSGETAEATRLKRTARRRYTRRKNRICYLQEIFSNEMAKVDDSFFHRLEESFLVEEDKKHERHPIFGNIVDEVAYHEKYPTIYHLRKKLVDSTDKADLRLIYLALAHMIKFRGHFLIEGDLNPDNSDVDKLFIQLVQTYNQLFEENPINASGVDAKAILSARLSKSRRLENLIAQLPGEKKNGLFGNLIALSLGLTPNFKSNFDLAEDAKLQLSKDTYDDDLDNLLAQIGDQYADLFLAAKNLSDAILLSDILRVNTEITKAPLSASMIKRYDEHHQDLTLLKALVRQQLPEKYKEIFFDQSKNGYAGYIDGGASQEEFYKFIKPILEKMDGTEELLVKLNREDLLRKQRTFDNGSIPHQIHLGELHAILRRQEDFYPFLKDNREKIEKILTFRIPYYVGPLARGNSRFAWMTRKSEETITPWNFEEVVDKGASAQSFIERMTNFDKNLPNEKVLPKHSLLYEYFTVYNELTKVKYVTEGMRKPAFLSGEQKKAIVDLLFKTNRKVTVKQLKEDYFKKIECFDSVEISGVEDRFNASLGTYHDLLKIIKDKDFLDNEENEDILEDIVLTLTLFEDREMIEERLKTYAHLFDDKVMKQLKRRRYTGWGRLSRKLINGIRDKQSGKTILDFLKSDGFANRNFMQLIHDDSLTFKEDIQKAQVSGQGDSLHEHIANLAGSPAIKKGILQTVKVVDELVKVMGRHKPENIVIEMARENQTTQKGQKNSRERMKRIEEGIKELGSQILKEHPVENTQLQNEKLYLYYLQNGRDMYVDQELDINRLSDYDVDHIVPQSFLKDDSIDNKVLTRSDKARGKSDNVPSEEVVKKMKNYWRQLLNAKLITQRKFDNLTKAERGGLSELDKAGFIKRQLVETRQITKHVAQILDSRMNTKYDENDKLIREVKVITLKSKLVSDFRKDFQFYKVREINNYHHAHDAYLNAVVGTALIKKYPKLESEFVYGDYKVYDVRKMIAKSEQEIGKATAKYFFYSNIMNFFKTEITLANGEIRKRPLIETNGETGEIVWDKGRDFATVRKVLSMPQVNIVKKTEVQTGGFSKESILPKRNSDKLIARKKDWDPKKYGGFDSPTVAYSVLVVAKVEKGKSKKLKSVKELLGITIMERSSFEKNPIDFLEAKGYKEVKKDLIIKLPKYSLFELENGRKRMLASAGELQKGNELALPSKYVNFLYLASHYEKLKGSPEDNEQKQLFVEQHKHYLDEIIEQISEFSKRVILADANLDKVLSAYNKHRDKPIREQAENIIHLFTLTNLGAPAAFKYFDTTIDRKRYTSTKEVLDATLIHQSITGLYETRIDLSQLGGDGGGGSGGGEAAAKGGIPWLMKKPLQLTTLVPLQEYEERLLKQTMLTGSYKEKLQSLFLKYDALWQHWENQVGHRRIKPHHIATGTVNPRPQKQYPINPKAKASIQTVINDLLKQGVLIQQNSIMNTPVYPVPKPDGKWRMVLDYREVNKTIPLIAAQNQHSAGILSSIFRGKYKTTLDLSNGFWAHSITPESYWLTAFTWLGQQYCWTRLPQGFLNSPALFNADVVDLLKEVPNVQVYVDDIYISHDDPREHLEQLEKVFSLLLNAGYVVSLKKSEIAQHEVEFLGFNITKEGRGLTETFKQKLLNITPPRDLKQLQSILGLLNFARNFIPNFSELVKPLYNIIATAPGKYITWTTDNSQQLQNIISMLNSAENLEERNPEVRLIMKVNTSPSAGYIRFYNEFAKRPIMYLNYVYTKAEVKFTNTEKLLTTIHKGLIKALDLGMGQEILVYSPIVSMTKIQKTPLPERKALPIRWITWMSYLEDPRIQFHYDKTLPELQQVPTVTDDIIAKIKHPSEFSMVFYTDGSAIKHPNVNKSHNAGMGIAQVQFKPEFTVINTWSIPLGDHTAQLAEVAAVEFACKKALKIDGPVLIVTDSFYVAESVNKELPYWQSNGFFNNKKKPLKHVSKWKSIADCIQLKPDIIIIHEKGHQPTASTFHTEGNNLADKLATQGSYVVNAGKRTADGSEFEKRTADGSEFESPKKKAKVE

SEQ ID NO: 6895 - protein, 2176 aa, synthetic construct
MPAAKRVKLDGGDKKYSIGLDIGTNSVGWAVITDEYKVPSKKFKVLGNTDRHSIKKNLIGALLFDSGETAEATRLKRTARRRYTRRKNRICYLQEIFSNEMAKVDDSFFHRLEESFLVEEDKKHERHPIFGNIVDEVAYHEKYPTIYHLRKKLVDSTDKADLRLIYLALAHMIKFRGHFLIEGDLNPDNSDVDKLFIQLVQTYNQLFEENPINASGVDAKAILSARLSKSRRLENLIAQLPGEKKNGLFGNLIALSLGLTPNFKSNFDLAEDAKLQLSKDTYDDDLDNLLAQIGDQYADLFLAAKNLSDAILLSDILRVNTEITKAPLSASMIKRYDEHHQDLTLLKALVRQQLPEKYKEIFFDQSKNGYAGYIDGGASQEEFYKFIKPILEKMDGTEELLVKLNREDLLRKQRTFDNGSIPHQIHLGELHAILRRQEDFYPFLKDNREKIEKILTFRIPYYVGPLARGNSRFAWMTRKSEETITPWNFEEVVDKGASAQSFIERMTNFDKNLPNEKVLPKHSLLYEYFTVYNELTKVKYVTEGMRKPAFLSGEQKKAIVDLLFKTNRKVTVKQLKEDYFKKIECFDSVEISGVEDRFNASLGTYHDLLKIIKDKDFLDNEENEDILEDIVLTLTLFEDREMIEERLKTYAHLFDDKVMKQLKRRRYTGWGRLSRKLINGIRDKQSGKTILDFLKSDGFANRNFMQLIHDDSLTFKEDIQKAQVSGQGDSLHEHIANLAGSPAIKKGILQTVKVVDELVKVMGRHKPENIVIEMARENQTTQKGQKNSRERMKRIEEGIKELGSQILKEHPVENTQLQNEKLYLYYLQNGRDMYVDQELDINRLSDYDVDHIVPQSFLKDDSIDNKVLTRSDKARGKSDNVPSEEVVKKMKNYWRQLLNAKLITQRKFDNLTKAERGGLSELDKAGFIKRQLVETRQITKHVAQILDSRMNTKYDENDKLIREVKVITLKSKLVSDFRKDFQFYKVREINNYHHAHDAYLNAVVGTALIKKYPKLESEFVYGDYKVYDVRKMIAKSEQEIGKATAKYFFYSNIMNFFKTEITLANGEIRKRPLIETNGETGEIVWDKGRDFATVRKVLSMPQVNIVKKTEVQTGGFSKESILPKRNSDKLIARKKDWDPKKYGGFDSPTVAYSVLVVAKVEKGKSKKLKSVKELLGITIMERSSFEKNPIDFLEAKGYKEVKKDLIIKLPKYSLFELENGRKRMLASAGELQKGNELALPSKYVNFLYLASHYEKLKGSPEDNEQKQLFVEQHKHYLDEIIEQISEFSKRVILADANLDKVLSAYNKHRDKPIREQAENIIHLFTLTNLGAPAAFKYFDTTIDRKRYTSTKEVLDATLIHQSITGLYETRIDLSQLGGDGGGGSGGGEAAAKGGMDPLQLLQPLEAEIKGTKLKAHWNSGATITCVPQAFLEEEVPIKNIWIKTIHGEKEQPVYYLTFKIQGRKVEAEVISSPYDYILVSPSDIPWLMKKPLQLTTLVPLQEYEERLLKQTMLTGSYKEKLQSLFLKYDALWQHWENQVGHRRIKPHHIATGTVNPRPQKQYPINPKAKASIQTVINDLLKQGVLIQQNSIMNTPVYPVPKPDGKWRMVLDYREVNKTIPLIAAQNQHSAGILSSIFRGKYKTTLDLSNGFWAHSITPESYWLTAFTWLGQQYCWTRLPQGFLNSPALFNADVVDLLKEVPNVQVYVDDIYISHDDPREHLEQLEKVFSLLLNAGYVVSLKKSEIAQHEVEFLGFNITKEGRGLTETFKQKLLNITPPRDLKQLQSILGLLNFARNFIPNFSELVKPLYNIIATAPGKYITWTTDNSQQLQNIISMLNSAENLEERNPEVRLIMKVNTSPSAGYIRFYNEFAKRPIMYLNYVYTKAEVKFTNTEKLLTTIHKGLIKALDLGMGQEILVYSPIVSMTKIQKTPLPERKALPIRWITWMSYLEDPRIQFHYDKTLPELQQVPTVTDDIIAKIKHPSEFSMVFYTDGSAIKHPNVNKSHNAGMGIAQVQFKPEFTVINTWSIPLGDHTAQLAEVAAVEFACKKALKIDGPVLIVTDSFYVAESVNKELPYWQSNGFFNNKKKPLKHVSKWKSIADCIQLKPDIIIIHEKGHQPTASTFHTEGNNLADKLATQGSYVVNAGKRTADGSEFEKRTADGSEFESPKKKAKVE

SEQ ID NO: 6896 - protein, 2094 aa, synthetic construct
MPAAKRVKLDGGDKKYSIGLDIGTNSVGWAVITDEYKVPSKKFKVLGNTDRHSIKKNLIGALLFDSGETAEATRLKRTARRRYTRRKNRICYLQEIFSNEMAKVDDSFFHRLEESFLVEEDKKHERHPIFGNIVDEVAYHEKYPTIYHLRKKLVDSTDKADLRLIYLALAHMIKFRGHFLIEGDLNPDNSDVDKLFIQLVQTYNQLFEENPINASGVDAKAILSARLSKSRRLENLIAQLPGEKKNGLFGNLIALSLGLTPNFKSNFDLAEDAKLQLSKDTYDDDLDNLLAQIGDQYADLFLAAKNLSDAILLSDILRVNTEITKAPLSASMIKRYDEHHQDLTLLKALVRQQLPEKYKEIFFDQSKNGYAGYIDGGASQEEFYKFIKPILEKMDGTEELLVKLNREDLLRKQRTFDNGSIPHQIHLGELHAILRRQEDFYPFLKDNREKIEKILTFRIPYYVGPLARGNSRFAWMTRKSEETITPWNFEEVVDKGASAQSFIERMTNFDKNLPNEKVLPKHSLLYEYFTVYNELTKVKYVTEGMRKPAFLSGEQKKAIVDLLFKTNRKVTVKQLKEDYFKKIECFDSVEISGVEDRFNASLGTYHDLLKIIKDKDFLDNEENEDILEDIVLTLTLFEDREMIEERLKTYAHLFDDKVMKQLKRRRYTGWGRLSRKLINGIRDKQSGKTILDFLKSDGFANRNFMQLIHDDSLTFKEDIQKAQVSGQGDSLHEHIANLAGSPAIKKGILQTVKVVDELVKVMGRHKPENIVIEMARENQTTQKGQKNSRERMKRIEEGIKELGSQILKEHPVENTQLQNEKLYLYYLQNGRDMYVDQELDINRLSDYDVDHIVPQSFLKDDSIDNKVLTRSDKARGKSDNVPSEEVVKKMKNYWRQLLNAKLITQRKFDNLTKAERGGLSELDKAGFIKRQLVETRQITKHVAQILDSRMNTKYDENDKLIREVKVITLKSKLVSDFRKDFQFYKVREINNYHHAHDAYLNAVVGTALIKKYPKLESEFVYGDYKVYDVRKMIAKSEQEIGKATAKYFFYSNIMNFFKTEITLANGEIRKRPLIETNGETGEIVWDKGRDFATVRKVLSMPQVNIVKKTEVQTGGFSKESILPKRNSDKLIARKKDWDPKKYGGFDSPTVAYSVLVVAKVEKGKSKKLKSVKELLGITIMERSSFEKNPIDFLEAKGYKEVKKDLIIKLPKYSLFELENGRKRMLASAGELQKGNELALPSKYVNFLYLASHYEKLKGSPEDNEQKQLFVEQHKHYLDEIIEQISEFSKRVILADANLDKVLSAYNKHRDKPIREQAENIIHLFTLTNLGAPAAFKYFDTTIDRKRYTSTKEVLDATLIHQSITGLYETRIDLSQLGGDGGGGSGGGEAAAKGGVLNLEEEYRLHEKPVPSSIDPSWLQLFPTVWAERAGMGLANQVPPVVVELRSGASPVAVRQYPMSKEAREGIRPHIQRFLDLGVLVPCQSPWNTPLLPVKKPGTNDYRPVQDLREINKRVQDIHPTVPNPYNLLSSLPPSHTWYSVLDLKDAFFCLKLHPNSQPLFAFEWRDPEKGNTGQLTWTRLPQGFKNSPTLFNEALHRDLAPFRALNPQVVLLQYVDDLLVAAPTYRDCKEGTQKLLQELSKLGYRVSAKKAQLCQKEVTYLGYLLKEGKRWLTPARKATVMKIPPPTTPRQVREFLGKAGFCRLFIPGFASLAAPLYPLTKPSIPFIWTEEHQKAFDRIKEALLSAPALALPDLTKPFTLYVDERAGVARGVLTQTLGPWRRPVAYLSKKLDPVASGWPTCLKAVAAVALLLKDADKLTLGQNVTVIASHSLESIVRQPPDRWMTNARMTHYQSLLLNERVSFAPPAVLNPATLLPVESEATPVHRCSEILAEETGTRRDLKDQPLPGVPAWYTDGSSFIAEGKRRAGAAIVDGKRTVWASSLPEGTSAQKAELVALTQALRLAEGKDINIYTDSRYAFATAHIHGAIYKQRGWLTSAGKDIKNKEEILALLEAIHLPKRVAIIHCPGHQKGNDPVATGNRRADEAAKQAALSTRVLAETTKPAGKRTADGSEFEKRTADGSEFESPKKKAKVE

SEQ ID NO: 6897 - protein, 2096 aa, synthetic construct
MPAAKRVKLDGGDKKYSIGLDIGTNSVGWAVITDEYKVPSKKFKVLGNTDRHSIKKNLIGALLFDSGETAEATRLKRTARRRYTRRKNRICYLQEIFSNEMAKVDDSFFHRLEESFLVEEDKKHERHPIFGNIVDEVAYHEKYPTIYHLRKKLVDSTDKADLRLIYLALAHMIKFRGHFLIEGDLNPDNSDVDKLFIQLVQTYNQLFEENPINASGVDAKAILSARLSKSRRLENLIAQLPGEKKNGLFGNLIALSLGLTPNFKSNFDLAEDAKLQLSKDTYDDDLDNLLAQIGDQYADLFLAAKNLSDAILLSDILRVNTEITKAPLSASMIKRYDEHHQDLTLLKALVRQQLPEKYKEIFFDQSKNGYAGYIDGGASQEEFYKFIKPILEKMDGTEELLVKLNREDLLRKQRTFDNGSIPHQIHLGELHAILRRQEDFYPFLKDNREKIEKILTFRIPYYVGPLARGNSRFAWMTRKSEETITPWNFEEVVDKGASAQSFIERMTNFDKNLPNEKVLPKHSLLYEYFTVYNELTKVKYVTEGMRKPAFLSGEQKKAIVDLLFKTNRKVTVKQLKEDYFKKIECFDSVEISGVEDRFNASLGTYHDLLKIIKDKDFLDNEENEDILEDIVLTLTLFEDREMIEERLKTYAHLFDDKVMKQLKRRRYTGWGRLSRKLINGIRDKQSGKTILDFLKSDGFANRNFMQLIHDDSLTFKEDIQKAQVSGQGDSLHEHIANLAGSPAIKKGILQTVKVVDELVKVMGRHKPENIVIEMARENQTTQKGQKNSRERMKRIEEGIKELGSQILKEHPVENTQLQNEKLYLYYLQNGRDMYVDQELDINRLSDYDVDHIVPQSFLKDDSIDNKVLTRSDKARGKSDNVPSEEVVKKMKNYWRQLLNAKLITQRKFDNLTKAERGGLSELDKAGFIKRQLVETRQITKHVAQILDSRMNTKYDENDKLIREVKVITLKSKLVSDFRKDFQFYKVREINNYHHAHDAYLNAVVGTALIKKYPKLESEFVYGDYKVYDVRKMIAKSEQEIGKATAKYFFYSNIMNFFKTEITLANGEIRKRPLIETNGETGEIVWDKGRDFATVRKVLSMPQVNIVKKTEVQTGGFSKESILPKRNSDKLIARKKDWDPKKYGGFDSPTVAYSVLVVAKVEKGKSKKLKSVKELLGITIMERSSFEKNPIDFLEAKGYKEVKKDLIIKLPKYSLFELENGRKRMLASAGELQKGNELALPSKYVNFLYLASHYEKLKGSPEDNEQKQLFVEQHKHYLDEIIEQISEFSKRVILADANLDKVLSAYNKHRDKPIREQAENIIHLFTLTNLGAPAAFKYFDTTIDRKRYTSTKEVLDATLIHQSITGLYETRIDLSQLGGDGGGGSGGGEAAAKGGTLNIEDEYRLHETSKEPDVPLGSTWLSDFPQAWAETGGMGLAVRQAPLIIPLKATSTPVSIKQYPMSQEARLGIKPHIQRLLDQGILVPCQSPWNTPLLPVKKPGTNDYRPVQDLREVNKRVEDIHPTVPNPYNLLSGLPPSHQWYTVLDLKDAFFCLRLHPTSQPLFAFEWRDPEMGISGQLTWTRLPQGFKNSPTLFNEALHRDLADFRIQHPDLILLQYVDDLLLAATSEQDCQRGTRALLQTLGNLGYRASAKKAQICQKQVKYLGYLLKEGQRWLTEARKETVMGQPTPKTPRQLREFLGTAGFCRLWIPGFAEMAAPLYPLTKPGTLFNWGPDQQKAYQEIKQALLTAPALGLPDLTKPFELFVDEKQGYAKGVLTQKLGPWRRPVAYLSKKLDPVAAGWPPCLRMVAAIAVLTKDAGKLTMGQPLVILAPHAVEALVKQPPDRWLSNARMTHYQAMLLDTDRVQFGPVVALNPATLLPLPEKEAPHDCLEILAETHGTRPDLTDQPIPDADYTWYTDGSSFLQEGQRRAGAAVTTETEVIWARALPAGTSAQRAELIALTQALKMAEGKKLNVYTDSRYAFATAHVHGEIYRRRGWLTSEGREIKNKNEILALLKALFLPKRLSIIHCPGHQKGNSAEARGNRMADQAAREAAMKAVLETSTLLAGKRTADGSEFEKRTADGSEFESPKKKAKVE

SEQ ID NO: 6898 - protein, 2098 aa, synthetic construct
MPAAKRVKLDGGDKKYSIGLDIGTNSVGWAVITDEYKVPSKKFKVLGNTDRHSIKKNLIGALLFDSGETAEATRLKRTARRRYTRRKNRICYLQEIFSNEMAKVDDSFFHRLEESFLVEEDKKHERHPIFGNIVDEVAYHEKYPTIYHLRKKLVDSTDKADLRLIYLALAHMIKFRGHFLIEGDLNPDNSDVDKLFIQLVQTYNQLFEENPINASGVDAKAILSARLSKSRRLENLIAQLPGEKKNGLFGNLIALSLGLTPNFKSNFDLAEDAKLQLSKDTYDDDLDNLLAQIGDQYADLFLAAKNLSDAILLSDILRVNTEITKAPLSASMIKRYDEHHQDLTLLKALVRQQLPEKYKEIFFDQSKNGYAGYIDGGASQEEFYKFIKPILEKMDGTEELLVKLNREDLLRKQRTFDNGSIPHQIHLGELHAILRRQEDFYPFLKDNREKIEKILTFRIPYYVGPLARGNSRFAWMTRKSEETITPWNFEEVVDKGASAQSFIERMTNFDKNLPNEKVLPKHSLLYEYFTVYNELTKVKYVTEGMRKPAFLSGEQKKAIVDLLFKTNRKVTVKQLKEDYFKKIECFDSVEISGVEDRFNASLGTYHDLLKIIKDKDFLDNEENEDILEDIVLTLTLFEDREMIEERLKTYAHLFDDKVMKQLKRRRYTGWGRLSRKLINGIRDKQSGKTILDFLKSDGFANRNFMQLIHDDSLTFKEDIQKAQVSGQGDSLHEHIANLAGSPAIKKGILQTVKVVDELVKVMGRHKPENIVIEMARENQTTQKGQKNSRERMKRIEEGIKELGSQILKEHPVENTQLQNEKLYLYYLQNGRDMYVDQELDINRLSDYDVDHIVPQSFLKDDSIDNKVLTRSDKARGKSDNVPSEEVVKKMKNYWRQLLNAKLITQRKFDNLTKAERGGLSELDKAGFIKRQLVETRQITKHVAQILDSRMNTKYDENDKLIREVKVITLKSKLVSDFRKDFQFYKVREINNYHHAHDAYLNAVVGTALIKKYPKLESEFVYGDYKVYDVRKMIAKSEQEIGKATAKYFFYSNIMNFFKTEITLANGEIRKRPLIETNGETGEIVWDKGRDFATVRKVLSMPQVNIVKKTEVQTGGFSKESILPKRNSDKLIARKKDWDPKKYGGFDSPTVAYSVLVVAKVEKGKSKKLKSVKELLGITIMERSSFEKNPIDFLEAKGYKEVKKDLIIKLPKYSLFELENGRKRMLASAGELQKGNELALPSKYVNFLYLASHYEKLKGSPEDNEQKQLFVEQHKHYLDEIIEQISEFSKRVILADANLDKVLSAYNKHRDKPIREQAENIIHLFTLTNLGAPAAFKYFDTTIDRKRYTSTKEVLDATLIHQSITGLYETRIDLSQLGGDGGGGSEAAAKGGGGGTAPLEEEYRLFLEAPIQNVTLLEQWKREIPKVWAEINPPGLASTQAPIHVQLLSTALPVRVRQYPITLEAKRSLRETIRKFRAAGILRPVHSPWNTPLLPVRKSGTSEYRMVQDLREVNKRVETIHPTVPNPYTLLSLLPPDRIWYSVLDLKDAFFCIPLAPESQLIFAFEWADAEEGESGQLTWTRLPQGFKNSPTLFNEALNRDLQGFRLDHPSVSLLQYVDDLLIAADTQAACLSATRDLLMTLAELGYRVSGKKAQLCQEEVTYLGFKIHKGSRSLSNSRTQAILQIPVPKTKRQVREFLGTIGYCRLWIPGFAELAQPLYAATRPGNDPLVWGEKEEEAFQSLKLALTQPPALALPSLDKPFQLFVEETSGAAKGVLTQALGPWKRPVAYLSKRLDPVAAGWPRCLRAIAAAALLTREASKLTFGQDIEITSSHNLESLLRSPPDKWLTNARITQYQVLLLDPPRVRFKQTAALNPATLLPETDDTLPIHHCLDTLDSLTSTRPDLTDQPLAQAEATLFTDGSSYIRDGKRYAGAAVVTLDSVIWAEPLPIGTSAQKAELIALTKALEWSKDKSVNIYTDSRYAFATLHVHGMIYRERGWLTAGGKAIKNAPEILALLTAVWLPKRVAVMHCKGHQKDDAPTSTGNRRADEVAREVAIRPLSTQATISAGKRTADGSEFEKRTADGSEFESPKKKAKVE

SEQ ID NO: 6899 - protein, 2102 aa, synthetic construct
MPAAKRVKLDGGDKKYSIGLDIGTNSVGWAVITDEYKVPSKKFKVLGNTDRHSIKKNLIGALLFDSGETAEATRLKRTARRRYTRRKNRICYLQEIFSNEMAKVDDSFFHRLEESFLVEEDKKHERHPIFGNIVDEVAYHEKYPTIYHLRKKLVDSTDKADLRLIYLALAHMIKFRGHFLIEGDLNPDNSDVDKLFIQLVQTYNQLFEENPINASGVDAKAILSARLSKSRRLENLIAQLPGEKKNGLFGNLIALSLGLTPNFKSNFDLAEDAKLQLSKDTYDDDLDNLLAQIGDQYADLFLAAKNLSDAILLSDILRVNTEITKAPLSASMIKRYDEHHQDLTLLKALVRQQLPEKYKEIFFDQSKNGYAGYIDGGASQEEFYKFIKPILEKMDGTEELLVKLNREDLLRKQRTFDNGSIPHQIHLGELHAILRRQEDFYPFLKDNREKIEKILTFRIPYYVGPLARGNSRFAWMTRKSEETITPWNFEEVVDKGASAQSFIERMTNFDKNLPNEKVLPKHSLLYEYFTVYNELTKVKYVTEGMRKPAFLSGEQKKAIVDLLFKTNRKVTVKQLKEDYFKKIECFDSVEISGVEDRFNASLGTYHDLLKIIKDKDFLDNEENEDILEDIVLTLTLFEDREMIEERLKTYAHLFDDKVMKQLKRRRYTGWGRLSRKLINGIRDKQSGKTILDFLKSDGFANRNFMQLIHDDSLTFKEDIQKAQVSGQGDSLHEHIANLAGSPAIKKGILQTVKVVDELVKVMGRHKPENIVIEMARENQTTQKGQKNSRERMKRIEEGIKELGSQILKEHPVENTQLQNEKLYLYYLQNGRDMYVDQELDINRLSDYDVDHIVPQSFLKDDSIDNKVLTRSDKARGKSDNVPSEEVVKKMKNYWRQLLNAKLITQRKFDNLTKAERGGLSELDKAGFIKRQLVETRQITKHVAQILDSRMNTKYDENDKLIREVKVITLKSKLVSDFRKDFQFYKVREINNYHHAHDAYLNAVVGTALIKKYPKLESEFVYGDYKVYDVRKMIAKSEQEIGKATAKYFFYSNIMNFFKTEITLANGEIRKRPLIETNGETGEIVWDKGRDFATVRKVLSMPQVNIVKKTEVQTGGFSKESILPKRNSDKLIARKKDWDPKKYGGFDSPTVAYSVLVVAKVEKGKSKKLKSVKELLGITIMERSSFEKNPIDFLEAKGYKEVKKDLIIKLPKYSLFELENGRKRMLASAGELQKGNELALPSKYVNFLYLASHYEKLKGSPEDNEQKQLFVEQHKHYLDEIIEQISEFSKRVILADANLDKVLSAYNKHRDKPIREQAENIIHLFTLTNLGAPAAFKYFDTTIDRKRYTSTKEVLDATLIHQSITGLYETRIDLSQLGGDGGGGSEAAAKGGGGGTVSLQDEHRLFDIPVTTSLPDVWLQDFPQAWAETGGLGRAKCQAPIIIDLKPTAVPVSIKQYPMSLEAHMGIRQHIIKFLELGVLRPCRSPWNTPLLPVKKPGTQDYRPVQDLREINKRTVDIHPTVPNPYNLLSTLKPDYSWYTVLDLKDAFFCLPLAPQSQELFAFEWKDPERGISGQLTWTRLPQGFKNSPTLFNEALHRDLTDFRTQHPEVTLLQYVDDLLLAAPTKKACTQGTRHLLQELGEKGYRASAKKAQICQTKVTYLGYILSEGKRWLTPGRIETVARIPPPRNPREVREFLGTAGFCRLWIPGFAELAAPLYALTKPSTPFTWQTEHQLAFEALKKALLSAPALGLPDTSKPFTLFLDERQGIAKGVLTQKLGPWKRPVAYLSKKLDPVAAGWPPCLRIMAATAMLVKDSAKLTLGQPLTVITPHTLEAIVRQPPDRWITNARLTHYQALLLDTDRVQFGPPVTLNPATLLPVPENQPSPHDCRQVLAETHGTREDLKDQELPDADHTWYTDGSSYLDSGTRRAGAAVVDGHNTIWAQSLPPGTSAQKAELIALTKALELSKGKKANIYTDSRYAFATAHTHGSIYERRGWLTSEGKEIKNKAEIIALLKALFLPQEVAIIHCPGHQKGQDPVAVGNRQADRVARQAAMAEVLTLATEPDNTSHITAGKRTADGSEFEKRTADGSEFESPKKKAKVE

SEQ ID NO: 6900 - protein, 2087 aa, synthetic construct
MPAAKRVKLDGGDKKYSIGLDIGTNSVGWAVITDEYKVPSKKFKVLGNTDRHSIKKNLIGALLFDSGETAEATRLKRTARRRYTRRKNRICYLQEIFSNEMAKVDDSFFHRLEESFLVEEDKKHERHPIFGNIVDEVAYHEKYPTIYHLRKKLVDSTDKADLRLIYLALAHMIKFRGHFLIEGDLNPDNSDVDKLFIQLVQTYNQLFEENPINASGVDAKAILSARLSKSRRLENLIAQLPGEKKNGLFGNLIALSLGLTPNFKSNFDLAEDAKLQLSKDTYDDDLDNLLAQIGDQYADLFLAAKNLSDAILLSDILRVNTEITKAPLSASMIKRYDEHHQDLTLLKALVRQQLPEKYKEIFFDQSKNGYAGYIDGGASQEEFYKFIKPILEKMDGTEELLVKLNREDLLRKQRTFDNGSIPHQIHLGELHAILRRQEDFYPFLKDNREKIEKILTFRIPYYVGPLARGNSRFAWMTRKSEETITPWNFEEVVDKGASAQSFIERMTNFDKNLPNEKVLPKHSLLYEYFTVYNELTKVKYVTEGMRKPAFLSGEQKKAIVDLLFKTNRKVTVKQLKEDYFKKIECFDSVEISGVEDRFNASLGTYHDLLKIIKDKDFLDNEENEDILEDIVLTLTLFEDREMIEERLKTYAHLFDDKVMKQLKRRRYTGWGRLSRKLINGIRDKQSGKTILDFLKSDGFANRNFMQLIHDDSLTFKEDIQKAQVSGQGDSLHEHIANLAGSPAIKKGILQTVKVVDELVKVMGRHKPENIVIEMARENQTTQKGQKNSRERMKRIEEGIKELGSQILKEHPVENTQLQNEKLYLYYLQNGRDMYVDQELDINRLSDYDVDHIVPQSFLKDDSIDNKVLTRSDKARGKSDNVPSEEVVKKMKNYWRQLLNAKLITQRKFDNLTKAERGGLSELDKAGFIKRQLVETRQITKHVAQILDSRMNTKYDENDKLIREVKVITLKSKLVSDFRKDFQFYKVREINNYHHAHDAYLNAVVGTALIKKYPKLESEFVYGDYKVYDVRKMIAKSEQEIGKATAKYFFYSNIMNFFKTEITLANGEIRKRPLIETNGETGEIVWDKGRDFATVRKVLSMPQVNIVKKTEVQTGGFSKESILPKRNSDKLIARKKDWDPKKYGGFDSPTVAYSVLVVAKVEKGKSKKLKSVKELLGITIMERSSFEKNPIDFLEAKGYKEVKKDLIIKLPKYSLFELENGRKRMLASAGELQKGNELALPSKYVNFLYLASHYEKLKGSPEDNEQKQLFVEQHKHYLDEIIEQISEFSKRVILADANLDKVLSAYNKHRDKPIREQAENIIHLFTLTNLGAPAAFKYFDTTIDRKRYTSTKEVLDATLIHQSITGLYETRIDLSQLGGDGGGGSEAAAKGGGGGVPWILKKPLELTIKLDLEEQQGTLLNNSILSKKGKEELKQLFEKYSALWQSWENQVGHRRIRPHKIATGTVKPTPQKQYHINPKAKPDIQIVINDLLKQGVLIQKESTMNTPVYPVPKPNGRWRMVLDYRAVNKVTPLIAVQNQHSYGILGSLFKGRYKTTIDLSNGFWAHPIVPEDYWITAFTWQGKQYCWTVLPQGFLNSPGLFTGDVVDLLQGIPNVEVYVDDVYISHDSEKEHLEYLDILFNRLKEAGYIISLKKSNIANSIVDFLGFQITNEGRGLTDTFKEKLENITAPTTLKQLQSILGLLNFARNFIPDFTELIAPLYALIPKSTKNYVPWQIEHSTTLETLITKLNGAEYLQGRKGDKTLIMKVNASYTTGYIRYYNEGEKKPISYVSIVFSKTELKFTELEKLLTTVHKGLLKALDLSMGQNIHVYSPIVSMQNIQKTPQTAKKALASRWLSWLSYLEDPRIRFFYDPQMPALKDLPAVDTGKDNKKHPSNFQHIFYTDGSAITSPTKEGHLNAGMGIVYFINKDGNLQKQQEWSISLGNHTAQFAEIAAFEFALKKCLPLGGNILVVTDSNYVAKAYNEELDVWASNGFVNNRKKPLKHISKWKSVADLKRLRPDVVVTHEPGHQKLDSSPHAYGNNLADQLATQASFKVHAGKRTADGSEFEKRTADGSEFESPKKKAKVE

SEQ ID NO: 6901 - protein, 2096 aa, synthetic construct
MPAAKRVKLDGGDKKYSIGLDIGTNSVGWAVITDEYKVPSKKFKVLGNTDRHSIKKNLIGALLFDSGETAEATRLKRTARRRYTRRKNRICYLQEIFSNEMAKVDDSFFHRLEESFLVEEDKKHERHPIFGNIVDEVAYHEKYPTIYHLRKKLVDSTDKADLRLIYLALAHMIKFRGHFLIEGDLNPDNSDVDKLFIQLVQTYNQLFEENPINASGVDAKAILSARLSKSRRLENLIAQLPGEKKNGLFGNLIALSLGLTPNFKSNFDLAEDAKLQLSKDTYDDDLDNLLAQIGDQYADLFLAAKNLSDAILLSDILRVNTEITKAPLSASMIKRYDEHHQDLTLLKALVRQQLPEKYKEIFFDQSKNGYAGYIDGGASQEEFYKFIKPILEKMDGTEELLVKLNREDLLRKQRTFDNGSIPHQIHLGELHAILRRQEDFYPFLKDNREKIEKILTFRIPYYVGPLARGNSRFAWMTRKSEETITPWNFEEVVDKGASAQSFIERMTNFDKNLPNEKVLPKHSLLYEYFTVYNELTKVKYVTEGMRKPAFLSGEQKKAIVDLLFKTNRKVTVKQLKEDYFKKIECFDSVEISGVEDRFNASLGTYHDLLKIIKDKDFLDNEENEDILEDIVLTLTLFEDREMIEERLKTYAHLFDDKVMKQLKRRRYTGWGRLSRKLINGIRDKQSGKTILDFLKSDGFANRNFMQLIHDDSLTFKEDIQKAQVSGQGDSLHEHIANLAGSPAIKKGILQTVKVVDELVKVMGRHKPENIVIEMARENQTTQKGQKNSRERMKRIEEGIKELGSQILKEHPVENTQLQNEKLYLYYLQNGRDMYVDQELDINRLSDYDVDHIVPQSFLKDDSIDNKVLTRSDKARGKSDNVPSEEVVKKMKNYWRQLLNAKLITQRKFDNLTKAERGGLSELDKAGFIKRQLVETRQITKHVAQILDSRMNTKYDENDKLIREVKVITLKSKLVSDFRKDFQFYKVREINNYHHAHDAYLNAVVGTALIKKYPKLESEFVYGDYKVYDVRKMIAKSEQEIGKATAKYFFYSNIMNFFKTEITLANGEIRKRPLIETNGETGEIVWDKGRDFATVRKVLSMPQVNIVKKTEVQTGGFSKESILPKRNSDKLIARKKDWDPKKYGGFDSPTVAYSVLVVAKVEKGKSKKLKSVKELLGITIMERSSFEKNPIDFLEAKGYKEVKKDLIIKLPKYSLFELENGRKRMLASAGELQKGNELALPSKYVNFLYLASHYEKLKGSPEDNEQKQLFVEQHKHYLDEIIEQISEFSKRVILADANLDKVLSAYNKHRDKPIREQAENIIHLFTLTNLGAPAAFKYFDTTIDRKRYTSTKEVLDATLIHQSITGLYETRIDLSQLGGDGGGGSEAAAKGGGGGTLNLEDEYRLYETSAEPEVSPGSTWLSDFPQAWAETGGMGLAVRQAPLIIPLKATSTPVSIKQYPMSQEAKLGIKPHIQRLLDQGILVPCQSPWNTPLLPVKKPGTNDYRPVQDLREVNKRVEDIHPTVPNPYNLLSGLPPSHRWYTVLDLKDAFFCLRLHPTSQPLFAFEWRDPGMGISGQLTWTRLPQGFKNSPTLFNEALHRDLADFRIQHPDLILLQYVDDILLAATSELDCQQGTRALLLTLGNLGYRASAKKAQLCQKQVKYLGYLLKEGQRWLTEARKETVMGQPTPKTPRQLREFLGTAGFCRLWIPGFAEMAAPLYPLTKPGTLFNWGPDQQKAYQEIKQALLTAPALGLPDLTKPFELFVDEKQGYAKGVLTQKLGPWRRPVAYLSKKLDPVAAGWPPCLRMVAAIAVLRKDAGKLTMGQPLVILAPHAVEALVKQPPDRWLSNARMTHYQAMLLDTDRVQFGPVVALNPATLLPLPEEGAPHDCLEILAETHGTRPDLTDQPIPDADHTWYTDGSSFLQEGQRKAGAAVTTETEVIWARALPAGTSAQRAELIALTQALKMAEGKRLNVYTDSRYAFATAHIHGEIYRRRGWLTSEGREIKNKSEILALLKALFLPKRLSIIHCLGHQKGDSAEARGNRLADQAAREAAIKTPPDTSTLLAGKRTADGSEFEKRTADGSEFESPKKKAKVE

SEQ ID NO: 6902 - protein, 2096 aa, synthetic construct
MPAAKRVKLDGGDKKYSIGLDIGTNSVGWAVITDEYKVPSKKFKVLGNTDRHSIKKNLIGALLFDSGETAEATRLKRTARRRYTRRKNRICYLQEIFSNEMAKVDDSFFHRLEESFLVEEDKKHERHPIFGNIVDEVAYHEKYPTIYHLRKKLVDSTDKADLRLIYLALAHMIKFRGHFLIEGDLNPDNSDVDKLFIQLVQTYNQLFEENPINASGVDAKAILSARLSKSRRLENLIAQLPGEKKNGLFGNLIALSLGLTPNFKSNFDLAEDAKLQLSKDTYDDDLDNLLAQIGDQYADLFLAAKNLSDAILLSDILRVNTEITKAPLSASMIKRYDEHHQDLTLLKALVRQQLPEKYKEIFFDQSKNGYAGYIDGGASQEEFYKFIKPILEKMDGTEELLVKLNREDLLRKQRTFDNGSIPHQIHLGELHAILRRQEDFYPFLKDNREKIEKILTFRIPYYVGPLARGNSRFAWMTRKSEETITPWNFEEVVDKGASAQSFIERMTNFDKNLPNEKVLPKHSLLYEYFTVYNELTKVKYVTEGMRKPAFLSGEQKKAIVDLLFKTNRKVTVKQLKEDYFKKIECFDSVEISGVEDRFNASLGTYHDLLKIIKDKDFLDNEENEDILEDIVLTLTLFEDREMIEERLKTYAHLFDDKVMKQLKRRRYTGWGRLSRKLINGIRDKQSGKTILDFLKSDGFANRNFMQLIHDDSLTFKEDIQKAQVSGQGDSLHEHIANLAGSPAIKKGILQTVKVVDELVKVMGRHKPENIVIEMARENQTTQKGQKNSRERMKRIEEGIKELGSQILKEHPVENTQLQNEKLYLYYLQNGRDMYVDQELDINRLSDYDVDHIVPQSFLKDDSIDNKVLTRSDKARGKSDNVPSEEVVKKMKNYWRQLLNAKLITQRKFDNLTKAERGGLSELDKAGFIKRQLVETRQITKHVAQILDSRMNTKYDENDKLIREVKVITLKSKLVSDFRKDFQFYKVREINNYHHAHDAYLNAVVGTALIKKYPKLESEFVYGDYKVYDVRKMIAKSEQEIGKATAKYFFYSNIMNFFKTEITLANGEIRKRPLIETNGETGEIVWDKGRDFATVRKVLSMPQVNIVKKTEVQTGGFSKESILPKRNSDKLIARKKDWDPKKYGGFDSPTVAYSVLVVAKVEKGKSKKLKSVKELLGITIMERSSFEKNPIDFLEAKGYKEVKKDLIIKLPKYSLFELENGRKRMLASAGELQKGNELALPSKYVNFLYLASHYEKLKGSPEDNEQKQLFVEQHKHYLDEIIEQISEFSKRVILADANLDKVLSAYNKHRDKPIREQAENIIHLFTLTNLGAPAAFKYFDTTIDRKRYTSTKEVLDATLIHQSITGLYETRIDLSQLGGDGGGGSEAAAKGGGGGTLNIEDEYRLHETSKGPDVPLGSTWLSDFPQAWAETGGMGLAVRQAPLIIPLKATSTPVSIKQYPMSQEARLGIKPHIQRLLDQGILVPCQSPWNTPLLPVKKPGTNDYRPVQDLREVNKRVEDIHPTVPNPYNLLSGLPPSHQWYTVLDLKDAFFCLRLHPTSQSLFAFEWRDPEMGISGQLTWTRLPQGFKNSPTLFNEALHRDLADFRIQHPDLILLQYVDDLLLAATSELDCQQGTRALLQTLGDLGYRASAKKAQICQKQVKYLGYLLKEGQRWLTEARKETVMGQPTPKTPRQLREFLGTAGFCRLWIPGFAEMAAPLYPLTKPGTLFEWGPDQQKAYQEIKQALLTAPALGLPDLTKPFELFVDEKQGYAKGVLTQKLGPWRRPVAYLSKKLDPVAAGWPPCLRMVAAIAVLTKDAGKLTMGQPLVILAPHAVEALVKQPPDRWLSNARMTHYQALLLDTDRVQFGPIVALNPATLLPLPEEGLQHDCLDILAEAHGTRPDLTDQPLPDADHTWYTDGSSFLQEGQRKAGAAVTTETEVVWAKALPAGTSAQRAELIALTQALKMAEGKKLNVYTDSRYAFATAHIHGEIYRRRGWLTSEGKEIKNKDEILALLKALFLPKRLSIIHCPGHQKGNRAEARGNRMADQAAREVATRETPETSTLLAGKRTADGSEFEKRTADGSEFESPKKKAKVE

SEQ ID NO: 6903 - protein, 2096 aa, synthetic construct
MPAAKRVKLDGGDKKYSIGLDIGTNSVGWAVITDEYKVPSKKFKVLGNTDRHSIKKNLIGALLFDSGETAEATRLKRTARRRYTRRKNRICYLQEIFSNEMAKVDDSFFHRLEESFLVEEDKKHERHPIFGNIVDEVAYHEKYPTIYHLRKKLVDSTDKADLRLIYLALAHMIKFRGHFLIEGDLNPDNSDVDKLFIQLVQTYNQLFEENPINASGVDAKAILSARLSKSRRLENLIAQLPGEKKNGLFGNLIALSLGLTPNFKSNFDLAEDAKLQLSKDTYDDDLDNLLAQIGDQYADLFLAAKNLSDAILLSDILRVNTEITKAPLSASMIKRYDEHHQDLTLLKALVRQQLPEKYKEIFFDQSKNGYAGYIDGGASQEEFYKFIKPILEKMDGTEELLVKLNREDLLRKQRTFDNGSIPHQIHLGELHAILRRQEDFYPFLKDNREKIEKILTFRIPYYVGPLARGNSRFAWMTRKSEETITPWNFEEVVDKGASAQSFIERMTNFDKNLPNEKVLPKHSLLYEYFTVYNELTKVKYVTEGMRKPAFLSGEQKKAIVDLLFKTNRKVTVKQLKEDYFKKIECFDSVEISGVEDRFNASLGTYHDLLKIIKDKDFLDNEENEDILEDIVLTLTLFEDREMIEERLKTYAHLFDDKVMKQLKRRRYTGWGRLSRKLINGIRDKQSGKTILDFLKSDGFANRNFMQLIHDDSLTFKEDIQKAQVSGQGDSLHEHIANLAGSPAIKKGILQTVKVVDELVKVMGRHKPENIVIEMARENQTTQKGQKNSRERMKRIEEGIKELGSQILKEHPVENTQLQNEKLYLYYLQNGRDMYVDQELDINRLSDYDVDHIVPQSFLKDDSIDNKVLTRSDKARGKSDNVPSEEVVKKMKNYWRQLLNAKLITQRKFDNLTKAERGGLSELDKAGFIKRQLVETRQITKHVAQILDSRMNTKYDENDKLIREVKVITLKSKLVSDFRKDFQFYKVREINNYHHAHDAYLNAVVGTALIKKYPKLESEFVYGDYKVYDVRKMIAKSEQEIGKATAKYFFYSNIMNFFKTEITLANGEIRKRPLIETNGETGEIVWDKGRDFATVRKVLSMPQVNIVKKTEVQTGGFSKESILPKRNSDKLIARKKDWDPKKYGGFDSPTVAYSVLVVAKVEKGKSKKLKSVKELLGITIMERSSFEKNPIDFLEAKGYKEVKKDLIIKLPKYSLFELENGRKRMLASAGELQKGNELALPSKYVNFLYLASHYEKLKGSPEDNEQKQLFVEQHKHYLDEIIEQISEFSKRVILADANLDKVLSAYNKHRDKPIREQAENIIHLFTLTNLGAPAAFKYFDTTIDRKRYTSTKEVLDATLIHQSITGLYETRIDLSQLGGDGGGGSEAAAKGGGGGTLNIEDEYRLHEISTEPDVSPGSTWLSDFPQAWAETGGMGLAVRQAPLIIPLKATSTPVSIKQYPMSQEAKLGIKPHIQRLLDQGILVPCQSPWNTPLLPVKKPGTNDYRPVQGLREVNKRVEDIHPTVPNPYNLLSGLPTSHRWYTVLDLKDAFFCLRLHPTSQPLFASEWRDPGMGISGQLTWTRLPQGFKNSPTLFNEALHRGLADFRIQHPDLILLQYVDDLLLAATSELDCQQGTRALLKTLGNLGYRASAKKAQICQKQVKYLGYLLREGQRWLTEARKETVMGQPTPKTPRQLREFLGTAGFCRLWIPRFAEMAAPLYPLTKPGTLFNWGPDQQKAYHEIKQALLTAPALGLPDLTKPFELFVDEKQGYAKGVLTQKLGPWRRPVAYLSKKLDPVAAGWPPCLRMVAAIAVLTKDAGKLTMGQPLVILAPHAVEALVKQPPDRWLSNARMTHYQAMLLDTDRVQFGPVVALNPATLLPLPEEGAPHDCLEILAETHGTEPDLTDQPIPDADHTWYTDGSSFLQEGQRKAGAAVTTETEVIWARALPAGTSAQRAELIALTQALKMAEGKRLNVYTDSRYAFATAHIHGEIYKRRGWLTSEGREIKNKSEILALLKALFLPKRLSIIHCLGHQKGDSAEARGNRLADQAAREAAIKTPPDTSTLLAGKRTADGSEFEKRTADGSEFESPKKKAKVE

SEQ ID NO: 6904 - protein, 2090 aa, synthetic construct
MPAAKRVKLDGGDKKYSIGLDIGTNSVGWAVITDEYKVPSKKFKVLGNTDRHSIKKNLIGALLFDSGETAEATRLKRTARRRYTRRKNRICYLQEIFSNEMAKVDDSFFHRLEESFLVEEDKKHERHPIFGNIVDEVAYHEKYPTIYHLRKKLVDSTDKADLRLIYLALAHMIKFRGHFLIEGDLNPDNSDVDKLFIQLVQTYNQLFEENPINASGVDAKAILSARLSKSRRLENLIAQLPGEKKNGLFGNLIALSLGLTPNFKSNFDLAEDAKLQLSKDTYDDDLDNLLAQIGDQYADLFLAAKNLSDAILLSDILRVNTEITKAPLSASMIKRYDEHHQDLTLLKALVRQQLPEKYKEIFFDQSKNGYAGYIDGGASQEEFYKFIKPILEKMDGTEELLVKLNREDLLRKQRTFDNGSIPHQIHLGELHAILRRQEDFYPFLKDNREKIEKILTFRIPYYVGPLARGNSRFAWMTRKSEETITPWNFEEVVDKGASAQSFIERMTNFDKNLPNEKVLPKHSLLYEYFTVYNELTKVKYVTEGMRKPAFLSGEQKKAIVDLLFKTNRKVTVKQLKEDYFKKIECFDSVEISGVEDRFNASLGTYHDLLKIIKDKDFLDNEENEDILEDIVLTLTLFEDREMIEERLKTYAHLFDDKVMKQLKRRRYTGWGRLSRKLINGIRDKQSGKTILDFLKSDGFANRNFMQLIHDDSLTFKEDIQKAQVSGQGDSLHEHIANLAGSPAIKKGILQTVKVVDELVKVMGRHKPENIVIEMARENQTTQKGQKNSRERMKRIEEGIKELGSQILKEHPVENTQLQNEKLYLYYLQNGRDMYVDQELDINRLSDYDVDHIVPQSFLKDDSIDNKVLTRSDKARGKSDNVPSEEVVKKMKNYWRQLLNAKLITQRKFDNLTKAERGGLSELDKAGFIKRQLVETRQITKHVAQILDSRMNTKYDENDKLIREVKVITLKSKLVSDFRKDFQFYKVREINNYHHAHDAYLNAVVGTALIKKYPKLESEFVYGDYKVYDVRKMIAKSEQEIGKATAKYFFYSNIMNFFKTEITLANGEIRKRPLIETNGETGEIVWDKGRDFATVRKVLSMPQVNIVKKTEVQTGGFSKESILPKRNSDKLIARKKDWDPKKYGGFDSPTVAYSVLVVAKVEKGKSKKLKSVKELLGITIMERSSFEKNPIDFLEAKGYKEVKKDLIIKLPKYSLFELENGRKRMLASAGELQKGNELALPSKYVNFLYLASHYEKLKGSPEDNEQKQLFVEQHKHYLDEIIEQISEFSKRVILADANLDKVLSAYNKHRDKPIREQAENIIHLFTLTNLGAPAAFKYFDTTIDRKRYTSTKEVLDATLIHQSITGLYETRIDLSQLGGDGGGGSEAAAKGGGGGTLQLDDEYRLYSPLVKPDQNIQFWLEQFPQAWAETAGMGLAKQVPPQVIQLKASATPVSVRQYPLSKEAQEGIRPHVQRLIQQGILVPVQSPWNTPLLPVRKPGTNDYRPVQDLREVNKRVQDIHPTVPNPYNLLCALPPQRSWYTVLDLKDAFFCLRLHPTSQPLFAFEWRDPGTGRTGQLTWTRLPQGFKNSPTIFDEALHRDLANFRIQHPQVTLLQYVDDLLLAGATKQDCLEGTKALLLELSDLGYRASAKKAQICRREVTYLGYSLRDGQRWLTEARKKTVVQIPAPTTAKQVREFLGTAGFCRLWIPGFATLAAPLYPLTKEKGEFSWAPEHQKAFDAIKKALLSAPALALPDVTKPFTLYVDERKGVARGVLTQTLGPWRRPVAYLSKKLDPVASGWPVCLKAIAAVAILVKDADKLTLGQNITVIAPHALENIVRQPPDRWMTNARMTHYQSLLLTERVTFAPPAALNPATLLPEETDEPVTHDCHQLLIEETGVRKDLTDIPLTGEVLTWFTDGSSYVVEGKRMAGAAVVDGTRTIWASSLPEGTSAQKAELMALTQALRLAEGKSINIYTDSRYAFATAHVHGAIYKQRGLLTSAGREIKNKEEILSLLEALHLPKRLAIIHCPGHQKAKDPISRGNQMADRVAKQAAQGVNLLAGKRTADGSEFEKRTADGSEFESPKKKAKVE

SEQ ID NO: 6905 - protein, 2096 aa, synthetic construct
MPAAKRVKLDGGDKKYSIGLDIGTNSVGWAVITDEYKVPSKKFKVLGNTDRHSIKKNLIGALLFDSGETAEATRLKRTARRRYTRRKNRICYLQEIFSNEMAKVDDSFFHRLEESFLVEEDKKHERHPIFGNIVDEVAYHEKYPTIYHLRKKLVDSTDKADLRLIYLALAHMIKFRGHFLIEGDLNPDNSDVDKLFIQLVQTYNQLFEENPINASGVDAKAILSARLSKSRRLENLIAQLPGEKKNGLFGNLIALSLGLTPNFKSNFDLAEDAKLQLSKDTYDDDLDNLLAQIGDQYADLFLAAKNLSDAILLSDILRVNTEITKAPLSASMIKRYDEHHQDLTLLKALVRQQLPEKYKEIFFDQSKNGYAGYIDGGASQEEFYKFIKPILEKMDGTEELLVKLNREDLLRKQRTFDNGSIPHQIHLGELHAILRRQEDFYPFLKDNREKIEKILTFRIPYYVGPLARGNSRFAWMTRKSEETITPWNFEEVVDKGASAQSFIERMTNFDKNLPNEKVLPKHSLLYEYFTVYNELTKVKYVTEGMRKPAFLSGEQKKAIVDLLFKTNRKVTVKQLKEDYFKKIECFDSVEISGVEDRFNASLGTYHDLLKIIKDKDFLDNEENEDILEDIVLTLTLFEDREMIEERLKTYAHLFDDKVMKQLKRRRYTGWGRLSRKLINGIRDKQSGKTILDFLKSDGFANRNFMQLIHDDSLTFKEDIQKAQVSGQGDSLHEHIANLAGSPAIKKGILQTVKVVDELVKVMGRHKPENIVIEMARENQTTQKGQKNSRERMKRIEEGIKELGSQILKEHPVENTQLQNEKLYLYYLQNGRDMYVDQELDINRLSDYDVDHIVPQSFLKDDSIDNKVLTRSDKARGKSDNVPSEEVVKKMKNYWRQLLNAKLITQRKFDNLTKAERGGLSELDKAGFIKRQLVETRQITKHVAQILDSRMNTKYDENDKLIREVKVITLKSKLVSDFRKDFQFYKVREINNYHHAHDAYLNAVVGTALIKKYPKLESEFVYGDYKVYDVRKMIAKSEQEIGKATAKYFFYSNIMNFFKTEITLANGEIRKRPLIETNGETGEIVWDKGRDFATVRKVLSMPQVNIVKKTEVQTGGFSKESILPKRNSDKLIARKKDWDPKKYGGFDSPTVAYSVLVVAKVEKGKSKKLKSVKELLGITIMERSSFEKNPIDFLEAKGYKEVKKDLIIKLPKYSLFELENGRKRMLASAGELQKGNELALPSKYVNFLYLASHYEKLKGSPEDNEQKQLFVEQHKHYLDEIIEQISEFSKRVILADANLDKVLSAYNKHRDKPIREQAENIIHLFTLTNLGAPAAFKYFDTTIDRKRYTSTKEVLDATLIHQSITGLYETRIDLSQLGGDGGGGSEAAAKGGGGGTLNIEDEYRLHETSKEPDVPLGSTWLSDFPQAWAETGGMGLAVRQAPLIIPLKATSTPVSIKQYPMSQEARLGIKPHIQRLLDQGILVPCQSPWNTPLLPVKKPGTNDYRPVQDLREVNKRVEDIHPTVPNPYNLLSGLPPSHQWYTVLDLKDAFFCLRLHPTSQPLFAFEWRDPEMGISGQLTWTRLPQGFKNSPTLFDEALHRDLADFRIQHPDLILLQYVDDLLLAATSEQDCQRGTRALLQTLGNLGYRASAKKAQICQKQVKYLGYLLKEGQRWLTEARKETVMGQPTPKTPRQLREFLGTAGFCRLWIPGFAEMAAPLYPLTKTGTLFNWGPDQQKAYQEIKQALLTAPALGLPDLTKPFELFVDEKQGYAKGVLTQKLGPWRRPVAYLSKKLDPVAAGWPPCLRMVAAIAVLTKDAGKLTMGQPLVILAPHAVEALVKQPPDRWLSNARMTHYQAMLLDTDRVQFGPVVALNPATLLPLPEKEAPHDCLEILAETHGTRPDLTDQPIPDADYTWYTDGSSFLQEGQRRAGAAVTTETEVIWARALPAGTSAQRAELIALTQALKMAEGKKLNVYTDSRYAFATAHVHGEIYRRRGLLTSEGREIKNKNEILALLKALFLPKRLSIIHCPGHQKGNSAEARGNRMADQAAREAAMKAVLETSTLLAGKRTADGSEFEKRTADGSEFESPKKKAKVE

SEQ ID NO: 6906 - protein, 2096 aa, synthetic construct
MPAAKRVKLDGGDKKYSIGLDIGTNSVGWAVITDEYKVPSKKFKVLGNTDRHSIKKNLIGALLFDSGETAEATRLKRTARRRYTRRKNRICYLQEIFSNEMAKVDDSFFHRLEESFLVEEDKKHERHPIFGNIVDEVAYHEKYPTIYHLRKKLVDSTDKADLRLIYLALAHMIKFRGHFLIEGDLNPDNSDVDKLFIQLVQTYNQLFEENPINASGVDAKAILSARLSKSRRLENLIAQLPGEKKNGLFGNLIALSLGLTPNFKSNFDLAEDAKLQLSKDTYDDDLDNLLAQIGDQYADLFLAAKNLSDAILLSDILRVNTEITKAPLSASMIKRYDEHHQDLTLLKALVRQQLPEKYKEIFFDQSKNGYAGYIDGGASQEEFYKFIKPILEKMDGTEELLVKLNREDLLRKQRTFDNGSIPHQIHLGELHAILRRQEDFYPFLKDNREKIEKILTFRIPYYVGPLARGNSRFAWMTRKSEETITPWNFEEVVDKGASAQSFIERMTNFDKNLPNEKVLPKHSLLYEYFTVYNELTKVKYVTEGMRKPAFLSGEQKKAIVDLLFKTNRKVTVKQLKEDYFKKIECFDSVEISGVEDRFNASLGTYHDLLKIIKDKDFLDNEENEDILEDIVLTLTLFEDREMIEERLKTYAHLFDDKVMKQLKRRRYTGWGRLSRKLINGIRDKQSGKTILDFLKSDGFANRNFMQLIHDDSLTFKEDIQKAQVSGQGDSLHEHIANLAGSPAIKKGILQTVKVVDELVKVMGRHKPENIVIEMARENQTTQKGQKNSRERMKRIEEGIKELGSQILKEHPVENTQLQNEKLYLYYLQNGRDMYVDQELDINRLSDYDVDHIVPQSFLKDDSIDNKVLTRSDKARGKSDNVPSEEVVKKMKNYWRQLLNAKLITQRKFDNLTKAERGGLSELDKAGFIKRQLVETRQITKHVAQILDSRMNTKYDENDKLIREVKVITLKSKLVSDFRKDFQFYKVREINNYHHAHDAYLNAVVGTALIKKYPKLESEFVYGDYKVYDVRKMIAKSEQEIGKATAKYFFYSNIMNFFKTEITLANGEIRKRPLIETNGETGEIVWDKGRDFATVRKVLSMPQVNIVKKTEVQTGGFSKESILPKRNSDKLIARKKDWDPKKYGGFDSPTVAYSVLVVAKVEKGKSKKLKSVKELLGITIMERSSFEKNPIDFLEAKGYKEVKKDLIIKLPKYSLFELENGRKRMLASAGELQKGNELALPSKYVNFLYLASHYEKLKGSPEDNEQKQLFVEQHKHYLDEIIEQISEFSKRVILADANLDKVLSAYNKHRDKPIREQAENIIHLFTLTNLGAPAAFKYFDTTIDRKRYTSTKEVLDATLIHQSITGLYETRIDLSQLGGDGGGGSEAAAKGGGGGTLNIEDEYRLHETSKEPDVPLGSTWLSDFPQAWAETGGMGLAVRQAPLIIPLKATSTPVSIKQYPMSQEARLGIKPHIQRLLDQGILVPCQSPWNTPLLPVKKPGTNDYRPVQDLREVNKRVEDIHPTVPNPYNLLSGLPPSHQWYTVLDLKDAFFCLRLHPTSQPLFAFEWRDPEMGISGQLTWTRLPQGFKNSPTLFNEALHRDLADFRIQHPDLILLQYVDDLLLAATSEQDCQRGTRALLQTLGNLGYRASAKKAQICQKQVKYLGYLLKEGQRWLTEARKETVMGQPTPKTPRQLREFLGTAGFCRLWIPGFAEMAAPLYPLTKPGTLFNWGPDQQKAYQEIKQALLTAPALGLPDLTKPFELFVDEKQGYAKGVLTQKLGPWRRPVAYLSKKLDPVAAGWPPCLRMVAAIAVLTKDAGKLTMGQPLVILAPHAVEALVKQPPDRWLSNARMTHYQAMLLDTDRVQFGPVVALNPATLLPLPEKEAPHDCLEILAETHGTRPDLTDQPIPDADYTWYTDGSSFLQEGQRRAGAAVTTETEVIWARALPAGTSAQRAELIALTQALKMAEGKKLNVYTDSRYAFATAHVHGEIYRRRGWLTSEGREIKNKNEILALLKALFLPKRLSIIHCPGHQKGNSAEARGNRMADQAAREAAMKAVLETSTLLAGKRTADGSEFEKRTADGSEFESPKKKAKVE

SEQ ID NO: 6907 - protein, 2098 aa, synthetic construct
MPAAKRVKLDGGDKKYSIGLDIGTNSVGWAVITDEYKVPSKKFKVLGNTDRHSIKKNLIGALLFDSGETAEATRLKRTARRRYTRRKNRICYLQEIFSNEMAKVDDSFFHRLEESFLVEEDKKHERHPIFGNIVDEVAYHEKYPTIYHLRKKLVDSTDKADLRLIYLALAHMIKFRGHFLIEGDLNPDNSDVDKLFIQLVQTYNQLFEENPINASGVDAKAILSARLSKSRRLENLIAQLPGEKKNGLFGNLIALSLGLTPNFKSNFDLAEDAKLQLSKDTYDDDLDNLLAQIGDQYADLFLAAKNLSDAILLSDILRVNTEITKAPLSASMIKRYDEHHQDLTLLKALVRQQLPEKYKEIFFDQSKNGYAGYIDGGASQEEFYKFIKPILEKMDGTEELLVKLNREDLLRKQRTFDNGSIPHQIHLGELHAILRRQEDFYPFLKDNREKIEKILTFRIPYYVGPLARGNSRFAWMTRKSEETITPWNFEEVVDKGASAQSFIERMTNFDKNLPNEKVLPKHSLLYEYFTVYNELTKVKYVTEGMRKPAFLSGEQKKAIVDLLFKTNRKVTVKQLKEDYFKKIECFDSVEISGVEDRFNASLGTYHDLLKIIKDKDFLDNEENEDILEDIVLTLTLFEDREMIEERLKTYAHLFDDKVMKQLKRRRYTGWGRLSRKLINGIRDKQSGKTILDFLKSDGFANRNFMQLIHDDSLTFKEDIQKAQVSGQGDSLHEHIANLAGSPAIKKGILQTVKVVDELVKVMGRHKPENIVIEMARENQTTQKGQKNSRERMKRIEEGIKELGSQILKEHPVENTQLQNEKLYLYYLQNGRDMYVDQELDINRLSDYDVDHIVPQSFLKDDSIDNKVLTRSDKARGKSDNVPSEEVVKKMKNYWRQLLNAKLITQRKFDNLTKAERGGLSELDKAGFIKRQLVETRQITKHVAQILDSRMNTKYDENDKLIREVKVITLKSKLVSDFRKDFQFYKVREINNYHHAHDAYLNAVVGTALIKKYPKLESEFVYGDYKVYDVRKMIAKSEQEIGKATAKYFFYSNIMNFFKTEITLANGEIRKRPLIETNGETGEIVWDKGRDFATVRKVLSMPQVNIVKKTEVQTGGFSKESILPKRNSDKLIARKKDWDPKKYGGFDSPTVAYSVLVVAKVEKGKSKKLKSVKELLGITIMERSSFEKNPIDFLEAKGYKEVKKDLIIKLPKYSLFELENGRKRMLASAGELQKGNELALPSKYVNFLYLASHYEKLKGSPEDNEQKQLFVEQHKHYLDEIIEQISEFSKRVILADANLDKVLSAYNKHRDKPIREQAENIIHLFTLTNLGAPAAFKYFDTTIDRKRYTSTKEVLDATLIHQSITGLYETRIDLSQLGGDGGGGGGGSEAAAKGGTAPLEEEYRLFLEAPIQNVTLLEQWKREIPKVWAEINPPGLASTQAPIHVQLLSTALPVRVRQYPITLEAKRSLRETIRKFRAAGILRPVHSPWNTPLLPVRKSGTSEYRMVQDLREVNKRVETIHPTVPNPYTLLSLLPPDRIWYSVLDLKDAFFCIPLAPESQLIFAFEWADAEEGESGQLTWTRLPQGFKNSPTLFDEALNRDLQGFRLDHPSVSLLQYVDDLLIAADTQAACLSATRDLLMTLAELGYRVSGKKAQLCQEEVTYLGFKIHKGSRSLSNSRTQAILQIPVPKTKRQVREFLGTIGYCRLWIPGFAELAQPLYAATRGGNDPLVWGEKEEEAFQSLKLALTQPPALALPSLDKPFQLFVEETSGAAKGVLTQALGPWKRPVAYLSKRLDPVAAGWPRCLRAIAAAALLTREASKLTFGQDIEITSSHNLESLLRSPPDKWLTNARITQYQVLLLDPPRVRFKQTAALNPATLLPETDDTLPIHHCLDTLDSLTSTRPDLTDQPLAQAEATLFTDGSSYIRDGKRYAGAAVVTLDSVIWAEPLPIGTSAQKAELIALTKALEWSKDKSVNIYTDSRYAFATLHVHGMIYRERGLLTAGGKAIKNAPEILALLTAVWLPKRVAVMHCKGHQKDDAPTSTGNRRADEVAREVAIRPLSTQATISAGKRTADGSEFEKRTADGSEFESPKKKAKVE

SEQ ID NO: 6908 - protein, 2098 aa, synthetic construct
MPAAKRVKLDGGDKKYSIGLDIGTNSVGWAVITDEYKVPSKKFKVLGNTDRHSIKKNLIGALLFDSGETAEATRLKRTARRRYTRRKNRICYLQEIFSNEMAKVDDSFFHRLEESFLVEEDKKHERHPIFGNIVDEVAYHEKYPTIYHLRKKLVDSTDKADLRLIYLALAHMIKFRGHFLIEGDLNPDNSDVDKLFIQLVQTYNQLFEENPINASGVDAKAILSARLSKSRRLENLIAQLPGEKKNGLFGNLIALSLGLTPNFKSNFDLAEDAKLQLSKDTYDDDLDNLLAQIGDQYADLFLAAKNLSDAILLSDILRVNTEITKAPLSASMIKRYDEHHQDLTLLKALVRQQLPEKYKEIFFDQSKNGYAGYIDGGASQEEFYKFIKPILEKMDGTEELLVKLNREDLLRKQRTFDNGSIPHQIHLGELHAILRRQEDFYPFLKDNREKIEKILTFRIPYYVGPLARGNSRFAWMTRKSEETITPWNFEEVVDKGASAQSFIERMTNFDKNLPNEKVLPKHSLLYEYFTVYNELTKVKYVTEGMRKPAFLSGEQKKAIVDLLFKTNRKVTVKQLKEDYFKKIECFDSVEISGVEDRFNASLGTYHDLLKIIKDKDFLDNEENEDILEDIVLTLTLFEDREMIEERLKTYAHLFDDKVMKQLKRRRYTGWGRLSRKLINGIRDKQSGKTILDFLKSDGFANRNFMQLIHDDSLTFKEDIQKAQVSGQGDSLHEHIANLAGSPAIKKGILQTVKVVDELVKVMGRHKPENIVIEMARENQTTQKGQKNSRERMKRIEEGIKELGSQILKEHPVENTQLQNEKLYLYYLQNGRDMYVDQELDINRLSDYDVDHIVPQSFLKDDSIDNKVLTRSDKARGKSDNVPSEEVVKKMKNYWRQLLNAKLITQRKFDNLTKAERGGLSELDKAGFIKRQLVETRQITKHVAQILDSRMNTKYDENDKLIREVKVITLKSKLVSDFRKDFQFYKVREINNYHHAHDAYLNAVVGTALIKKYPKLESEFVYGDYKVYDVRKMIAKSEQEIGKATAKYFFYSNIMNFFKTEITLANGEIRKRPLIETNGETGEIVWDKGRDFATVRKVLSMPQVNIVKKTEVQTGGFSKESILPKRNSDKLIARKKDWDPKKYGGFDSPTVAYSVLVVAKVEKGKSKKLKSVKELLGITIMERSSFEKNPIDFLEAKGYKEVKKDLIIKLPKYSLFELENGRKRMLASAGELQKGNELALPSKYVNFLYLASHYEKLKGSPEDNEQKQLFVEQHKHYLDEIIEQISEFSKRVILADANLDKVLSAYNKHRDKPIREQAENIIHLFTLTNLGAPAAFKYFDTTIDRKRYTSTKEVLDATLIHQSITGLYETRIDLSQLGGDGGGGGGGSEAAAKGGTAPLEEEYRLFLEAPIQNVTLLEQWKREIPKVWAEINPPGLASTQAPIHVQLLSTALPVRVRQYPITLEAKRSLRETIRKFRAAGILRPVHSPWNTPLLPVRKSGTSEYRMVQDLREVNKRVETIHPTVPNPYTLLSLLPPDRIWYSVLDLKDAFFCIPLAPESQLIFAFEWADAEEGESGQLTWTRLPQGFKNSPTLFNEALNRDLQGFRLDHPSVSLLQYVDDLLIAADTQAACLSATRDLLMTLAELGYRVSGKKAQLCQEEVTYLGFKIHKGSRSLSNSRTQAILQIPVPKTKRQVREFLGTIGYCRLWIPGFAELAQPLYAATRPGNDPLVWGEKEEEAFQSLKLALTQPPALALPSLDKPFQLFVEETSGAAKGVLTQALGPWKRPVAYLSKRLDPVAAGWPRCLRAIAAAALLTREASKLTFGQDIEITSSHNLESLLRSPPDKWLTNARITQYQVLLLDPPRVRFKQTAALNPATLLPETDDTLPIHHCLDTLDSLTSTRPDLTDQPLAQAEATLFTDGSSYIRDGKRYAGAAVVTLDSVIWAEPLPIGTSAQKAELIALTKALEWSKDKSVNIYTDSRYAFATLHVHGMIYRERGWLTAGGKAIKNAPEILALLTAVWLPKRVAVMHCKGHQKDDAPTSTGNRRADEVAREVAIRPLSTQATISAGKRTADGSEFEKRTADGSEFESPKKKAKVE

SEQ ID NO: 6909 - protein, 2102 aa, synthetic construct
MPAAKRVKLDGGDKKYSIGLDIGTNSVGWAVITDEYKVPSKKFKVLGNTDRHSIKKNLIGALLFDSGETAEATRLKRTARRRYTRRKNRICYLQEIFSNEMAKVDDSFFHRLEESFLVEEDKKHERHPIFGNIVDEVAYHEKYPTIYHLRKKLVDSTDKADLRLIYLALAHMIKFRGHFLIEGDLNPDNSDVDKLFIQLVQTYNQLFEENPINASGVDAKAILSARLSKSRRLENLIAQLPGEKKNGLFGNLIALSLGLTPNFKSNFDLAEDAKLQLSKDTYDDDLDNLLAQIGDQYADLFLAAKNLSDAILLSDILRVNTEITKAPLSASMIKRYDEHHQDLTLLKALVRQQLPEKYKEIFFDQSKNGYAGYIDGGASQEEFYKFIKPILEKMDGTEELLVKLNREDLLRKQRTFDNGSIPHQIHLGELHAILRRQEDFYPFLKDNREKIEKILTFRIPYYVGPLARGNSRFAWMTRKSEETITPWNFEEVVDKGASAQSFIERMTNFDKNLPNEKVLPKHSLLYEYFTVYNELTKVKYVTEGMRKPAFLSGEQKKAIVDLLFKTNRKVTVKQLKEDYFKKIECFDSVEISGVEDRFNASLGTYHDLLKIIKDKDFLDNEENEDILEDIVLTLTLFEDREMIEERLKTYAHLFDDKVMKQLKRRRYTGWGRLSRKLINGIRDKQSGKTILDFLKSDGFANRNFMQLIHDDSLTFKEDIQKAQVSGQGDSLHEHIANLAGSPAIKKGILQTVKVVDELVKVMGRHKPENIVIEMARENQTTQKGQKNSRERMKRIEEGIKELGSQILKEHPVENTQLQNEKLYLYYLQNGRDMYVDQELDINRLSDYDVDHIVPQSFLKDDSIDNKVLTRSDKARGKSDNVPSEEVVKKMKNYWRQLLNAKLITQRKFDNLTKAERGGLSELDKAGFIKRQLVETRQITKHVAQILDSRMNTKYDENDKLIREVKVITLKSKLVSDFRKDFQFYKVREINNYHHAHDAYLNAVVGTALIKKYPKLESEFVYGDYKVYDVRKMIAKSEQEIGKATAKYFFYSNIMNFFKTEITLANGEIRKRPLIETNGETGEIVWDKGRDFATVRKVLSMPQVNIVKKTEVQTGGFSKESILPKRNSDKLIARKKDWDPKKYGGFDSPTVAYSVLVVAKVEKGKSKKLKSVKELLGITIMERSSFEKNPIDFLEAKGYKEVKKDLIIKLPKYSLFELENGRKRMLASAGELQKGNELALPSKYVNFLYLASHYEKLKGSPEDNEQKQLFVEQHKHYLDEIIEQISEFSKRVILADANLDKVLSAYNKHRDKPIREQAENIIHLFTLTNLGAPAAFKYFDTTIDRKRYTSTKEVLDATLIHQSITGLYETRIDLSQLGGDGGGGGGGSEAAAKGGTVSLQDEHRLFDIPVTTSLPDVWLQDFPQAWAETGGLGRAKCQAPIIIDLKPTAVPVSIKQYPMSLEAHMGIRQHIIKFLELGVLRPCRSPWNTPLLPVKKPGTQDYRPVQDLREINKRTVDIHPTVPNPYNLLSTLKPDYSWYTVLDLKDAFFCLPLAPQSQELFAFEWKDPERGISGQLTWTRLPQGFKNSPTLFNEALHRDLTDFRTQHPEVTLLQYVDDLLLAAPTKKACTQGTRHLLQELGEKGYRASAKKAQICQTKVTYLGYILSEGKRWLTPGRIETVARIPPPRNPREVREFLGTAGFCRLWIPGFAELAAPLYALTKPSTPFTWQTEHQLAFEALKKALLSAPALGLPDTSKPFTLFLDERQGIAKGVLTQKLGPWKRPVAYLSKKLDPVAAGWPPCLRIMAATAMLVKDSAKLTLGQPLTVITPHTLEAIVRQPPDRWITNARLTHYQALLLDTDRVQFGPPVTLNPATLLPVPENQPSPHDCRQVLAETHGTREDLKDQELPDADHTWYTDGSSYLDSGTRRAGAAVVDGHNTIWAQSLPPGTSAQKAELIALTKALELSKGKKANIYTDSRYAFATAHTHGSIYERRGWLTSEGKEIKNKAEIIALLKALFLPQEVAIIHCPGHQKGQDPVAVGNRQADRVARQAAMAEVLTLATEPDNTSHITAGKRTADGSEFEKRTADGSEFESPKKKAKVE

SEQ ID NO: 6910 - protein, 2173 aa, synthetic construct
MPAAKRVKLDGGDKKYSIGLDIGTNSVGWAVITDEYKVPSKKFKVLGNTDRHSIKKNLIGALLFDSGETAEATRLKRTARRRYTRRKNRICYLQEIFSNEMAKVDDSFFHRLEESFLVEEDKKHERHPIFGNIVDEVAYHEKYPTIYHLRKKLVDSTDKADLRLIYLALAHMIKFRGHFLIEGDLNPDNSDVDKLFIQLVQTYNQLFEENPINASGVDAKAILSARLSKSRRLENLIAQLPGEKKNGLFGNLIALSLGLTPNFKSNFDLAEDAKLQLSKDTYDDDLDNLLAQIGDQYADLFLAAKNLSDAILLSDILRVNTEITKAPLSASMIKRYDEHHQDLTLLKALVRQQLPEKYKEIFFDQSKNGYAGYIDGGASQEEFYKFIKPILEKMDGTEELLVKLNREDLLRKQRTFDNGSIPHQIHLGELHAILRRQEDFYPFLKDNREKIEKILTFRIPYYVGPLARGNSRFAWMTRKSEETITPWNFEEVVDKGASAQSFIERMTNFDKNLPNEKVLPKHSLLYEYFTVYNELTKVKYVTEGMRKPAFLSGEQKKAIVDLLFKTNRKVTVKQLKEDYFKKIECFDSVEISGVEDRFNASLGTYHDLLKIIKDKDFLDNEENEDILEDIVLTLTLFEDREMIEERLKTYAHLFDDKVMKQLKRRRYTGWGRLSRKLINGIRDKQSGKTILDFLKSDGFANRNFMQLIHDDSLTFKEDIQKAQVSGQGDSLHEHIANLAGSPAIKKGILQTVKVVDELVKVMGRHKPENIVIEMARENQTTQKGQKNSRERMKRIEEGIKELGSQILKEHPVENTQLQNEKLYLYYLQNGRDMYVDQELDINRLSDYDVDHIVPQSFLKDDSIDNKVLTRSDKARGKSDNVPSEEVVKKMKNYWRQLLNAKLITQRKFDNLTKAERGGLSELDKAGFIKRQLVETRQITKHVAQILDSRMNTKYDENDKLIREVKVITLKSKLVSDFRKDFQFYKVREINNYHHAHDAYLNAVVGTALIKKYPKLESEFVYGDYKVYDVRKMIAKSEQEIGKATAKYFFYSNIMNFFKTEITLANGEIRKRPLIETNGETGEIVWDKGRDFATVRKVLSMPQVNIVKKTEVQTGGFSKESILPKRNSDKLIARKKDWDPKKYGGFDSPTVAYSVLVVAKVEKGKSKKLKSVKELLGITIMERSSFEKNPIDFLEAKGYKEVKKDLIIKLPKYSLFELENGRKRMLASAGELQKGNELALPSKYVNFLYLASHYEKLKGSPEDNEQKQLFVEQHKHYLDEIIEQISEFSKRVILADANLDKVLSAYNKHRDKPIREQAENIIHLFTLTNLGAPAAFKYFDTTIDRKRYTSTKEVLDATLIHQSITGLYETRIDLSQLGGDGGGGGGGSEAAAKGGMDLLKPLTVERKGVKIKGYWNSQADITCVPKDLLQGEEPVRQQNVTTIHGTQEGDVYYVNLKIDGRRINTEVIGTTLDYAIITPGDVPWILKKPLELTIKLDLEEQQGTLLNNSILSKKGKEELKQLFEKYSALWQSWENQVGHRRIRPHKIATGTVKPTPQKQYHINPKAKPDIQIVINDLLKQGVLIQKESTMNTPVYPVPKPNGRWRMVLDYRAVNKVTPLIAVQNQHSYGILGSLFKGRYKTTIDLSNGFWAHPIVPEDYWITAFTWQGKQYCWTVLPQGFLNSPGLFTGDVVDLLQGIPNVEVYVDDVYISHDSEKEHLEYLDILFNRLKEAGYIISLKKSNIANSIVDFLGFQITNEGRGLTDTFKEKLENITAPTTLKQLQSILGLLNFARNFIPDFTELIAPLYALIPKSTKNYVPWQIEHSTTLETLITKLNGAEYLQGRKGDKTLIMKVNASYTTGYIRYYNEGEKKPISYVSIVFSKTELKFTELEKLLTTVHKGLLKALDLSMGQNIHVYSPIVSMQNIQKTPQTAKKALASRWLSWLSYLEDPRIRFFYDPQMPALKDLPAVDTGKDNKKHPSNFQHIFYTDGSAITSPTKEGHLNAGMGIVYFINKDGNLQKQQEWSISLGNHTAQFAEIAAFEFALKKCLPLGGNILVVTDSNYVAKAYNEELDVWASNGFVNNRKKPLKHISKWKSVADLKRLRPDVVVTHEPGHQKLDSSPHAYGNNLADQLATQASFKVHAGKRTADGSEFEKRTADGSEFESPKKKAKVE

SEQ ID NO: 6911 - protein, 2095 aa, synthetic construct
MPAAKRVKLDGGDKKYSIGLDIGTNSVGWAVITDEYKVPSKKFKVLGNTDRHSIKKNLIGALLFDSGETAEATRLKRTARRRYTRRKNRICYLQEIFSNEMAKVDDSFFHRLEESFLVEEDKKHERHPIFGNIVDEVAYHEKYPTIYHLRKKLVDSTDKADLRLIYLALAHMIKFRGHFLIEGDLNPDNSDVDKLFIQLVQTYNQLFEENPINASGVDAKAILSARLSKSRRLENLIAQLPGEKKNGLFGNLIALSLGLTPNFKSNFDLAEDAKLQLSKDTYDDDLDNLLAQIGDQYADLFLAAKNLSDAILLSDILRVNTEITKAPLSASMIKRYDEHHQDLTLLKALVRQQLPEKYKEIFFDQSKNGYAGYIDGGASQEEFYKFIKPILEKMDGTEELLVKLNREDLLRKQRTFDNGSIPHQIHLGELHAILRRQEDFYPFLKDNREKIEKILTFRIPYYVGPLARGNSRFAWMTRKSEETITPWNFEEVVDKGASAQSFIERMTNFDKNLPNEKVLPKHSLLYEYFTVYNELTKVKYVTEGMRKPAFLSGEQKKAIVDLLFKTNRKVTVKQLKEDYFKKIECFDSVEISGVEDRFNASLGTYHDLLKIIKDKDFLDNEENEDILEDIVLTLTLFEDREMIEERLKTYAHLFDDKVMKQLKRRRYTGWGRLSRKLINGIRDKQSGKTILDFLKSDGFANRNFMQLIHDDSLTFKEDIQKAQVSGQGDSLHEHIANLAGSPAIKKGILQTVKVVDELVKVMGRHKPENIVIEMARENQTTQKGQKNSRERMKRIEEGIKELGSQILKEHPVENTQLQNEKLYLYYLQNGRDMYVDQELDINRLSDYDVDHIVPQSFLKDDSIDNKVLTRSDKARGKSDNVPSEEVVKKMKNYWRQLLNAKLITQRKFDNLTKAERGGLSELDKAGFIKRQLVETRQITKHVAQILDSRMNTKYDENDKLIREVKVITLKSKLVSDFRKDFQFYKVREINNYHHAHDAYLNAVVGTALIKKYPKLESEFVYGDYKVYDVRKMIAKSEQEIGKATAKYFFYSNIMNFFKTEITLANGEIRKRPLIETNGETGEIVWDKGRDFATVRKVLSMPQVNIVKKTEVQTGGFSKESILPKRNSDKLIARKKDWDPKKYGGFDSPTVAYSVLVVAKVEKGKSKKLKSVKELLGITIMERSSFEKNPIDFLEAKGYKEVKKDLIIKLPKYSLFELENGRKRMLASAGELQKGNELALPSKYVNFLYLASHYEKLKGSPEDNEQKQLFVEQHKHYLDEIIEQISEFSKRVILADANLDKVLSAYNKHRDKPIREQAENIIHLFTLTNLGAPAAFKYFDTTIDRKRYTSTKEVLDATLIHQSITGLYETRIDLSQLGGDGGGGGGGSEAAAKGGTLQLEEEYRLFEPESTQKQEMDIWLKNFPQAWAETGGMGTAHCQAPVLIQLKATATPISIRQYPMPHEAYQGIKPHIRRMLDQGILKPCQSPWNTPLLPVKKPGTEDYRPVQDLREVNKRVEDIHPTVPNPYNLLSTLPPSHPWYTVLDLKDAFFCLRLHSESQLLFAFEWRDPEIGLSGQLTWTRLPQGFKNSPTLFNEALHSDLADFRVRYPALVLLQYVDDLLLAAATRTECLEGTKALLETLGNKGYRASAKKAQICLQEVTYLGYSLKDGQRWLTKARKEAILSIPVPKNSRQVREFLGKAGYCRLFIPGFAELAAPLYPLTRPGTLFQWGTEQQLAFEDIKKALLSSPALGLPDITKPFELFIDENSGFAKGVLVQKLGPWKRPVAYLSKKLDTVASGWPPCLRMVAAIAILVKDAGKLTLGQPLTILTSHPVEALVRQPPNKWLSNARMTHYQAMLLDAERVHFGPTVSLNPATLLPLPSGGNHHDCLQILAETHGTRPDLTDQPLPDADLTWYTDGSSFIRNGEREAGAAVTTESEVIWAAPLPPGTSAQRAELIALTQALKMAEGKKLTVYTDSRYAFATTHVHGEIYRRRGWLTSEGKEIKNKNEILALLEALFLPKRLSIIHCPGHQKGDSPQAKGNRLADDTAKKAATETHSSLTVLPAGKRTADGSEFEKRTADGSEFESPKKKAKVE

SEQ ID NO: 6912 - protein, 2176 aa, synthetic construct
MPAAKRVKLDGGDKKYSIGLDIGTNSVGWAVITDEYKVPSKKFKVLGNTDRHSIKKNLIGALLFDSGETAEATRLKRTARRRYTRRKNRICYLQEIFSNEMAKVDDSFFHRLEESFLVEEDKKHERHPIFGNIVDEVAYHEKYPTIYHLRKKLVDSTDKADLRLIYLALAHMIKFRGHFLIEGDLNPDNSDVDKLFIQLVQTYNQLFEENPINASGVDAKAILSARLSKSRRLENLIAQLPGEKKNGLFGNLIALSLGLTPNFKSNFDLAEDAKLQLSKDTYDDDLDNLLAQIGDQYADLFLAAKNLSDAILLSDILRVNTEITKAPLSASMIKRYDEHHQDLTLLKALVRQQLPEKYKEIFFDQSKNGYAGYIDGGASQEEFYKFIKPILEKMDGTEELLVKLNREDLLRKQRTFDNGSIPHQIHLGELHAILRRQEDFYPFLKDNREKIEKILTFRIPYYVGPLARGNSRFAWMTRKSEETITPWNFEEVVDKGASAQSFIERMTNFDKNLPNEKVLPKHSLLYEYFTVYNELTKVKYVTEGMRKPAFLSGEQKKAIVDLLFKTNRKVTVKQLKEDYFKKIECFDSVEISGVEDRFNASLGTYHDLLKIIKDKDFLDNEENEDILEDIVLTLTLFEDREMIEERLKTYAHLFDDKVMKQLKRRRYTGWGRLSRKLINGIRDKQSGKTILDFLKSDGFANRNFMQLIHDDSLTFKEDIQKAQVSGQGDSLHEHIANLAGSPAIKKGILQTVKVVDELVKVMGRHKPENIVIEMARENQTTQKGQKNSRERMKRIEEGIKELGSQILKEHPVENTQLQNEKLYLYYLQNGRDMYVDQELDINRLSDYDVDHIVPQSFLKDDSIDNKVLTRSDKARGKSDNVPSEEVVKKMKNYWRQLLNAKLITQRKFDNLTKAERGGLSELDKAGFIKRQLVETRQITKHVAQILDSRMNTKYDENDKLIREVKVITLKSKLVSDFRKDFQFYKVREINNYHHAHDAYLNAVVGTALIKKYPKLESEFVYGDYKVYDVRKMIAKSEQEIGKATAKYFFYSNIMNFFKTEITLANGEIRKRPLIETNGETGEIVWDKGRDFATVRKVLSMPQVNIVKKTEVQTGGFSKESILPKRNSDKLIARKKDWDPKKYGGFDSPTVAYSVLVVAKVEKGKSKKLKSVKELLGITIMERSSFEKNPIDFLEAKGYKEVKKDLIIKLPKYSLFELENGRKRMLASAGELQKGNELALPSKYVNFLYLASHYEKLKGSPEDNEQKQLFVEQHKHYLDEIIEQISEFSKRVILADANLDKVLSAYNKHRDKPIREQAENIIHLFTLTNLGAPAAFKYFDTTIDRKRYTSTKEVLDATLIHQSITGLYETRIDLSQLGGDGGGGGGGSEAAAKGGMNPLQLLQPLPAEIKGTKLLAHWNSGATITCIPESFLEDEQPIKKTLIKTIHGEKQQNVYYVTFKVKGRKVEAEVIASPYEYILLSPTDVPWLTQQPLQLTILVPLQEYQEKILSKTALPEDQKQQLKTLFVKYDNLWQHWENQVGHRKIRPHNIATGDYPPRPQKQYPINPKAKPSIQIVIDDLLKQGVLTPQNSTMNTPVYPVPKPDGRWRMVLDYREVNKTIPLTAAQNQHSAGILATIVRQKYKTTLDLANGFWAHPITPESYWLTAFTWQGKQYCWTRLPQGFLNSPALFTADVVDLLKEIPNVQVYVDDIYLSHDDPKEHVQQLEKVFQILLQAGYVVSLKKSEIGQKTVEFLGFNITKEGRGLTDTFKTKLLNITPPKDLKQLQSILGLLNFARNFIPNFAELVQPLYNLIASAKGKYIEWSEENTKQLNMVIEALNTASNLEERLPEQRLVIKVNTSPSAGYVRYYNETGKKPIMYLNYVFSKAELKFSMLEKLLTTMHKALIKAMDLAMGQEILVYSPIVSMTKIQKTPLPERKALPIRWITWMTYLEDPRIQFHYDKTLPELKHIPDVYTSSQSPVKHPSQYEGVFYTDGSAIKSPDPTKSNNAGMGIVHATYKPEYQVLNQWSIPLGNHTAQMAEIAAVEFACKKALKIPGPVLVITDSFYVAESANKELPYWKSNGFVNNKKKPLKHISKWKSIAECLSMKPDITIQHEKGISLQIPVFILKGNALADKLATQGSYVVNAGKRTADGSEFEKRTADGSEFESPKKKAKVE

SEQ ID NO: 6913 - protein, 2176 aa, synthetic construct
MPAAKRVKLDGGDKKYSIGLDIGTNSVGWAVITDEYKVPSKKFKVLGNTDRHSIKKNLIGALLFDSGETAEATRLKRTARRRYTRRKNRICYLQEIFSNEMAKVDDSFFHRLEESFLVEEDKKHERHPIFGNIVDEVAYHEKYPTIYHLRKKLVDSTDKADLRLIYLALAHMIKFRGHFLIEGDLNPDNSDVDKLFIQLVQTYNQLFEENPINASGVDAKAILSARLSKSRRLENLIAQLPGEKKNGLFGNLIALSLGLTPNFKSNFDLAEDAKLQLSKDTYDDDLDNLLAQIGDQYADLFLAAKNLSDAILLSDILRVNTEITKAPLSASMIKRYDEHHQDLTLLKALVRQQLPEKYKEIFFDQSKNGYAGYIDGGASQEEFYKFIKPILEKMDGTEELLVKLNREDLLRKQRTFDNGSIPHQIHLGELHAILRRQEDFYPFLKDNREKIEKILTFRIPYYVGPLARGNSRFAWMTRKSEETITPWNFEEVVDKGASAQSFIERMTNFDKNLPNEKVLPKHSLLYEYFTVYNELTKVKYVTEGMRKPAFLSGEQKKAIVDLLFKTNRKVTVKQLKEDYFKKIECFDSVEISGVEDRFNASLGTYHDLLKIIKDKDFLDNEENEDILEDIVLTLTLFEDREMIEERLKTYAHLFDDKVMKQLKRRRYTGWGRLSRKLINGIRDKQSGKTILDFLKSDGFANRNFMQLIHDDSLTFKEDIQKAQVSGQGDSLHEHIANLAGSPAIKKGILQTVKVVDELVKVMGRHKPENIVIEMARENQTTQKGQKNSRERMKRIEEGIKELGSQILKEHPVENTQLQNEKLYLYYLQNGRDMYVDQELDINRLSDYDVDHIVPQSFLKDDSIDNKVLTRSDKARGKSDNVPSEEVVKKMKNYWRQLLNAKLITQRKFDNLTKAERGGLSELDKAGFIKRQLVETRQITKHVAQILDSRMNTKYDENDKLIREVKVITLKSKLVSDFRKDFQFYKVREINNYHHAHDAYLNAVVGTALIKKYPKLESEFVYGDYKVYDVRKMIAKSEQEIGKATAKYFFYSNIMNFFKTEITLANGEIRKRPLIETNGETGEIVWDKGRDFATVRKVLSMPQVNIVKKTEVQTGGFSKESILPKRNSDKLIARKKDWDPKKYGGFDSPTVAYSVLVVAKVEKGKSKKLKSVKELLGITIMERSSFEKNPIDFLEAKGYKEVKKDLIIKLPKYSLFELENGRKRMLASAGELQKGNELALPSKYVNFLYLASHYEKLKGSPEDNEQKQLFVEQHKHYLDEIIEQISEFSKRVILADANLDKVLSAYNKHRDKPIREQAENIIHLFTLTNLGAPAAFKYFDTTIDRKRYTSTKEVLDATLIHQSITGLYETRIDLSQLGGDGGGGGGGSEAAAKGGMNPLQLLQPLPAEIKGTKLLAHWNSGATITCIPESFLEDEQPIKKTLIKTIHGEKQQNVYYVTFKVKGRKVEAEVIASPYEYILLSPTDVPWLTQQPLQLTILVPLQEYQEKILSKTALPEDQKQQLKTLFVKYDNLWQHWENQVGHRKIRPHNIATGDYPPRPQKQYPINPKAKPSIQIVIDDLLKQGVLTPQNSTMNTPVYPVPKPDGRWRMVLDYREVNKTIPLTAAQNQHSAGILATIVRQKYKTTLDLANGFWAHPITPESYWLTAFTWQGKQYCWTRLPQGFLNSPALFNADVVDLLKEIPNVQVYVDDIYLSHDDPKEHVQQLEKVFQILLQAGYVVSLKKSEIGQKTVEFLGFNITKEGRGLTDTFKTKLLNITPPKDLKQLQSILGKLNFARNFIPNFAELVQPLYNLIAPAKGKYIEWSEENTKQLNMVIEALNTASNLEERLPEQRLVIKVNTSPSAGYVRYYNETGKKPIMYLNYVFSKAELKFSMLEKLLTTMHKALIKAMDLAMGQEILVYSPIVSMTKIQKTPLPERKALPIRWITWMTYLEDPRIQFHYDKTLPELKHIPDVYTSSQSPVKHPSQYEGVFYTDGSAIKSPDPTKSNNAGMGIVHATYKPEYQVLNQWSIPLGNHTAQMAEIAAVEFACKKALKIPGPVLVITDSFYVAESANKELPYWKSNGFVNNKKKPLKHISKWKSIAECLSMKPDITIQHEKGISLQIPVFILKGNALADKLATQGSYVVNAGKRTADGSEFEKRTADGSEFESPKKKAKVE

SEQ ID NO: 6914 - protein, 2218 aa, synthetic construct
MPAAKRVKLDGGDKKYSIGLDIGTNSVGWAVITDEYKVPSKKFKVLGNTDRHSIKKNLIGALLFDSGETAEATRLKRTARRRYTRRKNRICYLQEIFSNEMAKVDDSFFHRLEESFLVEEDKKHERHPIFGNIVDEVAYHEKYPTIYHLRKKLVDSTDKADLRLIYLALAHMIKFRGHFLIEGDLNPDNSDVDKLFIQLVQTYNQLFEENPINASGVDAKAILSARLSKSRRLENLIAQLPGEKKNGLFGNLIALSLGLTPNFKSNFDLAEDAKLQLSKDTYDDDLDNLLAQIGDQYADLFLAAKNLSDAILLSDILRVNTEITKAPLSASMIKRYDEHHQDLTLLKALVRQQLPEKYKEIFFDQSKNGYAGYIDGGASQEEFYKFIKPILEKMDGTEELLVKLNREDLLRKQRTFDNGSIPHQIHLGELHAILRRQEDFYPFLKDNREKIEKILTFRIPYYVGPLARGNSRFAWMTRKSEETITPWNFEEVVDKGASAQSFIERMTNFDKNLPNEKVLPKHSLLYEYFTVYNELTKVKYVTEGMRKPAFLSGEQKKAIVDLLFKTNRKVTVKQLKEDYFKKIECFDSVEISGVEDRFNASLGTYHDLLKIIKDKDFLDNEENEDILEDIVLTLTLFEDREMIEERLKTYAHLFDDKVMKQLKRRRYTGWGRLSRKLINGIRDKQSGKTILDFLKSDGFANRNFMQLIHDDSLTFKEDIQKAQVSGQGDSLHEHIANLAGSPAIKKGILQTVKVVDELVKVMGRHKPENIVIEMARENQTTQKGQKNSRERMKRIEEGIKELGSQILKEHPVENTQLQNEKLYLYYLQNGRDMYVDQELDINRLSDYDVDHIVPQSFLKDDSIDNKVLTRSDKARGKSDNVPSEEVVKKMKNYWRQLLNAKLITQRKFDNLTKAERGGLSELDKAGFIKRQLVETRQITKHVAQILDSRMNTKYDENDKLIREVKVITLKSKLVSDFRKDFQFYKVREINNYHHAHDAYLNAVVGTALIKKYPKLESEFVYGDYKVYDVRKMIAKSEQEIGKATAKYFFYSNIMNFFKTEITLANGEIRKRPLIETNGETGEIVWDKGRDFATVRKVLSMPQVNIVKKTEVQTGGFSKESILPKRNSDKLIARKKDWDPKKYGGFDSPTVAYSVLVVAKVEKGKSKKLKSVKELLGITIMERSSFEKNPIDFLEAKGYKEVKKDLIIKLPKYSLFELENGRKRMLASAGELQKGNELALPSKYVNFLYLASHYEKLKGSPEDNEQKQLFVEQHKHYLDEIIEQISEFSKRVILADANLDKVLSAYNKHRDKPIREQAENIIHLFTLTNLGAPAAFKYFDTTIDRKRYTSTKEVLDATLIHQSITGLYETRIDLSQLGGDGGGGGGGSEAAAKGGTLGDQGSRGSDPLPEPRVTLTVEGIPTEFLVNTGAEHSVLTKPMGKMGSKRTVVAGATGSKVYPWTTKRLLKIGQKQVTHSFLVIPECPAPLLGRDLLTKLKAQIQFSTEGPQVTWEDRPAMCLVLNLEEEYRLHEKPVPPSIDPSWLQLFPMVWAEKAGMGLANQVPPVVVELKSDASPVAVRQYPMSKEAREGIRPHIQRFLDLGILVPCQSPWNTPLLPVKKPGTNDYRPVQDLREVNKRVQDIHPTVPNPYNLLSSLPPSHTWYSVLDLKDAFFCLKLHPNSQPLFAFEWRDPEKGNTGQLTWTRLPQGFKNSPTLFDEALHRDLASFRALNPQVVMLQYVDDLLVAAPTYRDCKEGTRRLLQELSKLGYRVSAKKAQLCREEVTYLGYLLKGGKRWLTPARKATVMKIPTPTTPRQVREFLGTAGFCRLWIPGFASLAAPLYPLTREKVPFTWTEAHQEAFGRIKEALLSAPALALPDLTKPFALYVDEKEGVARGVLTQTLGPWRRPVAYLSKKLDPVASGWPTCLKAIAAVALLLKDADKLTLGQNVLVIAPHNLESIVRQPPDRWMTNARMTHYQSLLLNERVSFAPPAILNPATLLPVESDDTPIHICSEILAEETGTRPDLRDQPLPGVPAWYTDGSSFIMDGRRQAGAAIVDNKRTVWASNLPEGTSAQKAELIALTQALRLAEGKSINIYTDSRYAFATAHVHGAIYKQRGLLTSAGKDIKNKEEILALLEAIHLPKRVAIIHCPGHQRGTDPVATGNRKADEAAKQAAQSTRILTETTKNAGKRTADGSEFEKRTADGSEFESPKKKAKVE

SEQ ID NO: 6915 - protein, 2127 aa, synthetic construct
MPAAKRVKLDGGDKKYSIGLDIGTNSVGWAVITDEYKVPSKKFKVLGNTDRHSIKKNLIGALLFDSGETAEATRLKRTARRRYTRRKNRICYLQEIFSNEMAKVDDSFFHRLEESFLVEEDKKHERHPIFGNIVDEVAYHEKYPTIYHLRKKLVDSTDKADLRLIYLALAHMIKFRGHFLIEGDLNPDNSDVDKLFIQLVQTYNQLFEENPINASGVDAKAILSARLSKSRRLENLIAQLPGEKKNGLFGNLIALSLGLTPNFKSNFDLAEDAKLQLSKDTYDDDLDNLLAQIGDQYADLFLAAKNLSDAILLSDILRVNTEITKAPLSASMIKRYDEHHQDLTLLKALVRQQLPEKYKEIFFDQSKNGYAGYIDGGASQEEFYKFIKPILEKMDGTEELLVKLNREDLLRKQRTFDNGSIPHQIHLGELHAILRRQEDFYPFLKDNREKIEKILTFRIPYYVGPLARGNSRFAWMTRKSEETITPWNFEEVVDKGASAQSFIERMTNFDKNLPNEKVLPKHSLLYEYFTVYNELTKVKYVTEGMRKPAFLSGEQKKAIVDLLFKTNRKVTVKQLKEDYFKKIECFDSVEISGVEDRFNASLGTYHDLLKIIKDKDFLDNEENEDILEDIVLTLTLFEDREMIEERLKTYAHLFDDKVMKQLKRRRYTGWGRLSRKLINGIRDKQSGKTILDFLKSDGFANRNFMQLIHDDSLTFKEDIQKAQVSGQGDSLHEHIANLAGSPAIKKGILQTVKVVDELVKVMGRHKPENIVIEMARENQTTQKGQKNSRERMKRIEEGIKELGSQILKEHPVENTQLQNEKLYLYYLQNGRDMYVDQELDINRLSDYDVDHIVPQSFLKDDSIDNKVLTRSDKARGKSDNVPSEEVVKKMKNYWRQLLNAKLITQRKFDNLTKAERGGLSELDKAGFIKRQLVETRQITKHVAQILDSRMNTKYDENDKLIREVKVITLKSKLVSDFRKDFQFYKVREINNYHHAHDAYLNAVVGTALIKKYPKLESEFVYGDYKVYDVRKMIAKSEQEIGKATAKYFFYSNIMNFFKTEITLANGEIRKRPLIETNGETGEIVWDKGRDFATVRKVLSMPQVNIVKKTEVQTGGFSKESILPKRNSDKLIARKKDWDPKKYGGFDSPTVAYSVLVVAKVEKGKSKKLKSVKELLGITIMERSSFEKNPIDFLEAKGYKEVKKDLIIKLPKYSLFELENGRKRMLASAGELQKGNELALPSKYVNFLYLASHYEKLKGSPEDNEQKQLFVEQHKHYLDEIIEQISEFSKRVILADANLDKVLSAYNKHRDKPIREQAENIIHLFTLTNLGAPAAFKYFDTTIDRKRYTSTKEVLDATLIHQSITGLYETRIDLSQLGGDGGGGGGGSEAAAKGGLLGRDLLTKLKAQIQFSTEGPQVTWEDRPAMCLVLNLEEEYRLHEKPVPPSIDPSWLQLFPMVWAEKAGMGLANQVPPVVVELKSDASPVAVRQYPMSKEAREGIRPHIQRFLDLGILVPCQSPWNTPLLPVKKPGTNDYRPVQDLREVNKRVQDIHPTVPNPYNLLSSLPPSHTWYSVLDLKDAFFCLKLHPNSQPLFAFEWRDPEKGNTGQLTWTRLPQGFKNSPTLFNEALHRDLASFRALNPQVVMLQYVDDLLVAAPTYRDCKEGTRRLLQELSKLGYRVSAKKAQLCREEVTYLGYLLKGGKRWLTPARKATVMKIPTPTTPRQVREFLGTAGFCRLWIPGFASLAAPLYPLTRPKVPFTWTEAHQEAFGRIKEALLSAPALALPDLTKPFALYVDEKEGVARGVLTQTLGPWRRPVAYLSKKLDPVASGWPTCLKAIAAVALLLKDADKLTLGQNVLVIAPHNLESIVRQPPDRWMTNARMTHYQSLLLNERVSFAPPAILNPATLLPVESDDTPIHICSEILAEETGTRPDLRDQPLPGVPAWYTDGSSFIMDGRRQAGAAIVDNKRTVWASNLPEGTSAQKAELIALTQALRLAEGKSINIYTDSRYAFATAHVHGAIYKQRGWLTSAGKDIKNKEEILALLEAIHLPKRVAIIHCPGHQRGTDPVATGNRKADEAAKQAAQSTRILTETTKNAGKRTADGSEFEKRTADGSEFESPKKKAKVE

SEQ ID NO: 6916 - protein, 2218 aa, synthetic construct
MPAAKRVKLDGGDKKYSIGLDIGTNSVGWAVITDEYKVPSKKFKVLGNTDRHSIKKNLIGALLFDSGETAEATRLKRTARRRYTRRKNRICYLQEIFSNEMAKVDDSFFHRLEESFLVEEDKKHERHPIFGNIVDEVAYHEKYPTIYHLRKKLVDSTDKADLRLIYLALAHMIKFRGHFLIEGDLNPDNSDVDKLFIQLVQTYNQLFEENPINASGVDAKAILSARLSKSRRLENLIAQLPGEKKNGLFGNLIALSLGLTPNFKSNFDLAEDAKLQLSKDTYDDDLDNLLAQIGDQYADLFLAAKNLSDAILLSDILRVNTEITKAPLSASMIKRYDEHHQDLTLLKALVRQQLPEKYKEIFFDQSKNGYAGYIDGGASQEEFYKFIKPILEKMDGTEELLVKLNREDLLRKQRTFDNGSIPHQIHLGELHAILRRQEDFYPFLKDNREKIEKILTFRIPYYVGPLARGNSRFAWMTRKSEETITPWNFEEVVDKGASAQSFIERMTNFDKNLPNEKVLPKHSLLYEYFTVYNELTKVKYVTEGMRKPAFLSGEQKKAIVDLLFKTNRKVTVKQLKEDYFKKIECFDSVEISGVEDRFNASLGTYHDLLKIIKDKDFLDNEENEDILEDIVLTLTLFEDREMIEERLKTYAHLFDDKVMKQLKRRRYTGWGRLSRKLINGIRDKQSGKTILDFLKSDGFANRNFMQLIHDDSLTFKEDIQKAQVSGQGDSLHEHIANLAGSPAIKKGILQTVKVVDELVKVMGRHKPENIVIEMARENQTTQKGQKNSRERMKRIEEGIKELGSQILKEHPVENTQLQNEKLYLYYLQNGRDMYVDQELDINRLSDYDVDHIVPQSFLKDDSIDNKVLTRSDKARGKSDNVPSEEVVKKMKNYWRQLLNAKLITQRKFDNLTKAERGGLSELDKAGFIKRQLVETRQITKHVAQILDSRMNTKYDENDKLIREVKVITLKSKLVSDFRKDFQFYKVREINNYHHAHDAYLNAVVGTALIKKYPKLESEFVYGDYKVYDVRKMIAKSEQEIGKATAKYFFYSNIMNFFKTEITLANGEIRKRPLIETNGETGEIVWDKGRDFATVRKVLSMPQVNIVKKTEVQTGGFSKESILPKRNSDKLIARKKDWDPKKYGGFDSPTVAYSVLVVAKVEKGKSKKLKSVKELLGITIMERSSFEKNPIDFLEAKGYKEVKKDLIIKLPKYSLFELENGRKRMLASAGELQKGNELALPSKYVNFLYLASHYEKLKGSPEDNEQKQLFVEQHKHYLDEIIEQISEFSKRVILADANLDKVLSAYNKHRDKPIREQAENIIHLFTLTNLGAPAAFKYFDTTIDRKRYTSTKEVLDATLIHQSITGLYETRIDLSQLGGDGGGGGGGSEAAAKGGTLGDQGSRGSDPLPEPRVTLTVEGIPTEFLVNTGAEHSVLTKPMGKMGSKRTVVAGATGSKVYPWTTKRLLKIGQKQVTHSFLVIPECPAPLLGRDLLTKLKAQIQFSTEGPQVTWEDRPAMCLVLNLEEEYRLHEKPVPPSIDPSWLQLFPMVWAEKAGMGLANQVPPVVVELKSDASPVAVRQYPMSKEAREGIRPHIQRFLDLGILVPCQSPWNTPLLPVKKPGTNDYRPVQDLREVNKRVQDIHPTVPNPYNLLSSLPPSHTWYSVLDLKDAFFCLKLHPNSQPLFAFEWRDPEKGNTGQLTWTRLPQGFKNSPTLFNEALHRDLASFRALNPQVVMLQYVDDLLVAAPTYRDCKEGTRRLLQELSKLGYRVSAKKAQLCREEVTYLGYLLKGGKRWLTPARKATVMKIPTPTTPRQVREFLGTAGFCRLWIPGFASLAAPLYPLTRPKVPFTWTEAHQEAFGRIKEALLSAPALALPDLTKPFALYVDEKEGVARGVLTQTLGPWRRPVAYLSKKLDPVASGWPTCLKAIAAVALLLKDADKLTLGQNVLVIAPHNLESIVRQPPDRWMTNARMTHYQSLLLNERVSFAPPAILNPATLLPVESDDTPIHICSEILAEETGTRPDLRDQPLPGVPAWYTDGSSFIMDGRRQAGAAIVDNKRTVWASNLPEGTSAQKAELIALTQALRLAEGKSINIYTDSRYAFATAHVHGAIYKQRGWLTSAGKDIKNKEEILALLEAIHLPKRVAIIHCPGHQRGTDPVATGNRKADEAAKQAAQSTRILTETTKNAGKRTADGSEFEKRTADGSEFESPKKKAKVE

SEQ ID NO: 6917 - protein, 2096 aa, synthetic construct
MPAAKRVKLDGGDKKYSIGLDIGTNSVGWAVITDEYKVPSKKFKVLGNTDRHSIKKNLIGALLFDSGETAEATRLKRTARRRYTRRKNRICYLQEIFSNEMAKVDDSFFHRLEESFLVEEDKKHERHPIFGNIVDEVAYHEKYPTIYHLRKKLVDSTDKADLRLIYLALAHMIKFRGHFLIEGDLNPDNSDVDKLFIQLVQTYNQLFEENPINASGVDAKAILSARLSKSRRLENLIAQLPGEKKNGLFGNLIALSLGLTPNFKSNFDLAEDAKLQLSKDTYDDDLDNLLAQIGDQYADLFLAAKNLSDAILLSDILRVNTEITKAPLSASMIKRYDEHHQDLTLLKALVRQQLPEKYKEIFFDQSKNGYAGYIDGGASQEEFYKFIKPILEKMDGTEELLVKLNREDLLRKQRTFDNGSIPHQIHLGELHAILRRQEDFYPFLKDNREKIEKILTFRIPYYVGPLARGNSRFAWMTRKSEETITPWNFEEVVDKGASAQSFIERMTNFDKNLPNEKVLPKHSLLYEYFTVYNELTKVKYVTEGMRKPAFLSGEQKKAIVDLLFKTNRKVTVKQLKEDYFKKIECFDSVEISGVEDRFNASLGTYHDLLKIIKDKDFLDNEENEDILEDIVLTLTLFEDREMIEERLKTYAHLFDDKVMKQLKRRRYTGWGRLSRKLINGIRDKQSGKTILDFLKSDGFANRNFMQLIHDDSLTFKEDIQKAQVSGQGDSLHEHIANLAGSPAIKKGILQTVKVVDELVKVMGRHKPENIVIEMARENQTTQKGQKNSRERMKRIEEGIKELGSQILKEHPVENTQLQNEKLYLYYLQNGRDMYVDQELDINRLSDYDVDHIVPQSFLKDDSIDNKVLTRSDKARGKSDNVPSEEVVKKMKNYWRQLLNAKLITQRKFDNLTKAERGGLSELDKAGFIKRQLVETRQITKHVAQILDSRMNTKYDENDKLIREVKVITLKSKLVSDFRKDFQFYKVREINNYHHAHDAYLNAVVGTALIKKYPKLESEFVYGDYKVYDVRKMIAKSEQEIGKATAKYFFYSNIMNFFKTEITLANGEIRKRPLIETNGETGEIVWDKGRDFATVRKVLSMPQVNIVKKTEVQTGGFSKESILPKRNSDKLIARKKDWDPKKYGGFDSPTVAYSVLVVAKVEKGKSKKLKSVKELLGITIMERSSFEKNPIDFLEAKGYKEVKKDLIIKLPKYSLFELENGRKRMLASAGELQKGNELALPSKYVNFLYLASHYEKLKGSPEDNEQKQLFVEQHKHYLDEIIEQISEFSKRVILADANLDKVLSAYNKHRDKPIREQAENIIHLFTLTNLGAPAAFKYFDTTIDRKRYTSTKEVLDATLIHQSITGLYETRIDLSQLGGDGGGGGGGSEAAAKGGTLNLEDEYRLYETSAEPEVSPGSTWLSDFPQAWAETGGMGLAVRQAPLIIPLKATSTPVSIKQYPMSQEAKLGIKPHIQRLLDQGILVPCQSPWNTPLLPVKKPGTNDYRPVQDLREVNKRVEDIHPTVPNPYNLLSGLPPSHRWYTVLDLKDAFFCLRLHPTSQPLFAFEWRDPGMGISGQLTWTRLPQGFKNSPTLFNEALHRDLADFRIQHPDLILLQYVDDILLAATSELDCQQGTRALLLTLGNLGYRASAKKAQLCQKQVKYLGYLLKEGQRWLTEARKETVMGQPTPKTPRQLREFLGTAGFCRLWIPGFAEMAAPLYPLTKPGTLFNWGPDQQKAYQEIKQALLTAPALGLPDLTKPFELFVDEKQGYAKGVLTQKLGPWRRPVAYLSKKLDPVAAGWPPCLRMVAAIAVLRKDAGKLTMGQPLVILAPHAVEALVKQPPDRWLSNARMTHYQAMLLDTDRVQFGPVVALNPATLLPLPEEGAPHDCLEILAETHGTRPDLTDQPIPDADHTWYTDGSSFLQEGQRKAGAAVTTETEVIWARALPAGTSAQRAELIALTQALKMAEGKRLNVYTDSRYAFATAHIHGEIYRRRGWLTSEGREIKNKSEILALLKALFLPKRLSIIHCLGHQKGDSAEARGNRLADQAAREAAIKTPPDTSTLLAGKRTADGSEFEKRTADGSEFESPKKKAKVE

SEQ ID NO: 6918 - protein, 2096 aa, synthetic construct
MPAAKRVKLDGGDKKYSIGLDIGTNSVGWAVITDEYKVPSKKFKVLGNTDRHSIKKNLIGALLFDSGETAEATRLKRTARRRYTRRKNRICYLQEIFSNEMAKVDDSFFHRLEESFLVEEDKKHERHPIFGNIVDEVAYHEKYPTIYHLRKKLVDSTDKADLRLIYLALAHMIKFRGHFLIEGDLNPDNSDVDKLFIQLVQTYNQLFEENPINASGVDAKAILSARLSKSRRLENLIAQLPGEKKNGLFGNLIALSLGLTPNFKSNFDLAEDAKLQLSKDTYDDDLDNLLAQIGDQYADLFLAAKNLSDAILLSDILRVNTEITKAPLSASMIKRYDEHHQDLTLLKALVRQQLPEKYKEIFFDQSKNGYAGYIDGGASQEEFYKFIKPILEKMDGTEELLVKLNREDLLRKQRTFDNGSIPHQIHLGELHAILRRQEDFYPFLKDNREKIEKILTFRIPYYVGPLARGNSRFAWMTRKSEETITPWNFEEVVDKGASAQSFIERMTNFDKNLPNEKVLPKHSLLYEYFTVYNELTKVKYVTEGMRKPAFLSGEQKKAIVDLLFKTNRKVTVKQLKEDYFKKIECFDSVEISGVEDRFNASLGTYHDLLKIIKDKDFLDNEENEDILEDIVLTLTLFEDREMIEERLKTYAHLFDDKVMKQLKRRRYTGWGRLSRKLINGIRDKQSGKTILDFLKSDGFANRNFMQLIHDDSLTFKEDIQKAQVSGQGDSLHEHIANLAGSPAIKKGILQTVKVVDELVKVMGRHKPENIVIEMARENQTTQKGQKNSRERMKRIEEGIKELGSQILKEHPVENTQLQNEKLYLYYLQNGRDMYVDQELDINRLSDYDVDHIVPQSFLKDDSIDNKVLTRSDKARGKSDNVPSEEVVKKMKNYWRQLLNAKLITQRKFDNLTKAERGGLSELDKAGFIKRQLVETRQITKHVAQILDSRMNTKYDENDKLIREVKVITLKSKLVSDFRKDFQFYKVREINNYHHAHDAYLNAVVGTALIKKYPKLESEFVYGDYKVYDVRKMIAKSEQEIGKATAKYFFYSNIMNFFKTEITLANGEIRKRPLIETNGETGEIVWDKGRDFATVRKVLSMPQVNIVKKTEVQTGGFSKESILPKRNSDKLIARKKDWDPKKYGGFDSPTVAYSVLVVAKVEKGKSKKLKSVKELLGITIMERSSFEKNPIDFLEAKGYKEVKKDLIIKLPKYSLFELENGRKRMLASAGELQKGNELALPSKYVNFLYLASHYEKLKGSPEDNEQKQLFVEQHKHYLDEIIEQISEFSKRVILADANLDKVLSAYNKHRDKPIREQAENIIHLFTLTNLGAPAAFKYFDTTIDRKRYTSTKEVLDATLIHQSITGLYETRIDLSQLGGDGGGGGGGSEAAAKGGTLNIEDEYRLHETSKGPDVPLGSTWLSDFPQAWAETGGMGLAFRQAPLIISLKATSTPVSIKQYPMSQEARLGIKPHIQRLLDQGILVPCQSPWNTPLLPVKKPGTNDYRPVQDLREVNKRVEDIHPTVPNPYNLLSGLPPSHQWYTVLDLKDAFFCLRLHPTSQSLFAFEWKDPEMGISGQLTWTRLPQGFKNSPTLFDEALHRDLADFRIQHPDLILLQYVDDLLLAATSELDCQQGTRALLQTLGDLGYRASAKKAQICQKQVKYLGYLLKEGQRWLTEARKETVMGQPTPKTPRQLREFLGTAGLCRLWIPGFAEMAAPLYPLTKTGTLFKWGPDQQKAYQEIKQALLTAPALGLPDLTKPFELFVDEKQGYAKGVLTQKLGPWRRPVAYLSKKLDPVAAGWPPCLRMVAAIAVLTKDVGKLTMGQPLVILAPHAVEALVKQPPDRWLSNARMTHYQALLLDTDRVQFGPIVALNPATLLPLPEEGLQHDCLDILAEAHGTRPDLTDQPLPDADHTWYTDGSSFLQEGQRRAGAAVTTETEVIWAKALPAGTSAQRAELIALTQALKMAAGKKLNVYTDSRYAFATAHIHGEIYRRRGLLTSEGKEIKNKDEILALLKALFLPKRLSIIHCPGHQKGNHAEARGNRMADQAAREVATRETPETSTLLAGKRTADGSEFEKRTADGSEFESPKKKAKVE

SEQ ID NO: 6919 - protein, 2096 aa, synthetic construct
MPAAKRVKLDGGDKKYSIGLDIGTNSVGWAVITDEYKVPSKKFKVLGNTDRHSIKKNLIGALLFDSGETAEATRLKRTARRRYTRRKNRICYLQEIFSNEMAKVDDSFFHRLEESFLVEEDKKHERHPIFGNIVDEVAYHEKYPTIYHLRKKLVDSTDKADLRLIYLALAHMIKFRGHFLIEGDLNPDNSDVDKLFIQLVQTYNQLFEENPINASGVDAKAILSARLSKSRRLENLIAQLPGEKKNGLFGNLIALSLGLTPNFKSNFDLAEDAKLQLSKDTYDDDLDNLLAQIGDQYADLFLAAKNLSDAILLSDILRVNTEITKAPLSASMIKRYDEHHQDLTLLKALVRQQLPEKYKEIFFDQSKNGYAGYIDGGASQEEFYKFIKPILEKMDGTEELLVKLNREDLLRKQRTFDNGSIPHQIHLGELHAILRRQEDFYPFLKDNREKIEKILTFRIPYYVGPLARGNSRFAWMTRKSEETITPWNFEEVVDKGASAQSFIERMTNFDKNLPNEKVLPKHSLLYEYFTVYNELTKVKYVTEGMRKPAFLSGEQKKAIVDLLFKTNRKVTVKQLKEDYFKKIECFDSVEISGVEDRFNASLGTYHDLLKIIKDKDFLDNEENEDILEDIVLTLTLFEDREMIEERLKTYAHLFDDKVMKQLKRRRYTGWGRLSRKLINGIRDKQSGKTILDFLKSDGFANRNFMQLIHDDSLTFKEDIQKAQVSGQGDSLHEHIANLAGSPAIKKGILQTVKVVDELVKVMGRHKPENIVIEMARENQTTQKGQKNSRERMKRIEEGIKELGSQILKEHPVENTQLQNEKLYLYYLQNGRDMYVDQELDINRLSDYDVDHIVPQSFLKDDSIDNKVLTRSDKARGKSDNVPSEEVVKKMKNYWRQLLNAKLITQRKFDNLTKAERGGLSELDKAGFIKRQLVETRQITKHVAQILDSRMNTKYDENDKLIREVKVITLKSKLVSDFRKDFQFYKVREINNYHHAHDAYLNAVVGTALIKKYPKLESEFVYGDYKVYDVRKMIAKSEQEIGKATAKYFFYSNIMNFFKTEITLANGEIRKRPLIETNGETGEIVWDKGRDFATVRKVLSMPQVNIVKKTEVQTGGFSKESILPKRNSDKLIARKKDWDPKKYGGFDSPTVAYSVLVVAKVEKGKSKKLKSVKELLGITIMERSSFEKNPIDFLEAKGYKEVKKDLIIKLPKYSLFELENGRKRMLASAGELQKGNELALPSKYVNFLYLASHYEKLKGSPEDNEQKQLFVEQHKHYLDEIIEQISEFSKRVILADANLDKVLSAYNKHRDKPIREQAENIIHLFTLTNLGAPAAFKYFDTTIDRKRYTSTKEVLDATLIHQSITGLYETRIDLSQLGGDGGGGGGGSEAAAKGGTLNIEDEYRLHETSKGPDVPLGSTWLSDFPQAWAETGGMGLAVRQAPLIIPLKATSTPVSIKQYPMSQEARLGIKPHIQRLLDQGILVPCQSPWNTPLLPVKKPGTNDYRPVQDLREVNKRVEDIHPTVPNPYNLLSGLPPSHQWYTVLDLKDAFFCLRLHPTSQSLFAFEWRDPEMGISGQLTWTRLPQGFKNSPTLFNEALHRDLADFRIQHPDLILLQYVDDLLLAATSELDCQQGTRALLQTLGDLGYRASAKKAQICQKQVKYLGYLLKEGQRWLTEARKETVMGQPTPKTPRQLREFLGTAGFCRLWIPGFAEMAAPLYPLTKPGTLFEWGPDQQKAYQEIKQALLTAPALGLPDLTKPFELFVDEKQGYAKGVLTQKLGPWRRPVAYLSKKLDPVAAGWPPCLRMVAAIAVLTKDAGKLTMGQPLVILAPHAVEALVKQPPDRWLSNARMTHYQALLLDTDRVQFGPIVALNPATLLPLPEEGLQHDCLDILAEAHGTRPDLTDQPLPDADHTWYTDGSSFLQEGQRKAGAAVTTETEVVWAKALPAGTSAQRAELIALTQALKMAEGKKLNVYTDSRYAFATAHIHGEIYRRRGWLTSEGKEIKNKDEILALLKALFLPKRLSIIHCPGHQKGNRAEARGNRMADQAAREVATRETPETSTLLAGKRTADGSEFEKRTADGSEFESPKKKAKVE

SEQ ID NO: 6920 - protein, 2090 aa, synthetic construct
MPAAKRVKLDGGDKKYSIGLDIGTNSVGWAVITDEYKVPSKKFKVLGNTDRHSIKKNLIGALLFDSGETAEATRLKRTARRRYTRRKNRICYLQEIFSNEMAKVDDSFFHRLEESFLVEEDKKHERHPIFGNIVDEVAYHEKYPTIYHLRKKLVDSTDKADLRLIYLALAHMIKFRGHFLIEGDLNPDNSDVDKLFIQLVQTYNQLFEENPINASGVDAKAILSARLSKSRRLENLIAQLPGEKKNGLFGNLIALSLGLTPNFKSNFDLAEDAKLQLSKDTYDDDLDNLLAQIGDQYADLFLAAKNLSDAILLSDILRVNTEITKAPLSASMIKRYDEHHQDLTLLKALVRQQLPEKYKEIFFDQSKNGYAGYIDGGASQEEFYKFIKPILEKMDGTEELLVKLNREDLLRKQRTFDNGSIPHQIHLGELHAILRRQEDFYPFLKDNREKIEKILTFRIPYYVGPLARGNSRFAWMTRKSEETITPWNFEEVVDKGASAQSFIERMTNFDKNLPNEKVLPKHSLLYEYFTVYNELTKVKYVTEGMRKPAFLSGEQKKAIVDLLFKTNRKVTVKQLKEDYFKKIECFDSVEISGVEDRFNASLGTYHDLLKIIKDKDFLDNEENEDILEDIVLTLTLFEDREMIEERLKTYAHLFDDKVMKQLKRRRYTGWGRLSRKLINGIRDKQSGKTILDFLKSDGFANRNFMQLIHDDSLTFKEDIQKAQVSGQGDSLHEHIANLAGSPAIKKGILQTVKVVDELVKVMGRHKPENIVIEMARENQTTQKGQKNSRERMKRIEEGIKELGSQILKEHPVENTQLQNEKLYLYYLQNGRDMYVDQELDINRLSDYDVDHIVPQSFLKDDSIDNKVLTRSDKARGKSDNVPSEEVVKKMKNYWRQLLNAKLITQRKFDNLTKAERGGLSELDKAGFIKRQLVETRQITKHVAQILDSRMNTKYDENDKLIREVKVITLKSKLVSDFRKDFQFYKVREINNYHHAHDAYLNAVVGTALIKKYPKLESEFVYGDYKVYDVRKMIAKSEQEIGKATAKYFFYSNIMNFFKTEITLANGEIRKRPLIETNGETGEIVWDKGRDFATVRKVLSMPQVNIVKKTEVQTGGFSKESILPKRNSDKLIARKKDWDPKKYGGFDSPTVAYSVLVVAKVEKGKSKKLKSVKELLGITIMERSSFEKNPIDFLEAKGYKEVKKDLIIKLPKYSLFELENGRKRMLASAGELQKGNELALPSKYVNFLYLASHYEKLKGSPEDNEQKQLFVEQHKHYLDEIIEQISEFSKRVILADANLDKVLSAYNKHRDKPIREQAENIIHLFTLTNLGAPAAFKYFDTTIDRKRYTSTKEVLDATLIHQSITGLYETRIDLSQLGGDGGGGGGGSEAAAKGGTLQLDDEYRLYSPLVKPDQNIQFWLEQFPQAWAETAGMGLAKQVPPQVIQLKASATPVSVRQYPLSKEAQEGIRPHVQRLIQQGILVPVQSPWNTPLLPVRKPGTNDYRPVQDLREVNKRVQDIHPTVPNPYNLLCALPPQRSWYTVLDLKDAFFCLRLHPTSQPLFAFEWRDPGTGRTGQLTWTRLPQGFKNSPTIFDEALHRDLANFRIQHPQVTLLQYVDDLLLAGATKQDCLEGTKALLLELSDLGYRASAKKAQICRREVTYLGYSLRDGQRWLTEARKKTVVQIPAPTTAKQVREFLGTAGFCRLWIPGFATLAAPLYPLTKEKGEFSWAPEHQKAFDAIKKALLSAPALALPDVTKPFTLYVDERKGVARGVLTQTLGPWRRPVAYLSKKLDPVASGWPVCLKAIAAVAILVKDADKLTLGQNITVIAPHALENIVRQPPDRWMTNARMTHYQSLLLTERVTFAPPAALNPATLLPEETDEPVTHDCHQLLIEETGVRKDLTDIPLTGEVLTWFTDGSSYVVEGKRMAGAAVVDGTRTIWASSLPEGTSAQKAELMALTQALRLAEGKSINIYTDSRYAFATAHVHGAIYKQRGLLTSAGREIKNKEEILSLLEALHLPKRLAIIHCPGHQKAKDPISRGNQMADRVAKQAAQGVNLLAGKRTADGSEFEKRTADGSEFESPKKKAKVE

SEQ ID NO: 6921 - protein, 2087 aa, synthetic construct
MPAAKRVKLDGGDKKYSIGLDIGTNSVGWAVITDEYKVPSKKFKVLGNTDRHSIKKNLIGALLFDSGETAEATRLKRTARRRYTRRKNRICYLQEIFSNEMAKVDDSFFHRLEESFLVEEDKKHERHPIFGNIVDEVAYHEKYPTIYHLRKKLVDSTDKADLRLIYLALAHMIKFRGHFLIEGDLNPDNSDVDKLFIQLVQTYNQLFEENPINASGVDAKAILSARLSKSRRLENLIAQLPGEKKNGLFGNLIALSLGLTPNFKSNFDLAEDAKLQLSKDTYDDDLDNLLAQIGDQYADLFLAAKNLSDAILLSDILRVNTEITKAPLSASMIKRYDEHHQDLTLLKALVRQQLPEKYKEIFFDQSKNGYAGYIDGGASQEEFYKFIKPILEKMDGTEELLVKLNREDLLRKQRTFDNGSIPHQIHLGELHAILRRQEDFYPFLKDNREKIEKILTFRIPYYVGPLARGNSRFAWMTRKSEETITPWNFEEVVDKGASAQSFIERMTNFDKNLPNEKVLPKHSLLYEYFTVYNELTKVKYVTEGMRKPAFLSGEQKKAIVDLLFKTNRKVTVKQLKEDYFKKIECFDSVEISGVEDRFNASLGTYHDLLKIIKDKDFLDNEENEDILEDIVLTLTLFEDREMIEERLKTYAHLFDDKVMKQLKRRRYTGWGRLSRKLINGIRDKQSGKTILDFLKSDGFANRNFMQLIHDDSLTFKEDIQKAQVSGQGDSLHEHIANLAGSPAIKKGILQTVKVVDELVKVMGRHKPENIVIEMARENQTTQKGQKNSRERMKRIEEGIKELGSQILKEHPVENTQLQNEKLYLYYLQNGRDMYVDQELDINRLSDYDVDHIVPQSFLKDDSIDNKVLTRSDKARGKSDNVPSEEVVKKMKNYWRQLLNAKLITQRKFDNLTKAERGGLSELDKAGFIKRQLVETRQITKHVAQILDSRMNTKYDENDKLIREVKVITLKSKLVSDFRKDFQFYKVREINNYHHAHDAYLNAVVGTALIKKYPKLESEFVYGDYKVYDVRKMIAKSEQEIGKATAKYFFYSNIMNFFKTEITLANGEIRKRPLIETNGETGEIVWDKGRDFATVRKVLSMPQVNIVKKTEVQTGGFSKESILPKRNSDKLIARKKDWDPKKYGGFDSPTVAYSVLVVAKVEKGKSKKLKSVKELLGITIMERSSFEKNPIDFLEAKGYKEVKKDLIIKLPKYSLFELENGRKRMLASAGELQKGNELALPSKYVNFLYLASHYEKLKGSPEDNEQKQLFVEQHKHYLDEIIEQISEFSKRVILADANLDKVLSAYNKHRDKPIREQAENIIHLFTLTNLGAPAAFKYFDTTIDRKRYTSTKEVLDATLIHQSITGLYETRIDLSQLGGDGGGGGGGSEAAAKGGVPWLMKKPLQLTVLVPLHEYQERLLQQTALPKEQKELLQKLFLKYDALWQHWENQVGHRRIKPHNIATGTLAPRPQKQYPINPKAKPSIQIVIDDLLKQGVLIQQNSTMNTPVYPVPKPDGKWRMVLDYREVNKTIPLIAAQNQHSAGILSSIYRGKYKTTLDLTNGFWAHPITPESYWLTAFTWQGKQYCWTRLPQGFLNSPALFTADVVDLLKEIPNVQAYVDDIYISHDDPQEHLEQLEKIFSILLNAGYVVSLKKSEIAQREVEFLGFNITKEGRGLTDTFKQKLLNITPPKDLKQLQSILGLLNFARNFIPNYSELVKPLYTIVANANGKFISWTEDNSNQLQHIISVLNQADNLEERNPETRLIIKVNSSPSAGYIRYYNEGSKRPIMYVNYIFSKAEAKFTQTEKLLTTMHKGLIKAMDLAMGQEILVYSPIVSMTKIQRTPLPERKALPVRWITWMTYLEDPRIQFHYDKSLPELQQIPNVTEDVIAKTKHPSEFAMVFYTDGSAIKHPDVNKSHSAGMGIAQVQFIPEYKIVHQWSIPLGDHTAQLAEIAAVEFACKKALKISGPVLIVTDSFYVAESANKELPYWKSNGFLNNKKKPLRHVSKWKSIAECLQLKPDIIIMHEKGHQQPMTTLHTEGNNLADKLATQGSYVVHAGKRTADGSEFEKRTADGSEFESPKKKAKVE

SEQ ID NO: 6922 - protein, 2087 aa, synthetic construct
MPAAKRVKLDGGDKKYSIGLDIGTNSVGWAVITDEYKVPSKKFKVLGNTDRHSIKKNLIGALLFDSGETAEATRLKRTARRRYTRRKNRICYLQEIFSNEMAKVDDSFFHRLEESFLVEEDKKHERHPIFGNIVDEVAYHEKYPTIYHLRKKLVDSTDKADLRLIYLALAHMIKFRGHFLIEGDLNPDNSDVDKLFIQLVQTYNQLFEENPINASGVDAKAILSARLSKSRRLENLIAQLPGEKKNGLFGNLIALSLGLTPNFKSNFDLAEDAKLQLSKDTYDDDLDNLLAQIGDQYADLFLAAKNLSDAILLSDILRVNTEITKAPLSASMIKRYDEHHQDLTLLKALVRQQLPEKYKEIFFDQSKNGYAGYIDGGASQEEFYKFIKPILEKMDGTEELLVKLNREDLLRKQRTFDNGSIPHQIHLGELHAILRRQEDFYPFLKDNREKIEKILTFRIPYYVGPLARGNSRFAWMTRKSEETITPWNFEEVVDKGASAQSFIERMTNFDKNLPNEKVLPKHSLLYEYFTVYNELTKVKYVTEGMRKPAFLSGEQKKAIVDLLFKTNRKVTVKQLKEDYFKKIECFDSVEISGVEDRFNASLGTYHDLLKIIKDKDFLDNEENEDILEDIVLTLTLFEDREMIEERLKTYAHLFDDKVMKQLKRRRYTGWGRLSRKLINGIRDKQSGKTILDFLKSDGFANRNFMQLIHDDSLTFKEDIQKAQVSGQGDSLHEHIANLAGSPAIKKGILQTVKVVDELVKVMGRHKPENIVIEMARENQTTQKGQKNSRERMKRIEEGIKELGSQILKEHPVENTQLQNEKLYLYYLQNGRDMYVDQELDINRLSDYDVDHIVPQSFLKDDSIDNKVLTRSDKARGKSDNVPSEEVVKKMKNYWRQLLNAKLITQRKFDNLTKAERGGLSELDKAGFIKRQLVETRQITKHVAQILDSRMNTKYDENDKLIREVKVITLKSKLVSDFRKDFQFYKVREINNYHHAHDAYLNAVVGTALIKKYPKLESEFVYGDYKVYDVRKMIAKSEQEIGKATAKYFFYSNIMNFFKTEITLANGEIRKRPLIETNGETGEIVWDKGRDFATVRKVLSMPQVNIVKKTEVQTGGFSKESILPKRNSDKLIARKKDWDPKKYGGFDSPTVAYSVLVVAKVEKGKSKKLKSVKELLGITIMERSSFEKNPIDFLEAKGYKEVKKDLIIKLPKYSLFELENGRKRMLASAGELQKGNELALPSKYVNFLYLASHYEKLKGSPEDNEQKQLFVEQHKHYLDEIIEQISEFSKRVILADANLDKVLSAYNKHRDKPIREQAENIIHLFTLTNLGAPAAFKYFDTTIDRKRYTSTKEVLDATLIHQSITGLYETRIDLSQLGGDGGGGGGGSEAAAKGGVPWLMKKPLQLTVLVPLHEYQERLLQQTALPKEQKELLQKLFLKYDALWQHWENQVGHRRIKPHNIATGTLAPRPQKQYPINPKAKPSIQIVIDDLLKQGVLIQQNSTMNTPVYPVPKPDGKWRMVLDYREVNKTIPLIAAQNQHSAGILSSIYRGKYKTTLDLTNGFWAHPITPESYWLTAFTWQGKQYCWTRLPQGFLNSPALFNADVVDLLKEIPNVQAYVDDIYISHDDPQEHLEQLEKIFSILLNAGYVVSLKKSEIAQREVEFLGFNITKEGRGLTDTFKQKLLNITPPKDLKQLQSILGLLNFARNFIPNYSELVKPLYTIVAPANGKFISWTEDNSNQLQHIISVLNQADNLEERNPETRLIIKVNSSPSAGYIRYYNEGSKRPIMYVNYIFSKAEAKFTQTEKLLTTMHKGLIKAMDLAMGQEILVYSPIVSMTKIQRTPLPERKALPVRWITWMTYLEDPRIQFHYDKSLPELQQIPNVTEDVIAKTKHPSEFAMVFYTDGSAIKHPDVNKSHSAGMGIAQVQFIPEYKIVHQWSIPLGDHTAQLAEIAAVEFACKKALKISGPVLIVTDSFYVAESANKELPYWKSNGFLNNKKKPLRHVSKWKSIAECLQLKPDIIIMHEKGHQQPMTTLHTEGNNLADKLATQGSYVVHAGKRTADGSEFEKRTADGSEFESPKKKAKVE

SEQ ID NO: 6923 - protein, 2087 aa, synthetic construct
MPAAKRVKLDGGDKKYSIGLDIGTNSVGWAVITDEYKVPSKKFKVLGNTDRHSIKKNLIGALLFDSGETAEATRLKRTARRRYTRRKNRICYLQEIFSNEMAKVDDSFFHRLEESFLVEEDKKHERHPIFGNIVDEVAYHEKYPTIYHLRKKLVDSTDKADLRLIYLALAHMIKFRGHFLIEGDLNPDNSDVDKLFIQLVQTYNQLFEENPINASGVDAKAILSARLSKSRRLENLIAQLPGEKKNGLFGNLIALSLGLTPNFKSNFDLAEDAKLQLSKDTYDDDLDNLLAQIGDQYADLFLAAKNLSDAILLSDILRVNTEITKAPLSASMIKRYDEHHQDLTLLKALVRQQLPEKYKEIFFDQSKNGYAGYIDGGASQEEFYKFIKPILEKMDGTEELLVKLNREDLLRKQRTFDNGSIPHQIHLGELHAILRRQEDFYPFLKDNREKIEKILTFRIPYYVGPLARGNSRFAWMTRKSEETITPWNFEEVVDKGASAQSFIERMTNFDKNLPNEKVLPKHSLLYEYFTVYNELTKVKYVTEGMRKPAFLSGEQKKAIVDLLFKTNRKVTVKQLKEDYFKKIECFDSVEISGVEDRFNASLGTYHDLLKIIKDKDFLDNEENEDILEDIVLTLTLFEDREMIEERLKTYAHLFDDKVMKQLKRRRYTGWGRLSRKLINGIRDKQSGKTILDFLKSDGFANRNFMQLIHDDSLTFKEDIQKAQVSGQGDSLHEHIANLAGSPAIKKGILQTVKVVDELVKVMGRHKPENIVIEMARENQTTQKGQKNSRERMKRIEEGIKELGSQILKEHPVENTQLQNEKLYLYYLQNGRDMYVDQELDINRLSDYDVDHIVPQSFLKDDSIDNKVLTRSDKARGKSDNVPSEEVVKKMKNYWRQLLNAKLITQRKFDNLTKAERGGLSELDKAGFIKRQLVETRQITKHVAQILDSRMNTKYDENDKLIREVKVITLKSKLVSDFRKDFQFYKVREINNYHHAHDAYLNAVVGTALIKKYPKLESEFVYGDYKVYDVRKMIAKSEQEIGKATAKYFFYSNIMNFFKTEITLANGEIRKRPLIETNGETGEIVWDKGRDFATVRKVLSMPQVNIVKKTEVQTGGFSKESILPKRNSDKLIARKKDWDPKKYGGFDSPTVAYSVLVVAKVEKGKSKKLKSVKELLGITIMERSSFEKNPIDFLEAKGYKEVKKDLIIKLPKYSLFELENGRKRMLASAGELQKGNELALPSKYVNFLYLASHYEKLKGSPEDNEQKQLFVEQHKHYLDEIIEQISEFSKRVILADANLDKVLSAYNKHRDKPIREQAENIIHLFTLTNLGAPAAFKYFDTTIDRKRYTSTKEVLDATLIHQSITGLYETRIDLSQLGGDGGGGGGGSEAAAKGGIPWLMKKPLQLTTLVPLQEYEERLLKQTMLTGSYKEKLQSLFLKYDALWQHWENQVGHRRIKPHHIATGTVNPRPQKQYPINPKAKASIQTVINDLLKQGVLIQQNSIMNTPVYPVPKPDGKWRMVLDYREVNKTIPLIAAQNQHSAGILSSIFRGKYKTTLDLSNGFWAHSITPESYWLTAFTWLGQQYCWTRLPQGFLNSPALFNADVVDLLKEVPNVQVYVDDIYISHDDPREHLEQLEKVFSLLLNAGYVVSLKKSEIAQHEVEFLGFNITKEGRGLTETFKQKLLNITPPRDLKQLQSILGKLNFARNFIPNFSELVKPLYNIIATAPGKYITWTTDNSQQLQNIISMLNSAENLEERNPEVRLIMKVNTSPSAGYIRFYNEFAKRPIMYLNYVYTKAEVKFTNTEKLLTTIHKGLIKALDLGMGQEILVYSPIVSMTKIQKTPLPERKALPIRWITWMSYLEDPRIQFHYDKTLPELQQVPTVTDDIIAKIKHPSEFSMVFYTDGSAIKHPNVNKSHNAGMGIAQVQFKPEFTVINTWSIPLGDHTAQLAEVAAVEFACKKALKIDGPVLIVTDSFYVAESVNKELPYWQSNGFFNNKKKPLKHVSKWKSIADCIQLKPDIIIIHEKGHQPTASTFHTEGNNLADKLATQGSYVVNAGKRTADGSEFEKRTADGSEFESPKKKAKVE

SEQ ID NO: 6924 - protein, 2094 aa, synthetic construct
MPAAKRVKLDGGDKKYSIGLDIGTNSVGWAVITDEYKVPSKKFKVLGNTDRHSIKKNLIGALLFDSGETAEATRLKRTARRRYTRRKNRICYLQEIFSNEMAKVDDSFFHRLEESFLVEEDKKHERHPIFGNIVDEVAYHEKYPTIYHLRKKLVDSTDKADLRLIYLALAHMIKFRGHFLIEGDLNPDNSDVDKLFIQLVQTYNQLFEENPINASGVDAKAILSARLSKSRRLENLIAQLPGEKKNGLFGNLIALSLGLTPNFKSNFDLAEDAKLQLSKDTYDDDLDNLLAQIGDQYADLFLAAKNLSDAILLSDILRVNTEITKAPLSASMIKRYDEHHQDLTLLKALVRQQLPEKYKEIFFDQSKNGYAGYIDGGASQEEFYKFIKPILEKMDGTEELLVKLNREDLLRKQRTFDNGSIPHQIHLGELHAILRRQEDFYPFLKDNREKIEKILTFRIPYYVGPLARGNSRFAWMTRKSEETITPWNFEEVVDKGASAQSFIERMTNFDKNLPNEKVLPKHSLLYEYFTVYNELTKVKYVTEGMRKPAFLSGEQKKAIVDLLFKTNRKVTVKQLKEDYFKKIECFDSVEISGVEDRFNASLGTYHDLLKIIKDKDFLDNEENEDILEDIVLTLTLFEDREMIEERLKTYAHLFDDKVMKQLKRRRYTGWGRLSRKLINGIRDKQSGKTILDFLKSDGFANRNFMQLIHDDSLTFKEDIQKAQVSGQGDSLHEHIANLAGSPAIKKGILQTVKVVDELVKVMGRHKPENIVIEMARENQTTQKGQKNSRERMKRIEEGIKELGSQILKEHPVENTQLQNEKLYLYYLQNGRDMYVDQELDINRLSDYDVDHIVPQSFLKDDSIDNKVLTRSDKARGKSDNVPSEEVVKKMKNYWRQLLNAKLITQRKFDNLTKAERGGLSELDKAGFIKRQLVETRQITKHVAQILDSRMNTKYDENDKLIREVKVITLKSKLVSDFRKDFQFYKVREINNYHHAHDAYLNAVVGTALIKKYPKLESEFVYGDYKVYDVRKMIAKSEQEIGKATAKYFFYSNIMNFFKTEITLANGEIRKRPLIETNGETGEIVWDKGRDFATVRKVLSMPQVNIVKKTEVQTGGFSKESILPKRNSDKLIARKKDWDPKKYGGFDSPTVAYSVLVVAKVEKGKSKKLKSVKELLGITIMERSSFEKNPIDFLEAKGYKEVKKDLIIKLPKYSLFELENGRKRMLASAGELQKGNELALPSKYVNFLYLASHYEKLKGSPEDNEQKQLFVEQHKHYLDEIIEQISEFSKRVILADANLDKVLSAYNKHRDKPIREQAENIIHLFTLTNLGAPAAFKYFDTTIDRKRYTSTKEVLDATLIHQSITGLYETRIDLSQLGGDGGGGGGGSEAAAKGGVLNLEEEYRLHEKPVPSSIDPSWLQLFPTVWAERAGMGLANQVPPVVVELRSGASPVAVRQYPMSKEAREGIRPHIQRFLDLGVLVPCQSPWNTPLLPVKKPGTNDYRPVQDLREINKRVQDIHPTVPNPYNLLSSLPPSHTWYSVLDLKDAFFCLKLHPNSQPLFAFEWRDPEKGNTGQLTWTRLPQGFKNSPTLFNEALHRDLAPFRALNPQVVLLQYVDDLLVAAPTYRDCKEGTQKLLQELSKLGYRVSAKKAQLCQKEVTYLGYLLKEGKRWLTPARKATVMKIPPPTTPRQVREFLGKAGFCRLFIPGFASLAAPLYPLTKPSIPFIWTEEHQKAFDRIKEALLSAPALALPDLTKPFTLYVDERAGVARGVLTQTLGPWRRPVAYLSKKLDPVASGWPTCLKAVAAVALLLKDADKLTLGQNVTVIASHSLESIVRQPPDRWMTNARMTHYQSLLLNERVSFAPPAVLNPATLLPVESEATPVHRCSEILAEETGTRRDLKDQPLPGVPAWYTDGSSFIAEGKRRAGAAIVDGKRTVWASSLPEGTSAQKAELVALTQALRLAEGKDINIYTDSRYAFATAHIHGAIYKQRGWLTSAGKDIKNKEEILALLEAIHLPKRVAIIHCPGHQKGNDPVATGNRRADEAAKQAALSTRVLAETTKPAGKRTADGSEFEKRTADGSEFESPKKKAKVE

SEQ ID NO: 6925 - protein, 2096 aa, synthetic construct; identical to SEQ ID NO: 4519

SEQ ID NO: 6926 - protein, 2095 aa, synthetic construct
MPAAKRVKLDGGDKKYSIGLDIGTNSVGWAVITDEYKVPSKKFKVLGNTDRHSIKKNLIGALLFDSGETAEATRLKRTARRRYTRRKNRICYLQEIFSNEMAKVDDSFFHRLEESFLVEEDKKHERHPIFGNIVDEVAYHEKYPTIYHLRKKLVDSTDKADLRLIYLALAHMIKFRGHFLIEGDLNPDNSDVDKLFIQLVQTYNQLFEENPINASGVDAKAILSARLSKSRRLENLIAQLPGEKKNGLFGNLIALSLGLTPNFKSNFDLAEDAKLQLSKDTYDDDLDNLLAQIGDQYADLFLAAKNLSDAILLSDILRVNTEITKAPLSASMIKRYDEHHQDLTLLKALVRQQLPEKYKEIFFDQSKNGYAGYIDGGASQEEFYKFIKPILEKMDGTEELLVKLNREDLLRKQRTFDNGSIPHQIHLGELHAILRRQEDFYPFLKDNREKIEKILTFRIPYYVGPLARGNSRFAWMTRKSEETITPWNFEEVVDKGASAQSFIERMTNFDKNLPNEKVLPKHSLLYEYFTVYNELTKVKYVTEGMRKPAFLSGEQKKAIVDLLFKTNRKVTVKQLKEDYFKKIECFDSVEISGVEDRFNASLGTYHDLLKIIKDKDFLDNEENEDILEDIVLTLTLFEDREMIEERLKTYAHLFDDKVMKQLKRRRYTGWGRLSRKLINGIRDKQSGKTILDFLKSDGFANRNFMQLIHDDSLTFKEDIQKAQVSGQGDSLHEHIANLAGSPAIKKGILQTVKVVDELVKVMGRHKPENIVIEMARENQTTQKGQKNSRERMKRIEEGIKELGSQILKEHPVENTQLQNEKLYLYYLQNGRDMYVDQELDINRLSDYDVDHIVPQSFLKDDSIDNKVLTRSDKARGKSDNVPSEEVVKKMKNYWRQLLNAKLITQRKFDNLTKAERGGLSELDKAGFIKRQLVETRQITKHVAQILDSRMNTKYDENDKLIREVKVITLKSKLVSDFRKDFQFYKVREINNYHHAHDAYLNAVVGTALIKKYPKLESEFVYGDYKVYDVRKMIAKSEQEIGKATAKYFFYSNIMNFFKTEITLANGEIRKRPLIETNGETGEIVWDKGRDFATVRKVLSMPQVNIVKKTEVQTGGFSKESILPKRNSDKLIARKKDWDPKKYGGFDSPTVAYSVLVVAKVEKGKSKKLKSVKELLGITIMERSSFEKNPIDFLEAKGYKEVKKDLIIKLPKYSLFELENGRKRMLASAGELQKGNELALPSKYVNFLYLASHYEKLKGSPEDNEQKQLFVEQHKHYLDEIIEQISEFSKRVILADANLDKVLSAYNKHRDKPIREQAENIIHLFTLTNLGAPAAFKYFDTTIDRKRYTSTKEVLDATLIHQSITGLYETRIDLSQLGGDGGGGGEAAAKGGSGGTLQLEEEYRLFEPESTQKQEMDIWLKNFPQAWAETGGMGTAHCQAPVLIQLKATATPISIRQYPMPHEAYQGIKPHIRRMLDQGILKPCQSPWNTPLLPVKKPGTEDYRPVQDLREVNKRVEDIHPTVPNPYNLLSTLPPSHPWYTVLDLKDAFFCLRLHSESQLLFAFEWRDPEIGLSGQLTWTRLPQGFKNSPTLFNEALHSDLADFRVRYPALVLLQYVDDLLLAAATRTECLEGTKALLETLGNKGYRASAKKAQICLQEVTYLGYSLKDGQRWLTKARKEAILSIPVPKNSRQVREFLGTAGYCRLWIPGFAELAAPLYPLTRPGTLFQWGTEQQLAFEDIKKALLSSPALGLPDITKPFELFIDENSGFAKGVLVQKLGPWKRPVAYLSKKLDTVASGWPPCLRMVAAIAILVKDAGKLTLGQPLTILTSHPVEALVRQPPNKWLSNARMTHYQAMLLDAERVHFGPTVSLNPATLLPLPSGGNHHDCLQILAETHGTRPDLTDQPLPDADLTWYTDGSSFIRNGEREAGAAVTTESEVIWAAPLPPGTSAQRAELIALTQALKMAEGKKLTVYTDSRYAFATTHVHGEIYRRRGWLTSEGKEIKNKNEILALLEALFLPKRLSIIHCPGHQKGDSPQAKGNRLADDTAKKAATETHSSLTVLPAGKRTADGSEFEKRTADGSEFESPKKKAKVE

SEQ ID NO: 6927 - protein, 2094 aa, synthetic construct
MPAAKRVKLDGGDKKYSIGLDIGTNSVGWAVITDEYKVPSKKFKVLGNTDRHSIKKNLIGALLFDSGETAEATRLKRTARRRYTRRKNRICYLQEIFSNEMAKVDDSFFHRLEESFLVEEDKKHERHPIFGNIVDEVAYHEKYPTIYHLRKKLVDSTDKADLRLIYLALAHMIKFRGHFLIEGDLNPDNSDVDKLFIQLVQTYNQLFEENPINASGVDAKAILSARLSKSRRLENLIAQLPGEKKNGLFGNLIALSLGLTPNFKSNFDLAEDAKLQLSKDTYDDDLDNLLAQIGDQYADLFLAAKNLSDAILLSDILRVNTEITKAPLSASMIKRYDEHHQDLTLLKALVRQQLPEKYKEIFFDQSKNGYAGYIDGGASQEEFYKFIKPILEKMDGTEELLVKLNREDLLRKQRTFDNGSIPHQIHLGELHAILRRQEDFYPFLKDNREKIEKILTFRIPYYVGPLARGNSRFAWMTRKSEETITPWNFEEVVDKGASAQSFIERMTNFDKNLPNEKVLPKHSLLYEYFTVYNELTKVKYVTEGMRKPAFLSGEQKKAIVDLLFKTNRKVTVKQLKEDYFKKIECFDSVEISGVEDRFNASLGTYHDLLKIIKDKDFLDNEENEDILEDIVLTLTLFEDREMIEERLKTYAHLFDDKVMKQLKRRRYTGWGRLSRKLINGIRDKQSGKTILDFLKSDGFANRNFMQLIHDDSLTFKEDIQKAQVSGQGDSLHEHIANLAGSPAIKKGILQTVKVVDELVKVMGRHKPENIVIEMARENQTTQKGQKNSRERMKRIEEGIKELGSQILKEHPVENTQLQNEKLYLYYLQNGRDMYVDQELDINRLSDYDVDHIVPQSFLKDDSIDNKVLTRSDKARGKSDNVPSEEVVKKMKNYWRQLLNAKLITQRKFDNLTKAERGGLSELDKAGFIKRQLVETRQITKHVAQILDSRMNTKYDENDKLIREVKVITLKSKLVSDFRKDFQFYKVREINNYHHAHDAYLNAVVGTALIKKYPKLESEFVYGDYKVYDVRKMIAKSEQEIGKATAKYFFYSNIMNFFKTEITLANGEIRKRPLIETNGETGEIVWDKGRDFATVRKVLSMPQVNIVKKTEVQTGGFSKESILPKRNSDKLIARKKDWDPKKYGGFDSPTVAYSVLVVAKVEKGKSKKLKSVKELLGITIMERSSFEKNPIDFLEAKGYKEVKKDLIIKLPKYSLFELENGRKRMLASAGELQKGNELALPSKYVNFLYLASHYEKLKGSPEDNEQKQLFVEQHKHYLDEIIEQISEFSKRVILADANLDKVLSAYNKHRDKPIREQAENIIHLFTLTNLGAPAAFKYFDTTIDRKRYTSTKEVLDATLIHQSITGLYETRIDLSQLGGDGGGGGEAAAKGGSGGVLNLEEEYRLHEKPVPSSIDPSWLQLFPTVWAERAGMGLANQVPPVVVELRSGASPVAVRQYPMSKEAREGIRPHIQKFLDLGVLVPCRSPWNTPLLPVKKPGTNDYRPVQDLREINKRVQDIHPTVPNPYNLLSSLPPSYTWYSVLDLKDAFFCLRLHPNSQPLFAFEWKDPEKGNTGQLTWTRLPQGFKNSPTLFNEALHRDLAPFRALNPQVVLLQYVDDLLVAAPTYEDCKKGTQKLLQELSKLGYRVSAKKAQLCQREVTYLGYLLKEGKRWLTPARKATVMKIPVPTTPRQVREFLGKAGFCRLFIPGFASLAAPLYPLTKPSIPFIWTEEHQQAFDHIKKALLSAPALALPDLTKPFTLYIDERAGVARGVLTQTLGPWRRPVAYLSKKLDPVASGWPTCLKAVAAVALLLKDADKLTLGQNVTVIASHSLESIVRQPPDRWMTNARMTHYQSLLLNERVSFAPPAVLNPATLLPVESEATPVHRCSEILAEETGTRRDLEDQPLPGVPTWYTDGSSFITEGKRRAGAPIVDGKRTVWASSLPEGTSAQKAELVALTQALRLAEGKNINIYTDSRYAFATAHIHGAIYKQRGWLTSAGKDIKNKEEILALLEAIHLPRRVAIIHCPGHQRGSNPVATGNRRADEAAKQAALSTRVLAGTTKPAGKRTADGSEFEKRTADGSEFESPKKKAKVE

SEQ ID NO: 6928 - protein, 2218 aa, synthetic construct
MPAAKRVKLDGGDKKYSIGLDIGTNSVGWAVITDEYKVPSKKFKVLGNTDRHSIKKNLIGALLFDSGETAEATRLKRTARRRYTRRKNRICYLQEIFSNEMAKVDDSFFHRLEESFLVEEDKKHERHPIFGNIVDEVAYHEKYPTIYHLRKKLVDSTDKADLRLIYLALAHMIKFRGHFLIEGDLNPDNSDVDKLFIQLVQTYNQLFEENPINASGVDAKAILSARLSKSRRLENLIAQLPGEKKNGLFGNLIALSLGLTPNFKSNFDLAEDAKLQLSKDTYDDDLDNLLAQIGDQYADLFLAAKNLSDAILLSDILRVNTEITKAPLSASMIKRYDEHHQDLTLLKALVRQQLPEKYKEIFFDQSKNGYAGYIDGGASQEEFYKFIKPILEKMDGTEELLVKLNREDLLRKQRTFDNGSIPHQIHLGELHAILRRQEDFYPFLKDNREKIEKILTFRIPYYVGPLARGNSRFAWMTRKSEETITPWNFEEVVDKGASAQSFIERMTNFDKNLPNEKVLPKHSLLYEYFTVYNELTKVKYVTEGMRKPAFLSGEQKKAIVDLLFKTNRKVTVKQLKEDYFKKIECFDSVEISGVEDRFNASLGTYHDLLKIIKDKDFLDNEENEDILEDIVLTLTLFEDREMIEERLKTYAHLFDDKVMKQLKRRRYTGWGRLSRKLINGIRDKQSGKTILDFLKSDGFANRNFMQLIHDDSLTFKEDIQKAQVSGQGDSLHEHIANLAGSPAIKKGILQTVKVVDELVKVMGRHKPENIVIEMARENQTTQKGQKNSRERMKRIEEGIKELGSQILKEHPVENTQLQNEKLYLYYLQNGRDMYVDQELDINRLSDYDVDHIVPQSFLKDDSIDNKVLTRSDKARGKSDNVPSEEVVKKMKNYWRQLLNAKLITQRKFDNLTKAERGGLSELDKAGFIKRQLVETRQITKHVAQILDSRMNTKYDENDKLIREVKVITLKSKLVSDFRKDFQFYKVREINNYHHAHDAYLNAVVGTALIKKYPKLESEFVYGDYKVYDVRKMIAKSEQEIGKATAKYFFYSNIMNFFKTEITLANGEIRKRPLIETNGETGEIVWDKGRDFATVRKVLSMPQVNIVKKTEVQTGGFSKESILPKRNSDKLIARKKDWDPKKYGGFDSPTVAYSVLVVAKVEKGKSKKLKSVKELLGITIMERSSFEKNPIDFLEAKGYKEVKKDLIIKLPKYSLFELENGRKRMLASAGELQKGNELALPSKYVNFLYLASHYEKLKGSPEDNEQKQLFVEQHKHYLDEIIEQISEFSKRVILADANLDKVLSAYNKHRDKPIREQAENIIHLFTLTNLGAPAAFKYFDTTIDRKRYTSTKEVLDATLIHQSITGLYETRIDLSQLGGDGGGGGEAAAKGGSGGTLGDQGSRGSDPLPEPRVTLTVEGIPTEFLVNTGAEHSVLTKPMGKMGSKRTVVAGATGSKVYPWTTKRLLKIGQKQVTHSFLVIPECPAPLLGRDLLTKLKAQIQFSTEGPQVTWEDRPAMCLVLNLEEEYRLHEKPVPPSIDPSWLQLFPMVWAEKAGMGLANQVPPVVVELKSDASPVAVRQYPMSKEAREGIRPHIQRFLDLGILVPCQSPWNTPLLPVKKPGTNDYRPVQDLREVNKRVQDIHPTVPNPYNLLSSLPPSHTWYSVLDLKDAFFCLKLHPNSQPLFAFEWRDPEKGNTGQLTWTRLPQGFKNSPTLFNEALHRDLASFRALNPQVVMLQYVDDLLVAAPTYRDCKEGTRRLLQELSKLGYRVSAKKAQLCREEVTYLGYLLKGGKRWLTPARKATVMKIPTPTTPRQVREFLGTAGFCRLWIPGFASLAAPLYPLTRPKVPFTWTEAHQEAFGRIKEALLSAPALALPDLTKPFALYVDEKEGVARGVLTQTLGPWRRPVAYLSKKLDPVASGWPTCLKAIAAVALLLKDADKLTLGQNVLVIAPHNLESIVRQPPDRWMTNARMTHYQSLLLNERVSFAPPAILNPATLLPVESDDTPIHICSEILAEETGTRPDLRDQPLPGVPAWYTDGSSFIMDGRRQAGAAIVDNKRTVWASNLPEGTSAQKAELIALTQALRLAEGKSINIYTDSRYAFATAHVHGAIYKQRGWLTSAGKDIKNKEEILALLEAIHLPKRVAIIHCPGHQRGTDPVATGNRKADEAAKQAAQSTRILTETTKNAGKRTADGSEFEKRTADGSEFESPKKKAKVE

SEQ ID NO: 6929 - protein, 2096 aa, synthetic construct
MPAAKRVKLDGGDKKYSIGLDIGTNSVGWAVITDEYKVPSKKFKVLGNTDRHSIKKNLIGALLFDSGETAEATRLKRTARRRYTRRKNRICYLQEIFSNEMAKVDDSFFHRLEESFLVEEDKKHERHPIFGNIVDEVAYHEKYPTIYHLRKKLVDSTDKADLRLIYLALAHMIKFRGHFLIEGDLNPDNSDVDKLFIQLVQTYNQLFEENPINASGVDAKAILSARLSKSRRLENLIAQLPGEKKNGLFGNLIALSLGLTPNFKSNFDLAEDAKLQLSKDTYDDDLDNLLAQIGDQYADLFLAAKNLSDAILLSDILRVNTEITKAPLSASMIKRYDEHHQDLTLLKALVRQQLPEKYKEIFFDQSKNGYAGYIDGGASQEEFYKFIKPILEKMDGTEELLVKLNREDLLRKQRTFDNGSIPHQIHLGELHAILRRQEDFYPFLKDNREKIEKILTFRIPYYVGPLARGNSRFAWMTRKSEETITPWNFEEVVDKGASAQSFIERMTNFDKNLPNEKVLPKHSLLYEYFTVYNELTKVKYVTEGMRKPAFLSGEQKKAIVDLLFKTNRKVTVKQLKEDYFKKIECFDSVEISGVEDRFNASLGTYHDLLKIIKDKDFLDNEENEDILEDIVLTLTLFEDREMIEERLKTYAHLFDDKVMKQLKRRRYTGWGRLSRKLINGIRDKQSGKTILDFLKSDGFANRNFMQLIHDDSLTFKEDIQKAQVSGQGDSLHEHIANLAGSPAIKKGILQTVKVVDELVKVMGRHKPENIVIEMARENQTTQKGQKNSRERMKRIEEGIKELGSQILKEHPVENTQLQNEKLYLYYLQNGRDMYVDQELDINRLSDYDVDHIVPQSFLKDDSIDNKVLTRSDKARGKSDNVPSEEVVKKMKNYWRQLLNAKLITQRKFDNLTKAERGGLSELDKAGFIKRQLVETRQITKHVAQILDSRMNTKYDENDKLIREVKVITLKSKLVSDFRKDFQFYKVREINNYHHAHDAYLNAVVGTALIKKYPKLESEFVYGDYKVYDVRKMIAKSEQEIGKATAKYFFYSNIMNFFKTEITLANGEIRKRPLIETNGETGEIVWDKGRDFATVRKVLSMPQVNIVKKTEVQTGGFSKESILPKRNSDKLIARKKDWDPKKYGGFDSPTVAYSVLVVAKVEKGKSKKLKSVKELLGITIMERSSFEKNPIDFLEAKGYKEVKKDLIIKLPKYSLFELENGRKRMLASAGELQKGNELALPSKYVNFLYLASHYEKLKGSPEDNEQKQLFVEQHKHYLDEIIEQISEFSKRVILADANLDKVLSAYNKHRDKPIREQAENIIHLFTLTNLGAPAAFKYFDTTIDRKRYTSTKEVLDATLIHQSITGLYETRIDLSQLGGDGGGGGEAAAKGGSGGTLNIEDEYRLHETSKGPDVPLGSTWLSDFPQAWAETGGMGLAFRQAPLIISLKATSTPVSIKQYPMSQEARLGIKPHIQRLLDQGILVPCQSPWNTPLLPVKKPGTNDYRPVQDLREVNKRVEDIHPTVPNPYNLLSGLPPSHQWYTVLDLKDAFFCLRLHPTSQSLFAFEWKDPEMGISGQLTWTRLPQGFKNSPTLFNEALHRDLADFRIQHPDLILLQYVDDLLLAATSELDCQQGTRALLQTLGDLGYRASAKKAQICQKQVKYLGYLLKEGQRWLTEARKETVMGQPTPKTPRQLREFLGKAGLCRLFIPGFAEMAAPLYPLTKPGTLFKWGPDQQKAYQEIKQALLTAPALGLPDLTKPFELFVDEKQGYAKGVLTQKLGPWRRPVAYLSKKLDPVAAGWPPCLRMVAAIAVLTKDVGKLTMGQPLVILAPHAVEALVKQPPDRWLSNARMTHYQALLLDTDRVQFGPIVALNPATLLPLPEEGLQHDCLDILAEAHGTRPDLTDQPLPDADHTWYTDGSSFLQEGQRRAGAAVTTETEVIWAKALPAGTSAQRAELIALTQALKMAAGKKLNVYTDSRYAFATAHIHGEIYRRRGWLTSEGKEIKNKDEILALLKALFLPKRLSIIHCPGHQKGNHAEARGNRMADQAAREVATRETPETSTLLAGKRTADGSEFEKRTADGSEFESPKKKAKVE

SEQ ID NO: 6930 - protein, 2096 aa, synthetic construct
MPAAKRVKLDGGDKKYSIGLDIGTNSVGWAVITDEYKVPSKKFKVLGNTDRHSIKKNLIGALLFDSGETAEATRLKRTARRRYTRRKNRICYLQEIFSNEMAKVDDSFFHRLEESFLVEEDKKHERHPIFGNIVDEVAYHEKYPTIYHLRKKLVDSTDKADLRLIYLALAHMIKFRGHFLIEGDLNPDNSDVDKLFIQLVQTYNQLFEENPINASGVDAKAILSARLSKSRRLENLIAQLPGEKKNGLFGNLIALSLGLTPNFKSNFDLAEDAKLQLSKDTYDDDLDNLLAQIGDQYADLFLAAKNLSDAILLSDILRVNTEITKAPLSASMIKRYDEHHQDLTLLKALVRQQLPEKYKEIFFDQSKNGYAGYIDGGASQEEFYKFIKPILEKMDGTEELLVKLNREDLLRKQRTFDNGSIPHQIHLGELHAILRRQEDFYPFLKDNREKIEKILTFRIPYYVGPLARGNSRFAWMTRKSEETITPWNFEEVVDKGASAQSFIERMTNFDKNLPNEKVLPKHSLLYEYFTVYNELTKVKYVTEGMRKPAFLSGEQKKAIVDLLFKTNRKVTVKQLKEDYFKKIECFDSVEISGVEDRFNASLGTYHDLLKIIKDKDFLDNEENEDILEDIVLTLTLFEDREMIEERLKTYAHLFDDKVMKQLKRRRYTGWGRLSRKLINGIRDKQSGKTILDFLKSDGFANRNFMQLIHDDSLTFKEDIQKAQVSGQGDSLHEHIANLAGSPAIKKGILQTVKVVDELVKVMGRHKPENIVIEMARENQTTQKGQKNSRERMKRIEEGIKELGSQILKEHPVENTQLQNEKLYLYYLQNGRDMYVDQELDINRLSDYDVDHIVPQSFLKDDSIDNKVLTRSDKARGKSDNVPSEEVVKKMKNYWRQLLNAKLITQRKFDNLTKAERGGLSELDKAGFIKRQLVETRQITKHVAQILDSRMNTKYDENDKLIREVKVITLKSKLVSDFRKDFQFYKVREINNYHHAHDAYLNAVVGTALIKKYPKLESEFVYGDYKVYDVRKMIAKSEQEIGKATAKYFFYSNIMNFFKTEITLANGEIRKRPLIETNGETGEIVWDKGRDFATVRKVLSMPQVNIVKKTEVQTGGFSKESILPKRNSDKLIARKKDWDPKKYGGFDSPTVAYSVLVVAKVEKGKSKKLKSVKELLGITIMERSSFEKNPIDFLEAKGYKEVKKDLIIKLPKYSLFELENGRKRMLASAGELQKGNELALPSKYVNFLYLASHYEKLKGSPEDNEQKQLFVEQHKHYLDEIIEQISEFSKRVILADANLDKVLSAYNKHRDKPIREQAENIIHLFTLTNLGAPAAFKYFDTTIDRKRYTSTKEVLDATLIHQSITGLYETRIDLSQLGGDGGGGGEAAAKGGSGGTLNIEDEYRLHETSKGPDVPLGSTWLSDFPQAWAETGGMGLAVRQAPLIIPLKATSTPVSIKQYPMSQEARLGIKPHIQRLLDQGILVPCQSPWNTPLLPVKKPGTNDYRPVQDLREVNKRVEDIHPTVPNPYNLLSGLPPSHQWYTVLDLKDAFFCLRLHPTSQSLFAFEWRDPEMGISGQLTWTRLPQGFKNSPTLFNEALHRDLADFRIQHPDLILLQYVDDLLLAATSELDCQQGTRALLQTLGDLGYRASAKKAQICQKQVKYLGYLLKEGQRWLTEARKETVMGQPTPKTPRQLREFLGTAGFCRLWIPGFAEMAAPLYPLTKPGTLFEWGPDQQKAYQEIKQALLTAPALGLPDLTKPFELFVDEKQGYAKGVLTQKLGPWRRPVAYLSKKLDPVAAGWPPCLRMVAAIAVLTKDAGKLTMGQPLVILAPHAVEALVKQPPDRWLSNARMTHYQALLLDTDRVQFGPIVALNPATLLPLPEEGLQHDCLDILAEAHGTRPDLTDQPLPDADHTWYTDGSSFLQEGQRKAGAAVTTETEVVWAKALPAGTSAQRAELIALTQALKMAEGKKLNVYTDSRYAFATAHIHGEIYRRRGWLTSEGKEIKNKDEILALLKALFLPKRLSIIHCPGHQKGNRAEARGNRMADQAAREVATRETPETSTLLAGKRTADGSEFEKRTADGSEFESPKKKAKVE

SEQ ID NO: 6931 - protein, 2090 aa, synthetic construct
MPAAKRVKLDGGDKKYSIGLDIGTNSVGWAVITDEYKVPSKKFKVLGNTDRHSIKKNLIGALLFDSGETAEATRLKRTARRRYTRRKNRICYLQEIFSNEMAKVDDSFFHRLEESFLVEEDKKHERHPIFGNIVDEVAYHEKYPTIYHLRKKLVDSTDKADLRLIYLALAHMIKFRGHFLIEGDLNPDNSDVDKLFIQLVQTYNQLFEENPINASGVDAKAILSARLSKSRRLENLIAQLPGEKKNGLFGNLIALSLGLTPNFKSNFDLAEDAKLQLSKDTYDDDLDNLLAQIGDQYADLFLAAKNLSDAILLSDILRVNTEITKAPLSASMIKRYDEHHQDLTLLKALVRQQLPEKYKEIFFDQSKNGYAGYIDGGASQEEFYKFIKPILEKMDGTEELLVKLNREDLLRKQRTFDNGSIPHQIHLGELHAILRRQEDFYPFLKDNREKIEKILTFRIPYYVGPLARGNSRFAWMTRKSEETITPWNFEEVVDKGASAQSFIERMTNFDKNLPNEKVLPKHSLLYEYFTVYNELTKVKYVTEGMRKPAFLSGEQKKAIVDLLFKTNRKVTVKQLKEDYFKKIECFDSVEISGVEDRFNASLGTYHDLLKIIKDKDFLDNEENEDILEDIVLTLTLFEDREMIEERLKTYAHLFDDKVMKQLKRRRYTGWGRLSRKLINGIRDKQSGKTILDFLKSDGFANRNFMQLIHDDSLTFKEDIQKAQVSGQGDSLHEHIANLAGSPAIKKGILQTVKVVDELVKVMGRHKPENIVIEMARENQTTQKGQKNSRERMKRIEEGIKELGSQILKEHPVENTQLQNEKLYLYYLQNGRDMYVDQELDINRLSDYDVDHIVPQSFLKDDSIDNKVLTRSDKARGKSDNVPSEEVVKKMKNYWRQLLNAKLITQRKFDNLTKAERGGLSELDKAGFIKRQLVETRQITKHVAQILDSRMNTKYDENDKLIREVKVITLKSKLVSDFRKDFQFYKVREINNYHHAHDAYLNAVVGTALIKKYPKLESEFVYGDYKVYDVRKMIAKSEQEIGKATAKYFFYSNIMNFFKTEITLANGEIRKRPLIETNGETGEIVWDKGRDFATVRKVLSMPQVNIVKKTEVQTGGFSKESILPKRNSDKLIARKKDWDPKKYGGFDSPTVAYSVLVVAKVEKGKSKKLKSVKELLGITIMERSSFEKNPIDFLEAKGYKEVKKDLIIKLPKYSLFELENGRKRMLASAGELQKGNELALPSKYVNFLYLASHYEKLKGSPEDNEQKQLFVEQHKHYLDEIIEQISEFSKRVILADANLDKVLSAYNKHRDKPIREQAENIIHLFTLTNLGAPAAFKYFDTTIDRKRYTSTKEVLDATLIHQSITGLYETRIDLSQLGGDGGGGGEAAAKGGSGGTLQLDDEYRLYSPLVKPDQNIQFWLEQFPQAWAETAGMGLAKQVPPQVIQLKASATPVSVRQYPLSKEAQEGIRPHVQRLIQQGILVPVQSPWNTPLLPVRKPGTNDYRPVQDLREVNKRVQDIHPTVPNPYNLLCALPPQRSWYTVLDLKDAFFCLRLHPTSQPLFAFEWRDPGTGRTGQLTWTRLPQGFKNSPTIFDEALHRDLANFRIQHPQVTLLQYVDDLLLAGATKQDCLEGTKALLLELSDLGYRASAKKAQICRREVTYLGYSLRDGQRWLTEARKKTVVQIPAPTTAKQVREFLGTAGFCRLWIPGFATLAAPLYPLTKEKGEFSWAPEHQKAFDAIKKALLSAPALALPDVTKPFTLYVDERKGVARGVLTQTLGPWRRPVAYLSKKLDPVASGWPVCLKAIAAVAILVKDADKLTLGQNITVIAPHALENIVRQPPDRWMTNARMTHYQSLLLTERVTFAPPAALNPATLLPEETDEPVTHDCHQLLIEETGVRKDLTDIPLTGEVLTWFTDGSSYVVEGKRMAGAAVVDGTRTIWASSLPEGTSAQKAELMALTQALRLAEGKSINIYTDSRYAFATAHVHGAIYKQRGLLTSAGREIKNKEEILSLLEALHLPKRLAIIHCPGHQKAKDPISRGNQMADRVAKQAAQGVNLLAGKRTADGSEFEKRTADGSEFESPKKKAKVE

SEQ ID NO: 6932 - protein, 2087 aa, synthetic construct
MPAAKRVKLDGGDKKYSIGLDIGTNSVGWAVITDEYKVPSKKFKVLGNTDRHSIKKNLIGALLFDSGETAEATRLKRTARRRYTRRKNRICYLQEIFSNEMAKVDDSFFHRLEESFLVEEDKKHERHPIFGNIVDEVAYHEKYPTIYHLRKKLVDSTDKADLRLIYLALAHMIKFRGHFLIEGDLNPDNSDVDKLFIQLVQTYNQLFEENPINASGVDAKAILSARLSKSRRLENLIAQLPGEKKNGLFGNLIALSLGLTPNFKSNFDLAEDAKLQLSKDTYDDDLDNLLAQIGDQYADLFLAAKNLSDAILLSDILRVNTEITKAPLSASMIKRYDEHHQDLTLLKALVRQQLPEKYKEIFFDQSKNGYAGYIDGGASQEEFYKFIKPILEKMDGTEELLVKLNREDLLRKQRTFDNGSIPHQIHLGELHAILRRQEDFYPFLKDNREKIEKILTFRIPYYVGPLARGNSRFAWMTRKSEETITPWNFEEVVDKGASAQSFIERMTNFDKNLPNEKVLPKHSLLYEYFTVYNELTKVKYVTEGMRKPAFLSGEQKKAIVDLLFKTNRKVTVKQLKEDYFKKIECFDSVEISGVEDRFNASLGTYHDLLKIIKDKDFLDNEENEDILEDIVLTLTLFEDREMIEERLKTYAHLFDDKVMKQLKRRRYTGWGRLSRKLINGIRDKQSGKTILDFLKSDGFANRNFMQLIHDDSLTFKEDIQKAQVSGQGDSLHEHIANLAGSPAIKKGILQTVKVVDELVKVMGRHKPENIVIEMARENQTTQKGQKNSRERMKRIEEGIKELGSQILKEHPVENTQLQNEKLYLYYLQNGRDMYVDQELDINRLSDYDVDHIVPQSFLKDDSIDNKVLTRSDKARGKSDNVPSEEVVKKMKNYWRQLLNAKLITQRKFDNLTKAERGGLSELDKAGFIKRQLVETRQITKHVAQILDSRMNTKYDENDKLIREVKVITLKSKLVSDFRKDFQFYKVREINNYHHAHDAYLNAVVGTALIKKYPKLESEFVYGDYKVYDVRKMIAKSEQEIGKATAKYFFYSNIMNFFKTEITLANGEIRKRPLIETNGETGEIVWDKGRDFATVRKVLSMPQVNIVKKTEVQTGGFSKESILPKRNSDKLIARKKDWDPKKYGGFDSPTVAYSVLVVAKVEKGKSKKLKSVKELLGITIMERSSFEKNPIDFLEAKGYKEVKKDLIIKLPKYSLFELENGRKRMLASAGELQKGNELALPSKYVNFLYLASHYEKLKGSPEDNEQKQLFVEQHKHYLDEIIEQISEFSKRVILADANLDKVLSAYNKHRDKPIREQAENIIHLFTLTNLGAPAAFKYFDTTIDRKRYTSTKEVLDATLIHQSITGLYETRIDLSQLGGDGGGGGEAAAKGGSGGIPWLMKKPLQLTTLVPLQEYEERLLKQTMLTGSYKEKLQSLFLKYDALWQHWENQVGHRRIKPHHIATGTVNPRPQKQYPINPKAKASIQTVINDLLKQGVLIQQNSIMNTPVYPVPKPDGKWRMVLDYREVNKTIPLIAAQNQHSAGILSSIFRGKYKTTLDLSNGFWAHSITPESYWLTAFTWLGQQYCWTRLPQGFLNSPALFNADVVDLLKEVPNVQVYVDDIYISHDDPREHLEQLEKVFSLLLNAGYVVSLKKSEIAQHEVEFLGFNITKEGRGLTETFKQKLLNITPPRDLKQLQSILGLLNFARNFIPNFSELVKPLYNIIATAPGKYITWTTDNSQQLQNIISMLNSAENLEERNPEVRLIMKVNTSPSAGYIRFYNEFAKRPIMYLNYVYTKAEVKFTNTEKLLTTIHKGLIKALDLGMGQEILVYSPIVSMTKIQKTPLPERKALPIRWITWMSYLEDPRIQFHYDKTLPELQQVPTVTDDIIAKIKHPSEFSMVFYTDGSAIKHPNVNKSHNAGMGIAQVQFKPEFTVINTWSIPLGDHTAQLAEVAAVEFACKKALKIDGPVLIVTDSFYVAESVNKELPYWQSNGFFNNKKKPLKHVSKWKSIADCIQLKPDIIIIHEKGHQPTASTFHTEGNNLADKLATQGSYVVNAGKRTADGSEFEKRTADGSEFESPKKKAKVE

SEQ ID NO: 6933 - protein, 2098 aa, synthetic construct
MPAAKRVKLDGGDKKYSIGLDIGTNSVGWAVITDEYKVPSKKFKVLGNTDRHSIKKNLIGALLFDSGETAEATRLKRTARRRYTRRKNRICYLQEIFSNEMAKVDDSFFHRLEESFLVEEDKKHERHPIFGNIVDEVAYHEKYPTIYHLRKKLVDSTDKADLRLIYLALAHMIKFRGHFLIEGDLNPDNSDVDKLFIQLVQTYNQLFEENPINASGVDAKAILSARLSKSRRLENLIAQLPGEKKNGLFGNLIALSLGLTPNFKSNFDLAEDAKLQLSKDTYDDDLDNLLAQIGDQYADLFLAAKNLSDAILLSDILRVNTEITKAPLSASMIKRYDEHHQDLTLLKALVRQQLPEKYKEIFFDQSKNGYAGYIDGGASQEEFYKFIKPILEKMDGTEELLVKLNREDLLRKQRTFDNGSIPHQIHLGELHAILRRQEDFYPFLKDNREKIEKILTFRIPYYVGPLARGNSRFAWMTRKSEETITPWNFEEVVDKGASAQSFIERMTNFDKNLPNEKVLPKHSLLYEYFTVYNELTKVKYVTEGMRKPAFLSGEQKKAIVDLLFKTNRKVTVKQLKEDYFKKIECFDSVEISGVEDRFNASLGTYHDLLKIIKDKDFLDNEENEDILEDIVLTLTLFEDREMIEERLKTYAHLFDDKVMKQLKRRRYTGWGRLSRKLINGIRDKQSGKTILDFLKSDGFANRNFMQLIHDDSLTFKEDIQKAQVSGQGDSLHEHIANLAGSPAIKKGILQTVKVVDELVKVMGRHKPENIVIEMARENQTTQKGQKNSRERMKRIEEGIKELGSQILKEHPVENTQLQNEKLYLYYLQNGRDMYVDQELDINRLSDYDVDHIVPQSFLKDDSIDNKVLTRSDKARGKSDNVPSEEVVKKMKNYWRQLLNAKLITQRKFDNLTKAERGGLSELDKAGFIKRQLVETRQITKHVAQILDSRMNTKYDENDKLIREVKVITLKSKLVSDFRKDFQFYKVREINNYHHAHDAYLNAVVGTALIKKYPKLESEFVYGDYKVYDVRKMIAKSEQEIGKATAKYFFYSNIMNFFKTEITLANGEIRKRPLIETNGETGEIVWDKGRDFATVRKVLSMPQVNIVKKTEVQTGGFSKESILPKRNSDKLIARKKDWDPKKYGGFDSPTVAYSVLVVAKVEKGKSKKLKSVKELLGITIMERSSFEKNPIDFLEAKGYKEVKKDLIIKLPKYSLFELENGRKRMLASAGELQKGNELALPSKYVNFLYLASHYEKLKGSPEDNEQKQLFVEQHKHYLDEIIEQISEFSKRVILADANLDKVLSAYNKHRDKPIREQAENIIHLFTLTNLGAPAAFKYFDTTIDRKRYTSTKEVLDATLIHQSITGLYETRIDLSQLGGDGGEAAAKGGSGGGGGTAPLEEEYRLFLEAPIQNVTLLEQWKREIPKVWAEINPPGLASTQAPIHVQLLSTALPVRVRQYPITLEAKRSLRETIRKFRAAGILRPVHSPWNTPLLPVRKSGTSEYRMVQDLREVNKRVETIHPTVPNPYTLLSLLPPDRIWYSVLDLKDAFFCIPLAPESQLIFAFEWADAEEGESGQLTWTRLPQGFKNSPTLFNEALNRDLQGFRLDHPSVSLLQYVDDLLIAADTQAACLSATRDLLMTLAELGYRVSGKKAQLCQEEVTYLGFKIHKGSRSLSNSRTQAILQIPVPKTKRQVREFLGTIGYCRLWIPGFAELAQPLYAATRPGNDPLVWGEKEEEAFQSLKLALTQPPALALPSLDKPFQLFVEETSGAAKGVLTQALGPWKRPVAYLSKRLDPVAAGWPRCLRAIAAAALLTREASKLTFGQDIEITSSHNLESLLRSPPDKWLTNARITQYQVLLLDPPRVRFKQTAALNPATLLPETDDTLPIHHCLDTLDSLTSTRPDLTDQPLAQAEATLFTDGSSYIRDGKRYAGAAVVTLDSVIWAEPLPIGTSAQKAELIALTKALEWSKDKSVNIYTDSRYAFATLHVHGMIYRERGWLTAGGKAIKNAPEILALLTAVWLPKRVAVMHCKGHQKDDAPTSTGNRRADEVAREVAIRPLSTQATISAGKRTADGSEFEKRTADGSEFESPKKKAKVE

SEQ ID NO: 6934 - protein, 2102 aa, synthetic construct
MPAAKRVKLDGGDKKYSIGLDIGTNSVGWAVITDEYKVPSKKFKVLGNTDRHSIKKNLIGALLFDSGETAEATRLKRTARRRYTRRKNRICYLQEIFSNEMAKVDDSFFHRLEESFLVEEDKKHERHPIFGNIVDEVAYHEKYPTIYHLRKKLVDSTDKADLRLIYLALAHMIKFRGHFLIEGDLNPDNSDVDKLFIQLVQTYNQLFEENPINASGVDAKAILSARLSKSRRLENLIAQLPGEKKNGLFGNLIALSLGLTPNFKSNFDLAEDAKLQLSKDTYDDDLDNLLAQIGDQYADLFLAAKNLSDAILLSDILRVNTEITKAPLSASMIKRYDEHHQDLTLLKALVRQQLPEKYKEIFFDQSKNGYAGYIDGGASQEEFYKFIKPILEKMDGTEELLVKLNREDLLRKQRTFDNGSIPHQIHLGELHAILRRQEDFYPFLKDNREKIEKILTFRIPYYVGPLARGNSRFAWMTRKSEETITPWNFEEVVDKGASAQSFIERMTNFDKNLPNEKVLPKHSLLYEYFTVYNELTKVKYVTEGMRKPAFLSGEQKKAIVDLLFKTNRKVTVKQLKEDYFKKIECFDSVEISGVEDRFNASLGTYHDLLKIIKDKDFLDNEENEDILEDIVLTLTLFEDREMIEERLKTYAHLFDDKVMKQLKRRRYTGWGRLSRKLINGIRDKQSGKTILDFLKSDGFANRNFMQLIHDDSLTFKEDIQKAQVSGQGDSLHEHIANLAGSPAIKKGILQTVKVVDELVKVMGRHKPENIVIEMARENQTTQKGQKNSRERMKRIEEGIKELGSQILKEHPVENTQLQNEKLYLYYLQNGRDMYVDQELDINRLSDYDVDHIVPQSFLKDDSIDNKVLTRSDKARGKSDNVPSEEVVKKMKNYWRQLLNAKLITQRKFDNLTKAERGGLSELDKAGFIKRQLVETRQITKHVAQILDSRMNTKYDENDKLIREVKVITLKSKLVSDFRKDFQFYKVREINNYHHAHDAYLNAVVGTALIKKYPKLESEFVYGDYKVYDVRKMIAKSEQEIGKATAKYFFYSNIMNFFKTEITLANGEIRKRPLIETNGETGEIVWDKGRDFATVRKVLSMPQVNIVKKTEVQTGGFSKESILPKRNSDKLIARKKDWDPKKYGGFDSPTVAYSVLVVAKVEKGKSKKLKSVKELLGITIMERSSFEKNPIDFLEAKGYKEVKKDLIIKLPKYSLFELENGRKRMLASAGELQKGNELALPSKYVNFLYLASHYEKLKGSPEDNEQKQLFVEQHKHYLDEIIEQISEFSKRVILADANLDKVLSAYNKHRDKPIREQAENIIHLFTLTNLGAPAAFKYFDTTIDRKRYTSTKEVLDATLIHQSITGLYETRIDLSQLGGDGGEAAAKGGSGGGGGTVSLQDEHRLFDIPVTTSLPDVWLQDFPQAWAETGGLGRAKCQAPIIIDLKPTAVPVSIKQYPMSLEAHMGIRQHIIKFLELGVLRPCRSPWNTPLLPVKKPGTQDYRPVQDLREINKRTVDIHPTVPNPYNLLSTLKPDYSWYTVLDLKDAFFCLPLAPQSQELFAFEWKDPERGISGQLTWTRLPQGFKNSPTLFDEALHRDLTDFRTQHPEVTLLQYVDDLLLAAPTKKACTQGTRHLLQELGEKGYRASAKKAQICQTKVTYLGYILSEGKRWLTPGRIETVARIPPPRNPREVREFLGTAGFCRLWIPGFAELAAPLYALTKESTPFTWQTEHQLAFEALKKALLSAPALGLPDTSKPFTLFLDERQGIAKGVLTQKLGPWKRPVAYLSKKLDPVAAGWPPCLRIMAATAMLVKDSAKLTLGQPLTVITPHTLEAIVRQPPDRWITNARLTHYQALLLDTDRVQFGPPVTLNPATLLPVPENQPSPHDCRQVLAETHGTREDLKDQELPDADHTWYTDGSSYLDSGTRRAGAAVVDGHNTIWAQSLPPGTSAQKAELIALTKALELSKGKKANIYTDSRYAFATAHTHGSIYERRGLLTSEGKEIKNKAEIIALLKALFLPQEVAIIHCPGHQKGQDPVAVGNRQADRVARQAAMAEVLTLATEPDNTSHITAGKRTADGSEFEKRTADGSEFESPKKKAKVE

SEQ ID NO: 6935 - protein, 2102 aa, synthetic construct
MPAAKRVKLDGGDKKYSIGLDIGTNSVGWAVITDEYKVPSKKFKVLGNTDRHSIKKNLIGALLFDSGETAEATRLKRTARRRYTRRKNRICYLQEIFSNEMAKVDDSFFHRLEESFLVEEDKKHERHPIFGNIVDEVAYHEKYPTIYHLRKKLVDSTDKADLRLIYLALAHMIKFRGHFLIEGDLNPDNSDVDKLFIQLVQTYNQLFEENPINASGVDAKAILSARLSKSRRLENLIAQLPGEKKNGLFGNLIALSLGLTPNFKSNFDLAEDAKLQLSKDTYDDDLDNLLAQIGDQYADLFLAAKNLSDAILLSDILRVNTEITKAPLSASMIKRYDEHHQDLTLLKALVRQQLPEKYKEIFFDQSKNGYAGYIDGGASQEEFYKFIKPILEKMDGTEELLVKLNREDLLRKQRTFDNGSIPHQIHLGELHAILRRQEDFYPFLKDNREKIEKILTFRIPYYVGPLARGNSRFAWMTRKSEETITPWNFEEVVDKGASAQSFIERMTNFDKNLPNEKVLPKHSLLYEYFTVYNELTKVKYVTEGMRKPAFLSGEQKKAIVDLLFKTNRKVTVKQLKEDYFKKIECFDSVEISGVEDRFNASLGTYHDLLKIIKDKDFLDNEENEDILEDIVLTLTLFEDREMIEERLKTYAHLFDDKVMKQLKRRRYTGWGRLSRKLINGIRDKQSGKTILDFLKSDGFANRNFMQLIHDDSLTFKEDIQKAQVSGQGDSLHEHIANLAGSPAIKKGILQTVKVVDELVKVMGRHKPENIVIEMARENQTTQKGQKNSRERMKRIEEGIKELGSQILKEHPVENTQLQNEKLYLYYLQNGRDMYVDQELDINRLSDYDVDHIVPQSFLKDDSIDNKVLTRSDKARGKSDNVPSEEVVKKMKNYWRQLLNAKLITQRKFDNLTKAERGGLSELDKAGFIKRQLVETRQITKHVAQILDSRMNTKYDENDKLIREVKVITLKSKLVSDFRKDFQFYKVREINNYHHAHDAYLNAVVGTALIKKYPKLESEFVYGDYKVYDVRKMIAKSEQEIGKATAKYFFYSNIMNFFKTEITLANGEIRKRPLIETNGETGEIVWDKGRDFATVRKVLSMPQVNIVKKTEVQTGGFSKESILPKRNSDKLIARKKDWDPKKYGGFDSPTVAYSVLVVAKVEKGKSKKLKSVKELLGITIMERSSFEKNPIDFLEAKGYKEVKKDLIIKLPKYSLFELENGRKRMLASAGELQKGNELALPSKYVNFLYLASHYEKLKGSPEDNEQKQLFVEQHKHYLDEIIEQISEFSKRVILADANLDKVLSAYNKHRDKPIREQAENIIHLFTLTNLGAPAAFKYFDTTIDRKRYTSTKEVLDATLIHQSITGLYETRIDLSQLGGDGGEAAAKGGSGGGGGTVSLQDEHRLFDIPVTTSLPDVWLQDFPQAWAETGGLGRAKCQAPIIIDLKPTAVPVSIKQYPMSLEAHMGIRQHIIKFLELGVLRPCRSPWNTPLLPVKKPGTQDYRPVQDLREINKRTVDIHPTVPNPYNLLSTLKPDYSWYTVLDLKDAFFCLPLAPQSQELFAFEWKDPERGISGQLTWTRLPQGFKNSPTLFNEALHRDLTDFRTQHPEVTLLQYVDDLLLAAPTKKACTQGTRHLLQELGEKGYRASAKKAQICQTKVTYLGYILSEGKRWLTPGRIETVARIPPPRNPREVREFLGTAGFCRLWIPGFAELAAPLYALTKPSTPFTWQTEHQLAFEALKKALLSAPALGLPDTSKPFTLFLDERQGIAKGVLTQKLGPWKRPVAYLSKKLDPVAAGWPPCLRIMAATAMLVKDSAKLTLGQPLTVITPHTLEAIVRQPPDRWITNARLTHYQALLLDTDRVQFGPPVTLNPATLLPVPENQPSPHDCRQVLAETHGTREDLKDQELPDADHTWYTDGSSYLDSGTRRAGAAVVDGHNTIWAQSLPPGTSAQKAELIALTKALELSKGKKANIYTDSRYAFATAHTHGSIYERRGWLTSEGKEIKNKAEIIALLKALFLPQEVAIIHCPGHQKGQDPVAVGNRQADRVARQAAMAEVLTLATEPDNTSHITAGKRTADGSEFEKRTADGSEFESPKKKAKVE

SEQ ID NO: 6936 - protein, 2087 aa, synthetic construct
MPAAKRVKLDGGDKKYSIGLDIGTNSVGWAVITDEYKVPSKKFKVLGNTDRHSIKKNLIGALLFDSGETAEATRLKRTARRRYTRRKNRICYLQEIFSNEMAKVDDSFFHRLEESFLVEEDKKHERHPIFGNIVDEVAYHEKYPTIYHLRKKLVDSTDKADLRLIYLALAHMIKFRGHFLIEGDLNPDNSDVDKLFIQLVQTYNQLFEENPINASGVDAKAILSARLSKSRRLENLIAQLPGEKKNGLFGNLIALSLGLTPNFKSNFDLAEDAKLQLSKDTYDDDLDNLLAQIGDQYADLFLAAKNLSDAILLSDILRVNTEITKAPLSASMIKRYDEHHQDLTLLKALVRQQLPEKYKEIFFDQSKNGYAGYIDGGASQEEFYKFIKPILEKMDGTEELLVKLNREDLLRKQRTFDNGSIPHQIHLGELHAILRRQEDFYPFLKDNREKIEKILTFRIPYYVGPLARGNSRFAWMTRKSEETITPWNFEEVVDKGASAQSFIERMTNFDKNLPNEKVLPKHSLLYEYFTVYNELTKVKYVTEGMRKPAFLSGEQKKAIVDLLFKTNRKVTVKQLKEDYFKKIECFDSVEISGVEDRFNASLGTYHDLLKIIKDKDFLDNEENEDILEDIVLTLTLFEDREMIEERLKTYAHLFDDKVMKQLKRRRYTGWGRLSRKLINGIRDKQSGKTILDFLKSDGFANRNFMQLIHDDSLTFKEDIQKAQVSGQGDSLHEHIANLAGSPAIKKGILQTVKVVDELVKVMGRHKPENIVIEMARENQTTQKGQKNSRERMKRIEEGIKELGSQILKEHPVENTQLQNEKLYLYYLQNGRDMYVDQELDINRLSDYDVDHIVPQSFLKDDSIDNKVLTRSDKARGKSDNVPSEEVVKKMKNYWRQLLNAKLITQRKFDNLTKAERGGLSELDKAGFIKRQLVETRQITKHVAQILDSRMNTKYDENDKLIREVKVITLKSKLVSDFRKDFQFYKVREINNYHHAHDAYLNAVVGTALIKKYPKLESEFVYGDYKVYDVRKMIAKSEQEIGKATAKYFFYSNIMNFFKTEITLANGEIRKRPLIETNGETGEIVWDKGRDFATVRKVLSMPQVNIVKKTEVQTGGFSKESILPKRNSDKLIARKKDWDPKKYGGFDSPTVAYSVLVVAKVEKGKSKKLKSVKELLGITIMERSSFEKNPIDFLEAKGYKEVKKDLIIKLPKYSLFELENGRKRMLASAGELQKGNELALPSKYVNFLYLASHYEKLKGSPEDNEQKQLFVEQHKHYLDEIIEQISEFSKRVILADANLDKVLSAYNKHRDKPIREQAENIIHLFTLTNLGAPAAFKYFDTTIDRKRYTSTKEVLDATLIHQSITGLYETRIDLSQLGGDGGEAAAKGGSGGGGGVPWILKKPLELTIKLDLEEQQGTLLNNSILSKKGKEELKQLFEKYSALWQSWENQVGHRRIRPHKIATGTVKPTPQKQYHINPKAKPDIQIVINDLLKQGVLIQKESTMNTPVYPVPKPNGRWRMVLDYRAVNKVTPLIAVQNQHSYGILGSLFKGRYKTTIDLSNGFWAHPIVPEDYWITAFTWQGKQYCWTVLPQGFLNSPGLFTGDVVDLLQGIPNVEVYVDDVYISHDSEKEHLEYLDILFNRLKEAGYIISLKKSNIANSIVDFLGFQITNEGRGLTDTFKEKLENITAPTTLKQLQSILGLLNFARNFIPDFTELIAPLYALIPKSTKNYVPWQIEHSTTLETLITKLNGAEYLQGRKGDKTLIMKVNASYTTGYIRYYNEGEKKPISYVSIVFSKTELKFTELEKLLTTVHKGLLKALDLSMGQNIHVYSPIVSMQNIQKTPQTAKKALASRWLSWLSYLEDPRIRFFYDPQMPALKDLPAVDTGKDNKKHPSNFQHIFYTDGSAITSPTKEGHLNAGMGIVYFINKDGNLQKQQEWSISLGNHTAQFAEIAAFEFALKKCLPLGGNILVVTDSNYVAKAYNEELDVWASNGFVNNRKKPLKHISKWKSVADLKRLRPDVVVTHEPGHQKLDSSPHAYGNNLADQLATQASFKVHAGKRTADGSEFEKRTADGSEFESPKKKAKVE

SEQ ID NO: 6937 - protein, 2173 aa, synthetic construct
MPAAKRVKLDGGDKKYSIGLDIGTNSVGWAVITDEYKVPSKKFKVLGNTDRHSIKKNLIGALLFDSGETAEATRLKRTARRRYTRRKNRICYLQEIFSNEMAKVDDSFFHRLEESFLVEEDKKHERHPIFGNIVDEVAYHEKYPTIYHLRKKLVDSTDKADLRLIYLALAHMIKFRGHFLIEGDLNPDNSDVDKLFIQLVQTYNQLFEENPINASGVDAKAILSARLSKSRRLENLIAQLPGEKKNGLFGNLIALSLGLTPNFKSNFDLAEDAKLQLSKDTYDDDLDNLLAQIGDQYADLFLAAKNLSDAILLSDILRVNTEITKAPLSASMIKRYDEHHQDLTLLKALVRQQLPEKYKEIFFDQSKNGYAGYIDGGASQEEFYKFIKPILEKMDGTEELLVKLNREDLLRKQRTFDNGSIPHQIHLGELHAILRRQEDFYPFLKDNREKIEKILTFRIPYYVGPLARGNSRFAWMTRKSEETITPWNFEEVVDKGASAQSFIERMTNFDKNLPNEKVLPKHSLLYEYFTVYNELTKVKYVTEGMRKPAFLSGEQKKAIVDLLFKTNRKVTVKQLKEDYFKKIECFDSVEISGVEDRFNASLGTYHDLLKIIKDKDFLDNEENEDILEDIVLTLTLFEDREMIEERLKTYAHLFDDKVMKQLKRRRYTGWGRLSRKLINGIRDKQSGKTILDFLKSDGFANRNFMQLIHDDSLTFKEDIQKAQVSGQGDSLHEHIANLAGSPAIKKGILQTVKVVDELVKVMGRHKPENIVIEMARENQTTQKGQKNSRERMKRIEEGIKELGSQILKEHPVENTQLQNEKLYLYYLQNGRDMYVDQELDINRLSDYDVDHIVPQSFLKDDSIDNKVLTRSDKARGKSDNVPSEEVVKKMKNYWRQLLNAKLITQRKFDNLTKAERGGLSELDKAGFIKRQLVETRQITKHVAQILDSRMNTKYDENDKLIREVKVITLKSKLVSDFRKDFQFYKVREINNYHHAHDAYLNAVVGTALIKKYPKLESEFVYGDYKVYDVRKMIAKSEQEIGKATAKYFFYSNIMNFFKTEITLANGEIRKRPLIETNGETGEIVWDKGRDFATVRKVLSMPQVNIVKKTEVQTGGFSKESILPKRNSDKLIARKKDWDPKKYGGFDSPTVAYSVLVVAKVEKGKSKKLKSVKELLGITIMERSSFEKNPIDFLEAKGYKEVKKDLIIKLPKYSLFELENGRKRMLASAGELQKGNELALPSKYVNFLYLASHYEKLKGSPEDNEQKQLFVEQHKHYLDEIIEQISEFSKRVILADANLDKVLSAYNKHRDKPIREQAENIIHLFTLTNLGAPAAFKYFDTTIDRKRYTSTKEVLDATLIHQSITGLYETRIDLSQLGGDGGEAAAKGGSGGGGGMDLLKPLTVERKGVKIKGYWNSQADITCVPKDLLQGEEPVRQQNVTTIHGTQEGDVYYVNLKIDGRRINTEVIGTTLDYAIITPGDVPWILKKPLELTIKLDLEEQQGTLLNNSILSKKGKEELKQLFEKYSALWQSWENQVGHRRIRPHKIATGTVKPTPQKQYHINPKAKPDIQIVINDLLKQGVLIQKESTMNTPVYPVPKPNGRWRMVLDYRAVNKVTPLIAVQNQHSYGILGSLFKGRYKTTIDLSNGFWAHPIVPEDYWITAFTWQGKQYCWTVLPQGFLNSPGLFNGDVVDLLQGIPNVEVYVDDVYISHDSEKEHLEYLDILFNRLKEAGYIISLKKSNIANSIVDFLGFQITNEGRGLTDTFKEKLENITAPTTLKQLQSILGKLNFARNFIPDFTELIAPLYALIPKSPKNYVPWQIEHSTTLETLITKLNGAEYLQGRKGDKTLIMKVNASYTTGYIRYYNEGEKKPISYVSIVFSKTELKFTELEKLLTTVHKGLLKALDLSMGQNIHVYSPIVSMQNIQKTPQTAKKALASRWLSWLSYLEDPRIRFFYDPQMPALKDLPAVDTGKDNKKHPSNFQHIFYTDGSAITSPTKEGHLNAGMGIVYFINKDGNLQKQQEWSISLGNHTAQFAEIAAFEFALKKCLPLGGNILVVTDSNYVAKAYNEELDVWASNGFVNNRKKPLKHISKWKSVADLKRLRPDVVVTHEPGHQKLDSSPHAYGNNLADQLATQASFKVHAGKRTADGSEFEKRTADGSEFESPKKKAKVE

SEQ ID NO: 6938 - protein, 2095 aa, synthetic construct
MPAAKRVKLDGGDKKYSIGLDIGTNSVGWAVITDEYKVPSKKFKVLGNTDRHSIKKNLIGALLFDSGETAEATRLKRTARRRYTRRKNRICYLQEIFSNEMAKVDDSFFHRLEESFLVEEDKKHERHPIFGNIVDEVAYHEKYPTIYHLRKKLVDSTDKADLRLIYLALAHMIKFRGHFLIEGDLNPDNSDVDKLFIQLVQTYNQLFEENPINASGVDAKAILSARLSKSRRLENLIAQLPGEKKNGLFGNLIALSLGLTPNFKSNFDLAEDAKLQLSKDTYDDDLDNLLAQIGDQYADLFLAAKNLSDAILLSDILRVNTEITKAPLSASMIKRYDEHHQDLTLLKALVRQQLPEKYKEIFFDQSKNGYAGYIDGGASQEEFYKFIKPILEKMDGTEELLVKLNREDLLRKQRTFDNGSIPHQIHLGELHAILRRQEDFYPFLKDNREKIEKILTFRIPYYVGPLARGNSRFAWMTRKSEETITPWNFEEVVDKGASAQSFIERMTNFDKNLPNEKVLPKHSLLYEYFTVYNELTKVKYVTEGMRKPAFLSGEQKKAIVDLLFKTNRKVTVKQLKEDYFKKIECFDSVEISGVEDRFNASLGTYHDLLKIIKDKDFLDNEENEDILEDIVLTLTLFEDREMIEERLKTYAHLFDDKVMKQLKRRRYTGWGRLSRKLINGIRDKQSGKTILDFLKSDGFANRNFMQLIHDDSLTFKEDIQKAQVSGQGDSLHEHIANLAGSPAIKKGILQTVKVVDELVKVMGRHKPENIVIEMARENQTTQKGQKNSRERMKRIEEGIKELGSQILKEHPVENTQLQNEKLYLYYLQNGRDMYVDQELDINRLSDYDVDHIVPQSFLKDDSIDNKVLTRSDKARGKSDNVPSEEVVKKMKNYWRQLLNAKLITQRKFDNLTKAERGGLSELDKAGFIKRQLVETRQITKHVAQILDSRMNTKYDENDKLIREVKVITLKSKLVSDFRKDFQFYKVREINNYHHAHDAYLNAVVGTALIKKYPKLESEFVYGDYKVYDVRKMIAKSEQEIGKATAKYFFYSNIMNFFKTEITLANGEIRKRPLIETNGETGEIVWDKGRDFATVRKVLSMPQVNIVKKTEVQTGGFSKESILPKRNSDKLIARKKDWDPKKYGGFDSPTVAYSVLVVAKVEKGKSKKLKSVKELLGITIMERSSFEKNPIDFLEAKGYKEVKKDLIIKLPKYSLFELENGRKRMLASAGELQKGNELALPSKYVNFLYLASHYEKLKGSPEDNEQKQLFVEQHKHYLDEIIEQISEFSKRVILADANLDKVLSAYNKHRDKPIREQAENIIHLFTLTNLGAPAAFKYFDTTIDRKRYTSTKEVLDATLIHQSITGLYETRIDLSQLGGDGGEAAAKGGSGGGGGTLQLEEEYRLFEPESTQKQEMDIWLKNFPQAWAETGGMGTAHCQAPVLIQLKATATPISIRQYPMPHEAYQGIKPHIRRMLDQGILKPCQSPWNTPLLPVKKPGTEDYRPVQDLREVNKRVEDIHPTVPNPYNLLSTLPPSHPWYTVLDLKDAFFCLRLHSESQLLFAFEWRDPEIGLSGQLTWTRLPQGFKNSPTLFNEALHSDLADFRVRYPALVLLQYVDDLLLAAATRTECLEGTKALLETLGNKGYRASAKKAQICLQEVTYLGYSLKDGQRWLTKARKEAILSIPVPKNSRQVREFLGTAGYCRLWIPGFAELAAPLYPLTRPGTLFQWGTEQQLAFEDIKKALLSSPALGLPDITKPFELFIDENSGFAKGVLVQKLGPWKRPVAYLSKKLDTVASGWPPCLRMVAAIAILVKDAGKLTLGQPLTILTSHPVEALVRQPPNKWLSNARMTHYQAMLLDAERVHFGPTVSLNPATLLPLPSGGNHHDCLQILAETHGTRPDLTDQPLPDADLTWYTDGSSFIRNGEREAGAAVTTESEVIWAAPLPPGTSAQRAELIALTQALKMAEGKKLTVYTDSRYAFATTHVHGEIYRRRGWLTSEGKEIKNKNEILALLEALFLPKRLSIIHCPGHQKGDSPQAKGNRLADDTAKKAATETHSSLTVLPAGKRTADGSEFEKRTADGSEFESPKKKAKVE

SEQ ID NO: 6939 - protein, 2176 aa, synthetic construct
MPAAKRVKLDGGDKKYSIGLDIGTNSVGWAVITDEYKVPSKKFKVLGNTDRHSIKKNLIGALLFDSGETAEATRLKRTARRRYTRRKNRICYLQEIFSNEMAKVDDSFFHRLEESFLVEEDKKHERHPIFGNIVDEVAYHEKYPTIYHLRKKLVDSTDKADLRLIYLALAHMIKFRGHFLIEGDLNPDNSDVDKLFIQLVQTYNQLFEENPINASGVDAKAILSARLSKSRRLENLIAQLPGEKKNGLFGNLIALSLGLTPNFKSNFDLAEDAKLQLSKDTYDDDLDNLLAQIGDQYADLFLAAKNLSDAILLSDILRVNTEITKAPLSASMIKRYDEHHQDLTLLKALVRQQLPEKYKEIFFDQSKNGYAGYIDGGASQEEFYKFIKPILEKMDGTEELLVKLNREDLLRKQRTFDNGSIPHQIHLGELHAILRRQEDFYPFLKDNREKIEKILTFRIPYYVGPLARGNSRFAWMTRKSEETITPWNFEEVVDKGASAQSFIERMTNFDKNLPNEKVLPKHSLLYEYFTVYNELTKVKYVTEGMRKPAFLSGEQKKAIVDLLFKTNRKVTVKQLKEDYFKKIECFDSVEISGVEDRFNASLGTYHDLLKIIKDKDFLDNEENEDILEDIVLTLTLFEDREMIEERLKTYAHLFDDKVMKQLKRRRYTGWGRLSRKLINGIRDKQSGKTILDFLKSDGFANRNFMQLIHDDSLTFKEDIQKAQVSGQGDSLHEHIANLAGSPAIKKGILQTVKVVDELVKVMGRHKPENIVIEMARENQTTQKGQKNSRERMKRIEEGIKELGSQILKEHPVENTQLQNEKLYLYYLQNGRDMYVDQELDINRLSDYDVDHIVPQSFLKDDSIDNKVLTRSDKARGKSDNVPSEEVVKKMKNYWRQLLNAKLITQRKFDNLTKAERGGLSELDKAGFIKRQLVETRQITKHVAQILDSRMNTKYDENDKLIREVKVITLKSKLVSDFRKDFQFYKVREINNYHHAHDAYLNAVVGTALIKKYPKLESEFVYGDYKVYDVRKMIAKSEQEIGKATAKYFFYSNIMNFFKTEITLANGEIRKRPLIETNGETGEIVWDKGRDFATVRKVLSMPQVNIVKKTEVQTGGFSKESILPKRNSDKLIARKKDWDPKKYGGFDSPTVAYSVLVVAKVEKGKSKKLKSVKELLGITIMERSSFEKNPIDFLEAKGYKEVKKDLIIKLPKYSLFELENGRKRMLASAGELQKGNELALPSKYVNFLYLASHYEKLKGSPEDNEQKQLFVEQHKHYLDEIIEQISEFSKRVILADANLDKVLSAYNKHRDKPIREQAENIIHLFTLTNLGAPAAFKYFDTTIDRKRYTSTKEVLDATLIHQSITGLYETRIDLSQLGGDGGEAAAKGGSGGGGGMNPLQLLQPLPAEIKGTKLLAHWNSGATITCIPESFLEDEQPIKKTLIKTIHGEKQQNVYYVTFKVKGRKVEAEVIASPYEYILLSPTDVPWLTQQPLQLTILVPLQEYQEKILSKTALPEDQKQQLKTLFVKYDNLWQHWENQVGHRKIRPHNIATGDYPPRPQKQYPINPKAKPSIQIVIDDLLKQGVLTPQNSTMNTPVYPVPKPDGRWRMVLDYREVNKTIPLTAAQNQHSAGILATIVRQKYKTTLDLANGFWAHPITPESYWLTAFTWQGKQYCWTRLPQGFLNSPALFNADVVDLLKEIPNVQVYVDDIYLSHDDPKEHVQQLEKVFQILLQAGYVVSLKKSEIGQKTVEFLGFNITKEGRGLTDTFKTKLLNITPPKDLKQLQSILGKLNFARNFIPNFAELVQPLYNLIAPAKGKYIEWSEENTKQLNMVIEALNTASNLEERLPEQRLVIKVNTSPSAGYVRYYNETGKKPIMYLNYVFSKAELKFSMLEKLLTTMHKALIKAMDLAMGQEILVYSPIVSMTKIQKTPLPERKALPIRWITWMTYLEDPRIQFHYDKTLPELKHIPDVYTSSQSPVKHPSQYEGVFYTDGSAIKSPDPTKSNNAGMGIVHATYKPEYQVLNQWSIPLGNHTAQMAEIAAVEFACKKALKIPGPVLVITDSFYVAESANKELPYWKSNGFVNNKKKPLKHISKWKSIAECLSMKPDITIQHEKGISLQIPVFILKGNALADKLATQGSYVVNAGKRTADGSEFEKRTADGSEFESPKKKAKVE

SEQ ID NO: 6940 - protein, 2094 aa, synthetic construct
MPAAKRVKLDGGDKKYSIGLDIGTNSVGWAVITDEYKVPSKKFKVLGNTDRHSIKKNLIGALLFDSGETAEATRLKRTARRRYTRRKNRICYLQEIFSNEMAKVDDSFFHRLEESFLVEEDKKHERHPIFGNIVDEVAYHEKYPTIYHLRKKLVDSTDKADLRLIYLALAHMIKFRGHFLIEGDLNPDNSDVDKLFIQLVQTYNQLFEENPINASGVDAKAILSARLSKSRRLENLIAQLPGEKKNGLFGNLIALSLGLTPNFKSNFDLAEDAKLQLSKDTYDDDLDNLLAQIGDQYADLFLAAKNLSDAILLSDILRVNTEITKAPLSASMIKRYDEHHQDLTLLKALVRQQLPEKYKEIFFDQSKNGYAGYIDGGASQEEFYKFIKPILEKMDGTEELLVKLNREDLLRKQRTFDNGSIPHQIHLGELHAILRRQEDFYPFLKDNREKIEKILTFRIPYYVGPLARGNSRFAWMTRKSEETITPWNFEEVVDKGASAQSFIERMTNFDKNLPNEKVLPKHSLLYEYFTVYNELTKVKYVTEGMRKPAFLSGEQKKAIVDLLFKTNRKVTVKQLKEDYFKKIECFDSVEISGVEDRFNASLGTYHDLLKIIKDKDFLDNEENEDILEDIVLTLTLFEDREMIEERLKTYAHLFDDKVMKQLKRRRYTGWGRLSRKLINGIRDKQSGKTILDFLKSDGFANRNFMQLIHDDSLTFKEDIQKAQVSGQGDSLHEHIANLAGSPAIKKGILQTVKVVDELVKVMGRHKPENIVIEMARENQTTQKGQKNSRERMKRIEEGIKELGSQILKEHPVENTQLQNEKLYLYYLQNGRDMYVDQELDINRLSDYDVDHIVPQSFLKDDSIDNKVLTRSDKARGKSDNVPSEEVVKKMKNYWRQLLNAKLITQRKFDNLTKAERGGLSELDKAGFIKRQLVETRQITKHVAQILDSRMNTKYDENDKLIREVKVITLKSKLVSDFRKDFQFYKVREINNYHHAHDAYLNAVVGTALIKKYPKLESEFVYGDYKVYDVRKMIAKSEQEIGKATAKYFFYSNIMNFFKTEITLANGEIRKRPLIETNGETGEIVWDKGRDFATVRKVLSMPQVNIVKKTEVQTGGFSKESILPKRNSDKLIARKKDWDPKKYGGFDSPTVAYSVLVVAKVEKGKSKKLKSVKELLGITIMERSSFEKNPIDFLEAKGYKEVKKDLIIKLPKYSLFELENGRKRMLASAGELQKGNELALPSKYVNFLYLASHYEKLKGSPEDNEQKQLFVEQHKHYLDEIIEQISEFSKRVILADANLDKVLSAYNKHRDKPIREQAENIIHLFTLTNLGAPAAFKYFDTTIDRKRYTSTKEVLDATLIHQSITGLYETRIDLSQLGGDGGEAAAKGGSGGGGGVLNLEEEYRLHEKPVPSSIDPSWLQLFPTVWAERAGMGLANQVPPVVVELRSGASPVAVRQYPMSKEAREGIRPHIQKFLDLGVLVPCRSPWNTPLLPVKKPGTNDYRPVQDLREINKRVQDIHPTVPNPYNLLSSLPPSYTWYSVLDLKDAFFCLRLHPNSQPLFAFEWKDPEKGNTGQLTWTRLPQGFKNSPTLFNEALHRDLAPFRALNPQVVLLQYVDDLLVAAPTYEDCKKGTQKLLQELSKLGYRVSAKKAQLCQREVTYLGYLLKEGKRWLTPARKATVMKIPVPTTPRQVREFLGKAGFCRLFIPGFASLAAPLYPLTKPSIPFIWTEEHQQAFDHIKKALLSAPALALPDLTKPFTLYIDERAGVARGVLTQTLGPWRRPVAYLSKKLDPVASGWPTCLKAVAAVALLLKDADKLTLGQNVTVIASHSLESIVRQPPDRWMTNARMTHYQSLLLNERVSFAPPAVLNPATLLPVESEATPVHRCSEILAEETGTRRDLEDQPLPGVPTWYTDGSSFITEGKRRAGAPIVDGKRTVWASSLPEGTSAQKAELVALTQALRLAEGKNINIYTDSRYAFATAHIHGAIYKQRGWLTSAGKDIKNKEEILALLEAIHLPRRVAIIHCPGHQRGSNPVATGNRRADEAAKQAALSTRVLAGTTKPAGKRTADGSEFEKRTADGSEFESPKKKAKVE

SEQ ID NO: 6941 - protein, 2218 aa, synthetic construct
MPAAKRVKLDGGDKKYSIGLDIGTNSVGWAVITDEYKVPSKKFKVLGNTDRHSIKKNLIGALLFDSGETAEATRLKRTARRRYTRRKNRICYLQEIFSNEMAKVDDSFFHRLEESFLVEEDKKHERHPIFGNIVDEVAYHEKYPTIYHLRKKLVDSTDKADLRLIYLALAHMIKFRGHFLIEGDLNPDNSDVDKLFIQLVQTYNQLFEENPINASGVDAKAILSARLSKSRRLENLIAQLPGEKKNGLFGNLIALSLGLTPNFKSNFDLAEDAKLQLSKDTYDDDLDNLLAQIGDQYADLFLAAKNLSDAILLSDILRVNTEITKAPLSASMIKRYDEHHQDLTLLKALVRQQLPEKYKEIFFDQSKNGYAGYIDGGASQEEFYKFIKPILEKMDGTEELLVKLNREDLLRKQRTFDNGSIPHQIHLGELHAILRRQEDFYPFLKDNREKIEKILTFRIPYYVGPLARGNSRFAWMTRKSEETITPWNFEEVVDKGASAQSFIERMTNFDKNLPNEKVLPKHSLLYEYFTVYNELTKVKYVTEGMRKPAFLSGEQKKAIVDLLFKTNRKVTVKQLKEDYFKKIECFDSVEISGVEDRFNASLGTYHDLLKIIKDKDFLDNEENEDILEDIVLTLTLFEDREMIEERLKTYAHLFDDKVMKQLKRRRYTGWGRLSRKLINGIRDKQSGKTILDFLKSDGFANRNFMQLIHDDSLTFKEDIQKAQVSGQGDSLHEHIANLAGSPAIKKGILQTVKVVDELVKVMGRHKPENIVIEMARENQTTQKGQKNSRERMKRIEEGIKELGSQILKEHPVENTQLQNEKLYLYYLQNGRDMYVDQELDINRLSDYDVDHIVPQSFLKDDSIDNKVLTRSDKARGKSDNVPSEEVVKKMKNYWRQLLNAKLITQRKFDNLTKAERGGLSELDKAGFIKRQLVETRQITKHVAQILDSRMNTKYDENDKLIREVKVITLKSKLVSDFRKDFQFYKVREINNYHHAHDAYLNAVVGTALIKKYPKLESEFVYGDYKVYDVRKMIAKSEQEIGKATAKYFFYSNIMNFFKTEITLANGEIRKRPLIETNGETGEIVWDKGRDFATVRKVLSMPQVNIVKKTEVQTGGFSKESILPKRNSDKLIARKKDWDPKKYGGFDSPTVAYSVLVVAKVEKGKSKKLKSVKELLGITIMERSSFEKNPIDFLEAKGYKEVKKDLIIKLPKYSLFELENGRKRMLASAGELQKGNELALPSKYVNFLYLASHYEKLKGSPEDNEQKQLFVEQHKHYLDEIIEQISEFSKRVILADANLDKVLSAYNKHRDKPIREQAENIIHLFTLTNLGAPAAFKYFDTTIDRKRYTSTKEVLDATLIHQSITGLYETRIDLSQLGGDGGEAAAKGGSGGGGGTLGDQGSRGSDPLPEPRVTLTVEGIPTEFLVNTGAEHSVLTKPMGKMGSKRTVVAGATGSKVYPWTTKRLLKIGQKQVTHSFLVIPECPAPLLGRDLLTKLKAQIQFSTEGPQVTWEDRPAMCLVLNLEEEYRLHEKPVPPSIDPSWLQLFPMVWAEKAGMGLANQVPPVVVELKSDASPVAVRQYPMSKEAREGIRPHIQRFLDLGILVPCQSPWNTPLLPVKKPGTNDYRPVQDLREVNKRVQDIHPTVPNPYNLLSSLPPSHTWYSVLDLKDAFFCLKLHPNSQPLFAFEWRDPEKGNTGQLTWTRLPQGFKNSPTLFDEALHRDLASFRALNPQVVMLQYVDDLLVAAPTYRDCKEGTRRLLQELSKLGYRVSAKKAQLCREEVTYLGYLLKGGKRWLTPARKATVMKIPTPTTPRQVREFLGTAGFCRLWIPGFASLAAPLYPLTREKVPFTWTEAHQEAFGRIKEALLSAPALALPDLTKPFALYVDEKEGVARGVLTQTLGPWRRPVAYLSKKLDPVASGWPTCLKAIAAVALLLKDADKLTLGQNVLVIAPHNLESIVRQPPDRWMTNARMTHYQSLLLNERVSFAPPAILNPATLLPVESDDTPIHICSEILAEETGTRPDLRDQPLPGVPAWYTDGSSFIMDGRRQAGAAIVDNKRTVWASNLPEGTSAQKAELIALTQALRLAEGKSINIYTDSRYAFATAHVHGAIYKQRGLLTSAGKDIKNKEEILALLEAIHLPKRVAIIHCPGHQRGTDPVATGNRKADEAAKQAAQSTRILTETTKNAGKRTADGSEFEKRTADGSEFESPKKKAKVE

SEQ ID NO: 6942 - protein, 2127 aa, synthetic construct
MPAAKRVKLDGGDKKYSIGLDIGTNSVGWAVITDEYKVPSKKFKVLGNTDRHSIKKNLIGALLFDSGETAEATRLKRTARRRYTRRKNRICYLQEIFSNEMAKVDDSFFHRLEESFLVEEDKKHERHPIFGNIVDEVAYHEKYPTIYHLRKKLVDSTDKADLRLIYLALAHMIKFRGHFLIEGDLNPDNSDVDKLFIQLVQTYNQLFEENPINASGVDAKAILSARLSKSRRLENLIAQLPGEKKNGLFGNLIALSLGLTPNFKSNFDLAEDAKLQLSKDTYDDDLDNLLAQIGDQYADLFLAAKNLSDAILLSDILRVNTEITKAPLSASMIKRYDEHHQDLTLLKALVRQQLPEKYKEIFFDQSKNGYAGYIDGGASQEEFYKFIKPILEKMDGTEELLVKLNREDLLRKQRTFDNGSIPHQIHLGELHAILRRQEDFYPFLKDNREKIEKILTFRIPYYVGPLARGNSRFAWMTRKSEETITPWNFEEVVDKGASAQSFIERMTNFDKNLPNEKVLPKHSLLYEYFTVYNELTKVKYVTEGMRKPAFLSGEQKKAIVDLLFKTNRKVTVKQLKEDYFKKIECFDSVEISGVEDRFNASLGTYHDLLKIIKDKDFLDNEENEDILEDIVLTLTLFEDREMIEERLKTYAHLFDDKVMKQLKRRRYTGWGRLSRKLINGIRDKQSGKTILDFLKSDGFANRNFMQLIHDDSLTFKEDIQKAQVSGQGDSLHEHIANLAGSPAIKKGILQTVKVVDELVKVMGRHKPENIVIEMARENQTTQKGQKNSRERMKRIEEGIKELGSQILKEHPVENTQLQNEKLYLYYLQNGRDMYVDQELDINRLSDYDVDHIVPQSFLKDDSIDNKVLTRSDKARGKSDNVPSEEVVKKMKNYWRQLLNAKLITQRKFDNLTKAERGGLSELDKAGFIKRQLVETRQITKHVAQILDSRMNTKYDENDKLIREVKVITLKSKLVSDFRKDFQFYKVREINNYHHAHDAYLNAVVGTALIKKYPKLESEFVYGDYKVYDVRKMIAKSEQEIGKATAKYFFYSNIMNFFKTEITLANGEIRKRPLIETNGETGEIVWDKGRDFATVRKVLSMPQVNIVKKTEVQTGGFSKESILPKRNSDKLIARKKDWDPKKYGGFDSPTVAYSVLVVAKVEKGKSKKLKSVKELLGITIMERSSFEKNPIDFLEAKGYKEVKKDLIIKLPKYSLFELENGRKRMLASAGELQKGNELALPSKYVNFLYLASHYEKLKGSPEDNEQKQLFVEQHKHYLDEIIEQISEFSKRVILADANLDKVLSAYNKHRDKPIREQAENIIHLFTLTNLGAPAAFKYFDTTIDRKRYTSTKEVLDATLIHQSITGLYETRIDLSQLGGDGGEAAAKGGSGGGGGLLGRDLLTKLKAQIQFSTEGPQVTWEDRPAMCLVLNLEEEYRLHEKPVPPSIDPSWLQLFPMVWAEKAGMGLANQVPPVVVELKSDASPVAVRQYPMSKEAREGIRPHIQRFLDLGILVPCQSPWNTPLLPVKKPGTNDYRPVQDLREVNKRVQDIHPTVPNPYNLLSSLPPSHTWYSVLDLKDAFFCLKLHPNSQPLFAFEWRDPEKGNTGQLTWTRLPQGFKNSPTLFNEALHRDLASFRALNPQVVMLQYVDDLLVAAPTYRDCKEGTRRLLQELSKLGYRVSAKKAQLCREEVTYLGYLLKGGKRWLTPARKATVMKIPTPTTPRQVREFLGTAGFCRLWIPGFASLAAPLYPLTRPKVPFTWTEAHQEAFGRIKEALLSAPALALPDLTKPFALYVDEKEGVARGVLTQTLGPWRRPVAYLSKKLDPVASGWPTCLKAIAAVALLLKDADKLTLGQNVLVIAPHNLESIVRQPPDRWMTNARMTHYQSLLLNERVSFAPPAILNPATLLPVESDDTPIHICSEILAEETGTRPDLRDQPLPGVPAWYTDGSSFIMDGRRQAGAAIVDNKRTVWASNLPEGTSAQKAELIALTQALRLAEGKSINIYTDSRYAFATAHVHGAIYKQRGWLTSAGKDIKNKEEILALLEAIHLPKRVAIIHCPGHQRGTDPVATGNRKADEAAKQAAQSTRILTETTKNAGKRTADGSEFEKRTADGSEFESPKKKAKVE

SEQ ID NO: 6943 - protein, 2127 aa, synthetic construct
MPAAKRVKLDGGDKKYSIGLDIGTNSVGWAVITDEYKVPSKKFKVLGNTDRHSIKKNLIGALLFDSGETAEATRLKRTARRRYTRRKNRICYLQEIFSNEMAKVDDSFFHRLEESFLVEEDKKHERHPIFGNIVDEVAYHEKYPTIYHLRKKLVDSTDKADLRLIYLALAHMIKFRGHFLIEGDLNPDNSDVDKLFIQLVQTYNQLFEENPINASGVDAKAILSARLSKSRRLENLIAQLPGEKKNGLFGNLIALSLGLTPNFKSNFDLAEDAKLQLSKDTYDDDLDNLLAQIGDQYADLFLAAKNLSDAILLSDILRVNTEITKAPLSASMIKRYDEHHQDLTLLKALVRQQLPEKYKEIFFDQSKNGYAGYIDGGASQEEFYKFIKPILEKMDGTEELLVKLNREDLLRKQRTFDNGSIPHQIHLGELHAILRRQEDFYPFLKDNREKIEKILTFRIPYYVGPLARGNSRFAWMTRKSEETITPWNFEEVVDKGASAQSFIERMTNFDKNLPNEKVLPKHSLLYEYFTVYNELTKVKYVTEGMRKPAFLSGEQKKAIVDLLFKTNRKVTVKQLKEDYFKKIECFDSVEISGVEDRFNASLGTYHDLLKIIKDKDFLDNEENEDILEDIVLTLTLFEDREMIEERLKTYAHLFDDKVMKQLKRRRYTGWGRLSRKLINGIRDKQSGKTILDFLKSDGFANRNFMQLIHDDSLTFKEDIQKAQVSGQGDSLHEHIANLAGSPAIKKGILQTVKVVDELVKVMGRHKPENIVIEMARENQTTQKGQKNSRERMKRIEEGIKELGSQILKEHPVENTQLQNEKLYLYYLQNGRDMYVDQELDINRLSDYDVDHIVPQSFLKDDSIDNKVLTRSDKARGKSDNVPSEEVVKKMKNYWRQLLNAKLITQRKFDNLTKAERGGLSELDKAGFIKRQLVETRQITKHVAQILDSRMNTKYDENDKLIREVKVITLKSKLVSDFRKDFQFYKVREINNYHHAHDAYLNAVVGTALIKKYPKLESEFVYGDYKVYDVRKMIAKSEQEIGKATAKYFFYSNIMNFFKTEITLANGEIRKRPLIETNGETGEIVWDKGRDFATVRKVLSMPQVNIVKKTEVQTGGFSKESILPKRNSDKLIARKKDWDPKKYGGFDSPTVAYSVLVVAKVEKGKSKKLKSVKELLGITIMERSSFEKNPIDFLEAKGYKEVKKDLIIKLPKYSLFELENGRKRMLASAGELQKGNELALPSKYVNFLYLASHYEKLKGSPEDNEQKQLFVEQHKHYLDEIIEQISEFSKRVILADANLDKVLSAYNKHRDKPIREQAENIIHLFTLTNLGAPAAFKYFDTTIDRKRYTSTKEVLDATLIHQSITGLYETRIDLSQLGGDGGEAAAKGGSGGGGGLLGRDLLTKLKAQIQFSTEGPQVTWEDRPAMCLVLNLEEEYRLHEKPVPPSIDPSWLQLFPMVWAEKAGMGLANQVPPVVVELKSDASPVAVRQYPMSKEAREGIRPHIQRFLDLGILVPCQSPWNTPLLPVKKPGTNDYRPVQDLREVNKRVQDIHPTVPNPYNLLSSLPPSHTWYSVLDLKDAFFCLKLHPNSQPLFAFEWRDPEKGNTGQLTWTRLPQGFKNSPTLFNEALHRDLASFRALNPQVVMLQYVDDLLVAAPTYRDCKEGTRRLLQELSKLGYRVSAKKAQLCREEVTYLGYLLKGGKRWLTPARKATVMKIPTPTTPRQVREFLGKAGFCRLFIPGFASLAAPLYPLTRPKVPFTWTEAHQEAFGRIKEALLSAPALALPDLTKPFALYVDEKEGVARGVLTQTLGPWRRPVAYLSKKLDPVASGWPTCLKAIAAVALLLKDADKLTLGQNVLVIAPHNLESIVRQPPDRWMTNARMTHYQSLLLNERVSFAPPAILNPATLLPVESDDTPIHICSEILAEETGTRPDLRDQPLPGVPAWYTDGSSFIMDGRRQAGAAIVDNKRTVWASNLPEGTSAQKAELIALTQALRLAEGKSINIYTDSRYAFATAHVHGAIYKQRGWLTSAGKDIKNKEEILALLEAIHLPKRVAIIHCPGHQRGTDPVATGNRKADEAAKQAAQSTRILTETTKNAGKRTADGSEFEKRTADGSEFESPKKKAKVE

SEQ ID NO: 6944 - protein, 2218 aa, synthetic construct
MPAAKRVKLDGGDKKYSIGLDIGTNSVGWAVITDEYKVPSKKFKVLGNTDRHSIKKNLIGALLFDSGETAEATRLKRTARRRYTRRKNRICYLQEIFSNEMAKVDDSFFHRLEESFLVEEDKKHERHPIFGNIVDEVAYHEKYPTIYHLRKKLVDSTDKADLRLIYLALAHMIKFRGHFLIEGDLNPDNSDVDKLFIQLVQTYNQLFEENPINASGVDAKAILSARLSKSRRLENLIAQLPGEKKNGLFGNLIALSLGLTPNFKSNFDLAEDAKLQLSKDTYDDDLDNLLAQIGDQYADLFLAAKNLSDAILLSDILRVNTEITKAPLSASMIKRYDEHHQDLTLLKALVRQQLPEKYKEIFFDQSKNGYAGYIDGGASQEEFYKFIKPILEKMDGTEELLVKLNREDLLRKQRTFDNGSIPHQIHLGELHAILRRQEDFYPFLKDNREKIEKILTFRIPYYVGPLARGNSRFAWMTRKSEETITPWNFEEVVDKGASAQSFIERMTNFDKNLPNEKVLPKHSLLYEYFTVYNELTKVKYVTEGMRKPAFLSGEQKKAIVDLLFKTNRKVTVKQLKEDYFKKIECFDSVEISGVEDRFNASLGTYHDLLKIIKDKDFLDNEENEDILEDIVLTLTLFEDREMIEERLKTYAHLFDDKVMKQLKRRRYTGWGRLSRKLINGIRDKQSGKTILDFLKSDGFANRNFMQLIHDDSLTFKEDIQKAQVSGQGDSLHEHIANLAGSPAIKKGILQTVKVVDELVKVMGRHKPENIVIEMARENQTTQKGQKNSRERMKRIEEGIKELGSQILKEHPVENTQLQNEKLYLYYLQNGRDMYVDQELDINRLSDYDVDHIVPQSFLKDDSIDNKVLTRSDKARGKSDNVPSEEVVKKMKNYWRQLLNAKLITQRKFDNLTKAERGGLSELDKAGFIKRQLVETRQITKHVAQILDSRMNTKYDENDKLIREVKVITLKSKLVSDFRKDFQFYKVREINNYHHAHDAYLNAVVGTALIKKYPKLESEFVYGDYKVYDVRKMIAKSEQEIGKATAKYFFYSNIMNFFKTEITLANGEIRKRPLIETNGETGEIVWDKGRDFATVRKVLSMPQVNIVKKTEVQTGGFSKESILPKRNSDKLIARKKDWDPKKYGGFDSPTVAYSVLVVAKVEKGKSKKLKSVKELLGITIMERSSFEKNPIDFLEAKGYKEVKKDLIIKLPKYSLFELENGRKRMLASAGELQKGNELALPSKYVNFLYLASHYEKLKGSPEDNEQKQLFVEQHKHYLDEIIEQISEFSKRVILADANLDKVLSAYNKHRDKPIREQAENIIHLFTLTNLGAPAAFKYFDTTIDRKRYTSTKEVLDATLIHQSITGLYETRIDLSQLGGDGGEAAAKGGSGGGGGTLGDQGSRGSDPLPEPRVTLTVEGIPTEFLVNTGAEHSVLTKPMGKMGSKRTVVAGATGSKVYPWTTKRLLKIGQKQVTHSFLVIPECPAPLLGRDLLTKLKAQIQFSTEGPQVTWEDRPAMCLVLNLEEEYRLHEKPVPPSIDPSWLQLFPMVWAEKAGMGLANQVPPVVVELKSDASPVAVRQYPMSKEAREGIRPHIQRFLDLGILVPCQSPWNTPLLPVKKPGTNDYRPVQDLREVNKRVQDIHPTVPNPYNLLSSLPPSHTWYSVLDLKDAFFCLKLHPNSQPLFAFEWRDPEKGNTGQLTWTRLPQGFKNSPTLFNEALHRDLASFRALNPQVVMLQYVDDLLVAAPTYRDCKEGTRRLLQELSKLGYRVSAKKAQLCREEVTYLGYLLKGGKRWLTPARKATVMKIPTPTTPRQVREFLGTAGFCRLWIPGFASLAAPLYPLTRPKVPFTWTEAHQEAFGRIKEALLSAPALALPDLTKPFALYVDEKEGVARGVLTQTLGPWRRPVAYLSKKLDPVASGWPTCLKAIAAVALLLKDADKLTLGQNVLVIAPHNLESIVRQPPDRWMTNARMTHYQSLLLNERVSFAPPAILNPATLLPVESDDTPIHICSEILAEETGTRPDLRDQPLPGVPAWYTDGSSFIMDGRRQAGAAIVDNKRTVWASNLPEGTSAQKAELIALTQALRLAEGKSINIYTDSRYAFATAHVHGAIYKQRGWLTSAGKDIKNKEEILALLEAIHLPKRVAIIHCPGHQRGTDPVATGNRKADEAAKQAAQSTRILTETTKNAGKRTADGSEFEKRTADGSEFESPKKKAKVE

SEQ ID NO: 6945 - protein, 2218 aa, synthetic construct
MPAAKRVKLDGGDKKYSIGLDIGTNSVGWAVITDEYKVPSKKFKVLGNTDRHSIKKNLIGALLFDSGETAEATRLKRTARRRYTRRKNRICYLQEIFSNEMAKVDDSFFHRLEESFLVEEDKKHERHPIFGNIVDEVAYHEKYPTIYHLRKKLVDSTDKADLRLIYLALAHMIKFRGHFLIEGDLNPDNSDVDKLFIQLVQTYNQLFEENPINASGVDAKAILSARLSKSRRLENLIAQLPGEKKNGLFGNLIALSLGLTPNFKSNFDLAEDAKLQLSKDTYDDDLDNLLAQIGDQYADLFLAAKNLSDAILLSDILRVNTEITKAPLSASMIKRYDEHHQDLTLLKALVRQQLPEKYKEIFFDQSKNGYAGYIDGGASQEEFYKFIKPILEKMDGTEELLVKLNREDLLRKQRTFDNGSIPHQIHLGELHAILRRQEDFYPFLKDNREKIEKILTFRIPYYVGPLARGNSRFAWMTRKSEETITPWNFEEVVDKGASAQSFIERMTNFDKNLPNEKVLPKHSLLYEYFTVYNELTKVKYVTEGMRKPAFLSGEQKKAIVDLLFKTNRKVTVKQLKEDYFKKIECFDSVEISGVEDRFNASLGTYHDLLKIIKDKDFLDNEENEDILEDIVLTLTLFEDREMIEERLKTYAHLFDDKVMKQLKRRRYTGWGRLSRKLINGIRDKQSGKTILDFLKSDGFANRNFMQLIHDDSLTFKEDIQKAQVSGQGDSLHEHIANLAGSPAIKKGILQTVKVVDELVKVMGRHKPENIVIEMARENQTTQKGQKNSRERMKRIEEGIKELGSQILKEHPVENTQLQNEKLYLYYLQNGRDMYVDQELDINRLSDYDVDHIVPQSFLKDDSIDNKVLTRSDKARGKSDNVPSEEVVKKMKNYWRQLLNAKLITQRKFDNLTKAERGGLSELDKAGFIKRQLVETRQITKHVAQILDSRMNTKYDENDKLIREVKVITLKSKLVSDFRKDFQFYKVREINNYHHAHDAYLNAVVGTALIKKYPKLESEFVYGDYKVYDVRKMIAKSEQEIGKATAKYFFYSNIMNFFKTEITLANGEIRKRPLIETNGETGEIVWDKGRDFATVRKVLSMPQVNIVKKTEVQTGGFSKESILPKRNSDKLIARKKDWDPKKYGGFDSPTVAYSVLVVAKVEKGKSKKLKSVKELLGITIMERSSFEKNPIDFLEAKGYKEVKKDLIIKLPKYSLFELENGRKRMLASAGELQKGNELALPSKYVNFLYLASHYEKLKGSPEDNEQKQLFVEQHKHYLDEIIEQISEFSKRVILADANLDKVLSAYNKHRDKPIREQAENIIHLFTLTNLGAPAAFKYFDTTIDRKRYTSTKEVLDATLIHQSITGLYETRIDLSQLGGDGGEAAAKGGSGGGGGTLGDQGSRGSDPLPEPRVTLTVEGIPTEFLVNTGAEHSVLTKPMGKMGSKRTVVAGATGSKVYPWTTKRLLKIGQKQVTHSFLVIPECPAPLLGRDLLTKLKAQIQFSTEGPQVTWEDRPAMCLVLNLEEEYRLHEKPVPPSIDPSWLQLFPMVWAEKAGMGLANQVPPVVVELKSDASPVAVRQYPMSKEAREGIRPHIQRFLDLGILVPCQSPWNTPLLPVKKPGTNDYRPVQDLREVNKRVQDIHPTVPNPYNLLSSLPPSHTWYSVLDLKDAFFCLKLHPNSQPLFAFEWRDPEKGNTGQLTWTRLPQGFKNSPTLFNEALHRDLASFRALNPQVVMLQYVDDLLVAAPTYRDCKEGTRRLLQELSKLGYRVSAKKAQLCREEVTYLGYLLKGGKRWLTPARKATVMKIPTPTTPRQVREFLGKAGFCRLFIPGFASLAAPLYPLTRPKVPFTWTEAHQEAFGRIKEALLSAPALALPDLTKPFALYVDEKEGVARGVLTQTLGPWRRPVAYLSKKLDPVASGWPTCLKAIAAVALLLKDADKLTLGQNVLVIAPHNLESIVRQPPDRWMTNARMTHYQSLLLNERVSFAPPAILNPATLLPVESDDTPIHICSEILAEETGTRPDLRDQPLPGVPAWYTDGSSFIMDGRRQAGAAIVDNKRTVWASNLPEGTSAQKAELIALTQALRLAEGKSINIYTDSRYAFATAHVHGAIYKQRGWLTSAGKDIKNKEEILALLEAIHLPKRVAIIHCPGHQRGTDPVATGNRKADEAAKQAAQSTRILTETTKNAGKRTADGSEFEKRTADGSEFESPKKKAKVE

SEQ ID NO: 6946 - protein, 2096 aa, synthetic construct
MPAAKRVKLDGGDKKYSIGLDIGTNSVGWAVITDEYKVPSKKFKVLGNTDRHSIKKNLIGALLFDSGETAEATRLKRTARRRYTRRKNRICYLQEIFSNEMAKVDDSFFHRLEESFLVEEDKKHERHPIFGNIVDEVAYHEKYPTIYHLRKKLVDSTDKADLRLIYLALAHMIKFRGHFLIEGDLNPDNSDVDKLFIQLVQTYNQLFEENPINASGVDAKAILSARLSKSRRLENLIAQLPGEKKNGLFGNLIALSLGLTPNFKSNFDLAEDAKLQLSKDTYDDDLDNLLAQIGDQYADLFLAAKNLSDAILLSDILRVNTEITKAPLSASMIKRYDEHHQDLTLLKALVRQQLPEKYKEIFFDQSKNGYAGYIDGGASQEEFYKFIKPILEKMDGTEELLVKLNREDLLRKQRTFDNGSIPHQIHLGELHAILRRQEDFYPFLKDNREKIEKILTFRIPYYVGPLARGNSRFAWMTRKSEETITPWNFEEVVDKGASAQSFIERMTNFDKNLPNEKVLPKHSLLYEYFTVYNELTKVKYVTEGMRKPAFLSGEQKKAIVDLLFKTNRKVTVKQLKEDYFKKIECFDSVEISGVEDRFNASLGTYHDLLKIIKDKDFLDNEENEDILEDIVLTLTLFEDREMIEERLKTYAHLFDDKVMKQLKRRRYTGWGRLSRKLINGIRDKQSGKTILDFLKSDGFANRNFMQLIHDDSLTFKEDIQKAQVSGQGDSLHEHIANLAGSPAIKKGILQTVKVVDELVKVMGRHKPENIVIEMARENQTTQKGQKNSRERMKRIEEGIKELGSQILKEHPVENTQLQNEKLYLYYLQNGRDMYVDQELDINRLSDYDVDHIVPQSFLKDDSIDNKVLTRSDKARGKSDNVPSEEVVKKMKNYWRQLLNAKLITQRKFDNLTKAERGGLSELDKAGFIKRQLVETRQITKHVAQILDSRMNTKYDENDKLIREVKVITLKSKLVSDFRKDFQFYKVREINNYHHAHDAYLNAVVGTALIKKYPKLESEFVYGDYKVYDVRKMIAKSEQEIGKATAKYFFYSNIMNFFKTEITLANGEIRKRPLIETNGETGEIVWDKGRDFATVRKVLSMPQVNIVKKTEVQTGGFSKESILPKRNSDKLIARKKDWDPKKYGGFDSPTVAYSVLVVAKVEKGKSKKLKSVKELLGITIMERSSFEKNPIDFLEAKGYKEVKKDLIIKLPKYSLFELENGRKRMLASAGELQKGNELALPSKYVNFLYLASHYEKLKGSPEDNEQKQLFVEQHKHYLDEIIEQISEFSKRVILADANLDKVLSAYNKHRDKPIREQAENIIHLFTLTNLGAPAAFKYFDTTIDRKRYTSTKEVLDATLIHQSITGLYETRIDLSQLGGDGGEAAAKGGSGGGGGTLNLEDEYRLYETSAEPEVSPGSTWLSDFPQAWAETGGMGLAVRQAPLIIPLKATSTPVSIKQYPMSQEAKLGIKPHIQRLLDQGILVPCQSPWNTPLLPVKKPGTNDYRPVQDLREVNKRVEDIHPTVPNPYNLLSGLPPSHRWYTVLDLKDAFFCLRLHPTSQPLFAFEWRDPGMGISGQLTWTRLPQGFKNSPTLFNEALHRDLADFRIQHPDLILLQYVDDILLAATSELDCQQGTRALLLTLGNLGYRASAKKAQLCQKQVKYLGYLLKEGQRWLTEARKETVMGQPTPKTPRQLREFLGTAGFCRLWIPGFAEMAAPLYPLTKPGTLFNWGPDQQKAYQEIKQALLTAPALGLPDLTKPFELFVDEKQGYAKGVLTQKLGPWRRPVAYLSKKLDPVAAGWPPCLRMVAAIAVLRKDAGKLTMGQPLVILAPHAVEALVKQPPDRWLSNARMTHYQAMLLDTDRVQFGPVVALNPATLLPLPEEGAPHDCLEILAETHGTRPDLTDQPIPDADHTWYTDGSSFLQEGQRKAGAAVTTETEVIWARALPAGTSAQRAELIALTQALKMAEGKRLNVYTDSRYAFATAHIHGEIYRRRGWLTSEGREIKNKSEILALLKALFLPKRLSIIHCLGHQKGDSAEARGNRLADQAAREAAIKTPPDTSTLLAGKRTADGSEFEKRTADGSEFESPKKKAKVE

SEQ ID NO: 6947 - protein, 2096 aa, synthetic construct
MPAAKRVKLDGGDKKYSIGLDIGTNSVGWAVITDEYKVPSKKFKVLGNTDRHSIKKNLIGALLFDSGETAEATRLKRTARRRYTRRKNRICYLQEIFSNEMAKVDDSFFHRLEESFLVEEDKKHERHPIFGNIVDEVAYHEKYPTIYHLRKKLVDSTDKADLRLIYLALAHMIKFRGHFLIEGDLNPDNSDVDKLFIQLVQTYNQLFEENPINASGVDAKAILSARLSKSRRLENLIAQLPGEKKNGLFGNLIALSLGLTPNFKSNFDLAEDAKLQLSKDTYDDDLDNLLAQIGDQYADLFLAAKNLSDAILLSDILRVNTEITKAPLSASMIKRYDEHHQDLTLLKALVRQQLPEKYKEIFFDQSKNGYAGYIDGGASQEEFYKFIKPILEKMDGTEELLVKLNREDLLRKQRTFDNGSIPHQIHLGELHAILRRQEDFYPFLKDNREKIEKILTFRIPYYVGPLARGNSRFAWMTRKSEETITPWNFEEVVDKGASAQSFIERMTNFDKNLPNEKVLPKHSLLYEYFTVYNELTKVKYVTEGMRKPAFLSGEQKKAIVDLLFKTNRKVTVKQLKEDYFKKIECFDSVEISGVEDRFNASLGTYHDLLKIIKDKDFLDNEENEDILEDIVLTLTLFEDREMIEERLKTYAHLFDDKVMKQLKRRRYTGWGRLSRKLINGIRDKQSGKTILDFLKSDGFANRNFMQLIHDDSLTFKEDIQKAQVSGQGDSLHEHIANLAGSPAIKKGILQTVKVVDELVKVMGRHKPENIVIEMARENQTTQKGQKNSRERMKRIEEGIKELGSQILKEHPVENTQLQNEKLYLYYLQNGRDMYVDQELDINRLSDYDVDHIVPQSFLKDDSIDNKVLTRSDKARGKSDNVPSEEVVKKMKNYWRQLLNAKLITQRKFDNLTKAERGGLSELDKAGFIKRQLVETRQITKHVAQILDSRMNTKYDENDKLIREVKVITLKSKLVSDFRKDFQFYKVREINNYHHAHDAYLNAVVGTALIKKYPKLESEFVYGDYKVYDVRKMIAKSEQEIGKATAKYFFYSNIMNFFKTEITLANGEIRKRPLIETNGETGEIVWDKGRDFATVRKVLSMPQVNIVKKTEVQTGGFSKESILPKRNSDKLIARKKDWDPKKYGGFDSPTVAYSVLVVAKVEKGKSKKLKSVKELLGITIMERSSFEKNPIDFLEAKGYKEVKKDLIIKLPKYSLFELENGRKRMLASAGELQKGNELALPSKYVNFLYLASHYEKLKGSPEDNEQKQLFVEQHKHYLDEIIEQISEFSKRVILADANLDKVLSAYNKHRDKPIREQAENIIHLFTLTNLGAPAAFKYFDTTIDRKRYTSTKEVLDATLIHQSITGLYETRIDLSQLGGDGGEAAAKGGSGGGGGLGIEDEYRLHETSTEPDVSLGSTWLSDFPQAWAETGGMGLAVRQAPLIIPLKATSTPVSIQQYPMSHEARLGIKPHIQRLLDQGILVPCQSPWNTPLLPVKKPGTNDYRPVQDLREVNKRVEDIHPTVPNPYNLLSGLPPSHQWYTVLDLKDAFFCLRLHPTSQPLFAFEWRDPGMGISGQLTWTRLPQGFKNSPTLFNEALHRDLADFRIQHPDLILLQYVDDILLAATSELDCQQGTRALLQTLGDLGYRASAKKAQICQKQVKYLGYLLREGQRWLTEARKETVMGQPVPKTPRQLREFLGKAGFCRLFIPGFAEMAAPLYPLTKPGTLFSWGPDQQKAYQEIKQALLTAPALGLPDLTKPFELFVDEKQGYAKGVLTQKLGPWRRPVAYLSKKLDPVAAGWPPCLRMVAAIAVLTKDAGKLTMGQPLVILAPHAVEALVKQPPDRWLSNARMTHYQAMLLDTDRVQFGPVVALNPATLLPLPEEGAPHDCLEILAETHGTRPDLTDQPIPDADHTWYTDGSSFLQEGQRKAGAAVTTETEVIWAGALPAGTSAQRAELIALTQALKMAEGKRLNVYTDSRYAFATAHIHGEIYRRRGWLTSEGREIKNKSEILALLKALFLPKRLSIIHCLGHQKGDSAEARGNRLADQAAREAAIKTPPDTSTLLIAGKRTADGSEFEKRTADGSEFESPKKKAKVE

SEQ ID NO: 6948 - protein, 2096 aa, synthetic construct; identical to SEQ ID NO: 6947

SEQ ID NO: 6949 - protein, 2096 aa, synthetic construct
MPAAKRVKLDGGDKKYSIGLDIGTNSVGWAVITDEYKVPSKKFKVLGNTDRHSIKKNLIGALLFDSGETAEATRLKRTARRRYTRRKNRICYLQEIFSNEMAKVDDSFFHRLEESFLVEEDKKHERHPIFGNIVDEVAYHEKYPTIYHLRKKLVDSTDKADLRLIYLALAHMIKFRGHFLIEGDLNPDNSDVDKLFIQLVQTYNQLFEENPINASGVDAKAILSARLSKSRRLENLIAQLPGEKKNGLFGNLIALSLGLTPNFKSNFDLAEDAKLQLSKDTYDDDLDNLLAQIGDQYADLFLAAKNLSDAILLSDILRVNTEITKAPLSASMIKRYDEHHQDLTLLKALVRQQLPEKYKEIFFDQSKNGYAGYIDGGASQEEFYKFIKPILEKMDGTEELLVKLNREDLLRKQRTFDNGSIPHQIHLGELHAILRRQEDFYPFLKDNREKIEKILTFRIPYYVGPLARGNSRFAWMTRKSEETITPWNFEEVVDKGASAQSFIERMTNFDKNLPNEKVLPKHSLLYEYFTVYNELTKVKYVTEGMRKPAFLSGEQKKAIVDLLFKTNRKVTVKQLKEDYFKKIECFDSVEISGVEDRFNASLGTYHDLLKIIKDKDFLDNEENEDILEDIVLTLTLFEDREMIEERLKTYAHLFDDKVMKQLKRRRYTGWGRLSRKLINGIRDKQSGKTILDFLKSDGFANRNFMQLIHDDSLTFKEDIQKAQVSGQGDSLHEHIANLAGSPAIKKGILQTVKVVDELVKVMGRHKPENIVIEMARENQTTQKGQKNSRERMKRIEEGIKELGSQILKEHPVENTQLQNEKLYLYYLQNGRDMYVDQELDINRLSDYDVDHIVPQSFLKDDSIDNKVLTRSDKARGKSDNVPSEEVVKKMKNYWRQLLNAKLITQRKFDNLTKAERGGLSELDKAGFIKRQLVETRQITKHVAQILDSRMNTKYDENDKLIREVKVITLKSKLVSDFRKDFQFYKVREINNYHHAHDAYLNAVVGTALIKKYPKLESEFVYGDYKVYDVRKMIAKSEQEIGKATAKYFFYSNIMNFFKTEITLANGEIRKRPLIETNGETGEIVWDKGRDFATVRKVLSMPQVNIVKKTEVQTGGFSKESILPKRNSDKLIARKKDWDPKKYGGFDSPTVAYSVLVVAKVEKGKSKKLKSVKELLGITIMERSSFEKNPIDFLEAKGYKEVKKDLIIKLPKYSLFELENGRKRMLASAGELQKGNELALPSKYVNFLYLASHYEKLKGSPEDNEQKQLFVEQHKHYLDEIIEQISEFSKRVILADANLDKVLSAYNKHRDKPIREQAENIIHLFTLTNLGAPAAFKYFDTTIDRKRYTSTKEVLDATLIHQSITGLYETRIDLSQLGGDGGEAAAKGGSGGGGGTLNIEDEYRLHETSKEPDVSLGSTWLSDFPQAWAETGGMGLAVRQAPLIIPLKATSTPVSIKQYPMSQEARLGIKPHIQRLLDQGILVPCQSPWNTPLLPVKKPGTNDYRPVQDLREVNKRVEDIHPTVPNPYNLLSGLPPSHQWYTVLDLKDAFFCLRLHPTSQPLFAFEWRDPEMGISGQLTWTRLPQGFKNSPTLFNEALHRDLAGFRIQHPDLILLQYVDDLLLAATSELDCQQGTRALLQTLGDLGYRASAKKAQICQKQVKYLGYLLKEGQRWLTEARKETVMGQPIPKTPRQLREFLGTAGFCRLWIPGFAEMAAPLYPLTKPGTLFNWGPDQQKAFQEIKQALLTAPALGLPDLTKPFELFVDEKQGYAKGVLTQKLGPWRRPVAYLSKKLDPVAAGWPPCLRMVAAIAVLTKDAGKLTMGQPLVILAPHAVEALVKQPPDRWLSNARMTHYQALLLDTDRVQFGPVVALNPATLLPLPEEGLQHDCLDILAEAHGTRSDLMDQPLPDADHTWYTDGSSFLQEGQRKAGAAVTTETEVIWARALPAGTSAQRAELIALTQALKMAEGKKLNVYTDSRYAFATAHIHGEIYRRRGWLTSEGKEIKNKDEILALLKALFLPKRLSIIHCPGHQKGNSAEARGNRMADQAAREVATRETPETSTLLAGKRTADGSEFEKRTADGSEFESPKKKAKVE

SEQ ID NO: 6950 - protein, 2090 aa, synthetic construct
MPAAKRVKLDGGDKKYSIGLDIGTNSVGWAVITDEYKVPSKKFKVLGNTDRHSIKKNLIGALLFDSGETAEATRLKRTARRRYTRRKNRICYLQEIFSNEMAKVDDSFFHRLEESFLVEEDKKHERHPIFGNIVDEVAYHEKYPTIYHLRKKLVDSTDKADLRLIYLALAHMIKFRGHFLIEGDLNPDNSDVDKLFIQLVQTYNQLFEENPINASGVDAKAILSARLSKSRRLENLIAQLPGEKKNGLFGNLIALSLGLTPNFKSNFDLAEDAKLQLSKDTYDDDLDNLLAQIGDQYADLFLAAKNLSDAILLSDILRVNTEITKAPLSASMIKRYDEHHQDLTLLKALVRQQLPEKYKEIFFDQSKNGYAGYIDGGASQEEFYKFIKPILEKMDGTEELLVKLNREDLLRKQRTFDNGSIPHQIHLGELHAILRRQEDFYPFLKDNREKIEKILTFRIPYYVGPLARGNSRFAWMTRKSEETITPWNFEEVVDKGASAQSFIERMTNFDKNLPNEKVLPKHSLLYEYFTVYNELTKVKYVTEGMRKPAFLSGEQKKAIVDLLFKTNRKVTVKQLKEDYFKKIECFDSVEISGVEDRFNASLGTYHDLLKIIKDKDFLDNEENEDILEDIVLTLTLFEDREMIEERLKTYAHLFDDKVMKQLKRRRYTGWGRLSRKLINGIRDKQSGKTILDFLKSDGFANRNFMQLIHDDSLTFKEDIQKAQVSGQGDSLHEHIANLAGSPAIKKGILQTVKVVDELVKVMGRHKPENIVIEMARENQTTQKGQKNSRERMKRIEEGIKELGSQILKEHPVENTQLQNEKLYLYYLQNGRDMYVDQELDINRLSDYDVDHIVPQSFLKDDSIDNKVLTRSDKARGKSDNVPSEEVVKKMKNYWRQLLNAKLITQRKFDNLTKAERGGLSELDKAGFIKRQLVETRQITKHVAQILDSRMNTKYDENDKLIREVKVITLKSKLVSDFRKDFQFYKVREINNYHHAHDAYLNAVVGTALIKKYPKLESEFVYGDYKVYDVRKMIAKSEQEIGKATAKYFFYSNIMNFFKTEITLANGEIRKRPLIETNGETGEIVWDKGRDFATVRKVLSMPQVNIVKKTEVQTGGFSKESILPKRNSDKLIARKKDWDPKKYGGFDSPTVAYSVLVVAKVEKGKSKKLKSVKELLGITIMERSSFEKNPIDFLEAKGYKEVKKDLIIKLPKYSLFELENGRKRMLASAGELQKGNELALPSKYVNFLYLASHYEKLKGSPEDNEQKQLFVEQHKHYLDEIIEQISEFSKRVILADANLDKVLSAYNKHRDKPIREQAENIIHLFTLTNLGAPAAFKYFDTTIDRKRYTSTKEVLDATLIHQSITGLYETRIDLSQLGGDGGEAAAKGGSGGGGGTLQLDDEYRLYSPLVKPDQNIQFWLEQFPQAWAETAGMGLAKQVPPQVIQLKASATPVSVRQYPLSKEAQEGIRPHVQRLIQQGILVPVQSPWNTPLLPVRKPGTNDYRPVQDLREVNKRVQDIHPTVPNPYNLLCALPPQRSWYTVLDLKDAFFCLRLHPTSQPLFAFEWRDPGTGRTGQLTWTRLPQGFKNSPTIFDEALHRDLANFRIQHPQVTLLQYVDDLLLAGATKQDCLEGTKALLLELSDLGYRASAKKAQICRREVTYLGYSLRDGQRWLTEARKKTVVQIPAPTTAKQVREFLGTAGFCRLWIPGFATLAAPLYPLTKEKGEFSWAPEHQKAFDAIKKALLSAPALALPDVTKPFTLYVDERKGVARGVLTQTLGPWRRPVAYLSKKLDPVASGWPVCLKAIAAVAILVKDADKLTLGQNITVIAPHALENIVRQPPDRWMTNARMTHYQSLLLTERVTFAPPAALNPATLLPEETDEPVTHDCHQLLIEETGVRKDLTDIPLTGEVLTWFTDGSSYVVEGKRMAGAAVVDGTRTIWASSLPEGTSAQKAELMALTQALRLAEGKSINIYTDSRYAFATAHVHGAIYKQRGLLTSAGREIKNKEEILSLLEALHLPKRLAIIHCPGHQKAKDPISRGNQMADRVAKQAAQGVNLLAGKRTADGSEFEKRTADGSEFESPKKKAKVE

SEQ ID NO: 6951 - protein, 2087 aa, synthetic construct
MPAAKRVKLDGGDKKYSIGLDIGTNSVGWAVITDEYKVPSKKFKVLGNTDRHSIKKNLIGALLFDSGETAEATRLKRTARRRYTRRKNRICYLQEIFSNEMAKVDDSFFHRLEESFLVEEDKKHERHPIFGNIVDEVAYHEKYPTIYHLRKKLVDSTDKADLRLIYLALAHMIKFRGHFLIEGDLNPDNSDVDKLFIQLVQTYNQLFEENPINASGVDAKAILSARLSKSRRLENLIAQLPGEKKNGLFGNLIALSLGLTPNFKSNFDLAEDAKLQLSKDTYDDDLDNLLAQIGDQYADLFLAAKNLSDAILLSDILRVNTEITKAPLSASMIKRYDEHHQDLTLLKALVRQQLPEKYKEIFFDQSKNGYAGYIDGGASQEEFYKFIKPILEKMDGTEELLVKLNREDLLRKQRTFDNGSIPHQIHLGELHAILRRQEDFYPFLKDNREKIEKILTFRIPYYVGPLARGNSRFAWMTRKSEETITPWNFEEVVDKGASAQSFIERMTNFDKNLPNEKVLPKHSLLYEYFTVYNELTKVKYVTEGMRKPAFLSGEQKKAIVDLLFKTNRKVTVKQLKEDYFKKIECFDSVEISGVEDRFNASLGTYHDLLKIIKDKDFLDNEENEDILEDIVLTLTLFEDREMIEERLKTYAHLFDDKVMKQLKRRRYTGWGRLSRKLINGIRDKQSGKTILDFLKSDGFANRNFMQLIHDDSLTFKEDIQKAQVSGQGDSLHEHIANLAGSPAIKKGILQTVKVVDELVKVMGRHKPENIVIEMARENQTTQKGQKNSRERMKRIEEGIKELGSQILKEHPVENTQLQNEKLYLYYLQNGRDMYVDQELDINRLSDYDVDHIVPQSFLKDDSIDNKVLTRSDKARGKSDNVPSEEVVKKMKNYWRQLLNAKLITQRKFDNLTKAERGGLSELDKAGFIKRQLVETRQITKHVAQILDSRMNTKYDENDKLIREVKVITLKSKLVSDFRKDFQFYKVREINNYHHAHDAYLNAVVGTALIKKYPKLESEFVYGDYKVYDVRKMIAKSEQEIGKATAKYFFYSNIMNFFKTEITLANGEIRKRPLIETNGETGEIVWDKGRDFATVRKVLSMPQVNIVKKTEVQTGGFSKESILPKRNSDKLIARKKDWDPKKYGGFDSPTVAYSVLVVAKVEKGKSKKLKSVKELLGITIMERSSFEKNPIDFLEAKGYKEVKKDLIIKLPKYSLFELENGRKRMLASAGELQKGNELALPSKYVNFLYLASHYEKLKGSPEDNEQKQLFVEQHKHYLDEIIEQISEFSKRVILADANLDKVLSAYNKHRDKPIREQAENIIHLFTLTNLGAPAAFKYFDTTIDRKRYTSTKEVLDATLIHQSITGLYETRIDLSQLGGDGGEAAAKGGSGGGGGIPWLMKKPLQLTTLVPLQEYEERLLKQTMLTGSYKEKLQSLFLKYDALWQHWENQVGHRRIKPHHIATGTVNPRPQKQYPINPKAKASIQTVINDLLKQGVLIQQNSIMNTPVYPVPKPDGKWRMVLDYREVNKTIPLIAAQNQHSAGILSSIFRGKYKTTLDLSNGFWAHSITPESYWLTAFTWLGQQYCWTRLPQGFLNSPALFTADVVDLLKEVPNVQVYVDDIYISHDDPREHLEQLEKVFSLLLNAGYVVSLKKSEIAQHEVEFLGFNITKEGRGLTETFKQKLLNITPPRDLKQLQSILGLLNFARNFIPNFSELVKPLYNIIATANGKYITWTTDNSQQLQNIISMLNSAENLEERNPEVRLIMKVNTSPSAGYIRFYNEFAKRPIMYLNYVYTKAEVKFTNTEKLLTTIHKGLIKALDLGMGQEILVYSPIVSMTKIQKTPLPERKALPIRWITWMSYLEDPRIQFHYDKTLPELQQVPTVTDDIIAKIKHPSEFSMVFYTDGSAIKHPNVNKSHNAGMGIAQVQFKPEFTVINTWSIPLGDHTAQLAEVAAVEFACKKALKIDGPVLIVTDSFYVAESVNKELPYWQSNGFFNNKKKPLKHVSKWKSIADCIQLKPDIIIIHEKGHQPTASTFHTEGNNLADKLATQGSYVVNAGKRTADGSEFEKRTADGSEFESPKKKAKVE

SEQ ID NO: 6952 - protein, 2176 aa, synthetic construct
MPAAKRVKLDGGDKKYSIGLDIGTNSVGWAVITDEYKVPSKKFKVLGNTDRHSIKKNLIGALLFDSGETAEATRLKRTARRRYTRRKNRICYLQEIFSNEMAKVDDSFFHRLEESFLVEEDKKHERHPIFGNIVDEVAYHEKYPTIYHLRKKLVDSTDKADLRLIYLALAHMIKFRGHFLIEGDLNPDNSDVDKLFIQLVQTYNQLFEENPINASGVDAKAILSARLSKSRRLENLIAQLPGEKKNGLFGNLIALSLGLTPNFKSNFDLAEDAKLQLSKDTYDDDLDNLLAQIGDQYADLFLAAKNLSDAILLSDILRVNTEITKAPLSASMIKRYDEHHQDLTLLKALVRQQLPEKYKEIFFDQSKNGYAGYIDGGASQEEFYKFIKPILEKMDGTEELLVKLNREDLLRKQRTFDNGSIPHQIHLGELHAILRRQEDFYPFLKDNREKIEKILTFRIPYYVGPLARGNSRFAWMTRKSEETITPWNFEEVVDKGASAQSFIERMTNFDKNLPNEKVLPKHSLLYEYFTVYNELTKVKYVTEGMRKPAFLSGEQKKAIVDLLFKTNRKVTVKQLKEDYFKKIECFDSVEISGVEDRFNASLGTYHDLLKIIKDKDFLDNEENEDILEDIVLTLTLFEDREMIEERLKTYAHLFDDKVMKQLKRRRYTGWGRLSRKLINGIRDKQSGKTILDFLKSDGFANRNFMQLIHDDSLTFKEDIQKAQVSGQGDSLHEHIANLAGSPAIKKGILQTVKVVDELVKVMGRHKPENIVIEMARENQTTQKGQKNSRERMKRIEEGIKELGSQILKEHPVENTQLQNEKLYLYYLQNGRDMYVDQELDINRLSDYDVDHIVPQSFLKDDSIDNKVLTRSDKARGKSDNVPSEEVVKKMKNYWRQLLNAKLITQRKFDNLTKAERGGLSELDKAGFIKRQLVETRQITKHVAQILDSRMNTKYDENDKLIREVKVITLKSKLVSDFRKDFQFYKVREINNYHHAHDAYLNAVVGTALIKKYPKLESEFVYGDYKVYDVRKMIAKSEQEIGKATAKYFFYSNIMNFFKTEITLANGEIRKRPLIETNGETGEIVWDKGRDFATVRKVLSMPQVNIVKKTEVQTGGFSKESILPKRNSDKLIARKKDWDPKKYGGFDSPTVAYSVLVVAKVEKGKSKKLKSVKELLGITIMERSSFEKNPIDFLEAKGYKEVKKDLIIKLPKYSLFELENGRKRMLASAGELQKGNELALPSKYVNFLYLASHYEKLKGSPEDNEQKQLFVEQHKHYLDEIIEQISEFSKRVILADANLDKVLSAYNKHRDKPIREQAENIIHLFTLTNLGAPAAFKYFDTTIDRKRYTSTKEVLDATLIHQSITGLYETRIDLSQLGGDGGEAAAKGGSGGGGGMDPLQLLQPLEAEIKGTKLKAHWNSGATITCVPQAFLEEEVPIKNIWIKTIHGEKEQPVYYLTFKIQGRKVEAEVISSPYDYILVSPSDIPWLMKKPLQLTTLVPLQEYEERLLKQTMLTGSYKEKLQSLFLKYDALWQHWENQVGHRRIKPHHIATGTVNPRPQKQYPINPKAKASIQTVINDLLKQGVLIQQNSIMNTPVYPVPKPDGKWRMVLDYREVNKTIPLIAAQNQHSAGILSSIFRGKYKTTLDLSNGFWAHSITPESYWLTAFTWLGQQYCWTRLPQGFLNSPALFNADVVDLLKEVPNVQVYVDDIYISHDDPREHLEQLEKVFSLLLNAGYVVSLKKSEIAQHEVEFLGFNITKEGRGLTETFKQKLLNITPPRDLKQLQSILGKLNFARNFIPNFSELVKPLYNIIATAPGKYITWTTDNSQQLQNIISMLNSAENLEERNPEVRLIMKVNTSPSAGYIRFYNEFAKRPIMYLNYVYTKAEVKFTNTEKLLTTIHKGLIKALDLGMGQEILVYSPIVSMTKIQKTPLPERKALPIRWITWMSYLEDPRIQFHYDKTLPELQQVPTVTDDIIAKIKHPSEFSMVFYTDGSAIKHPNVNKSHNAGMGIAQVQFKPEFTVINTWSIPLGDHTAQLAEVAAVEFACKKALKIDGPVLIVTDSFYVAESVNKELPYWQSNGFFNNKKKPLKHVSKWKSIADCIQLKPDIIIIHEKGHQPTASTFHTEGNNLADKLATQGSYVVNAGKRTADGSEFEKRTADGSEFESPKKKAKVE

SEQ ID NO: 6953 - protein, 2094 aa, synthetic construct
MPAAKRVKLDGGDKKYSIGLDIGTNSVGWAVITDEYKVPSKKFKVLGNTDRHSIKKNLIGALLFDSGETAEATRLKRTARRRYTRRKNRICYLQEIFSNEMAKVDDSFFHRLEESFLVEEDKKHERHPIFGNIVDEVAYHEKYPTIYHLRKKLVDSTDKADLRLIYLALAHMIKFRGHFLIEGDLNPDNSDVDKLFIQLVQTYNQLFEENPINASGVDAKAILSARLSKSRRLENLIAQLPGEKKNGLFGNLIALSLGLTPNFKSNFDLAEDAKLQLSKDTYDDDLDNLLAQIGDQYADLFLAAKNLSDAILLSDILRVNTEITKAPLSASMIKRYDEHHQDLTLLKALVRQQLPEKYKEIFFDQSKNGYAGYIDGGASQEEFYKFIKPILEKMDGTEELLVKLNREDLLRKQRTFDNGSIPHQIHLGELHAILRRQEDFYPFLKDNREKIEKILTFRIPYYVGPLARGNSRFAWMTRKSEETITPWNFEEVVDKGASAQSFIERMTNFDKNLPNEKVLPKHSLLYEYFTVYNELTKVKYVTEGMRKPAFLSGEQKKAIVDLLFKTNRKVTVKQLKEDYFKKIECFDSVEISGVEDRFNASLGTYHDLLKIIKDKDFLDNEENEDILEDIVLTLTLFEDREMIEERLKTYAHLFDDKVMKQLKRRRYTGWGRLSRKLINGIRDKQSGKTILDFLKSDGFANRNFMQLIHDDSLTFKEDIQKAQVSGQGDSLHEHIANLAGSPAIKKGILQTVKVVDELVKVMGRHKPENIVIEMARENQTTQKGQKNSRERMKRIEEGIKELGSQILKEHPVENTQLQNEKLYLYYLQNGRDMYVDQELDINRLSDYDVDHIVPQSFLKDDSIDNKVLTRSDKARGKSDNVPSEEVVKKMKNYWRQLLNAKLITQRKFDNLTKAERGGLSELDKAGFIKRQLVETRQITKHVAQILDSRMNTKYDENDKLIREVKVITLKSKLVSDFRKDFQFYKVREINNYHHAHDAYLNAVVGTALIKKYPKLESEFVYGDYKVYDVRKMIAKSEQEIGKATAKYFFYSNIMNFFKTEITLANGEIRKRPLIETNGETGEIVWDKGRDFATVRKVLSMPQVNIVKKTEVQTGGFSKESILPKRNSDKLIARKKDWDPKKYGGFDSPTVAYSVLVVAKVEKGKSKKLKSVKELLGITIMERSSFEKNPIDFLEAKGYKEVKKDLIIKLPKYSLFELENGRKRMLASAGELQKGNELALPSKYVNFLYLASHYEKLKGSPEDNEQKQLFVEQHKHYLDEIIEQISEFSKRVILADANLDKVLSAYNKHRDKPIREQAENIIHLFTLTNLGAPAAFKYFDTTIDRKRYTSTKEVLDATLIHQSITGLYETRIDLSQLGGDGGEAAAKGGSGGGGGVLNLEEEYRLHEKPVPSSIDPSWLQLFPTVWAERAGMGLANQVPPVVVELRSGASPVAVRQYPMSKEAREGIRPHIQRFLDLGVLVPCQSPWNTPLLPVKKPGTNDYRPVQDLREINKRVQDIHPTVPNPYNLLSSLPPSHTWYSVLDLKDAFFCLKLHPNSQPLFAFEWRDPEKGNTGQLTWTRLPQGFKNSPTLFNEALHRDLAPFRALNPQVVLLQYVDDLLVAAPTYRDCKEGTQKLLQELSKLGYRVSAKKAQLCQKEVTYLGYLLKEGKRWLTPARKATVMKIPPPTTPRQVREFLGTAGFCRLWIPGFASLAAPLYPLTKPSIPFIWTEEHQKAFDRIKEALLSAPALALPDLTKPFTLYVDERAGVARGVLTQTLGPWRRPVAYLSKKLDPVASGWPTCLKAVAAVALLLKDADKLTLGQNVTVIASHSLESIVRQPPDRWMTNARMTHYQSLLLNERVSFAPPAVLNPATLLPVESEATPVHRCSEILAEETGTRRDLKDQPLPGVPAWYTDGSSFIAEGKRRAGAAIVDGKRTVWASSLPEGTSAQKAELVALTQALRLAEGKDINIYTDSRYAFATAHIHGAIYKQRGWLTSAGKDIKNKEEILALLEAIHLPKRVAIIHCPGHQKGNDPVATGNRRADEAAKQAALSTRVLAETTKPAGKRTADGSEFEKRTADGSEFESPKKKAKVE

SEQ ID NO: 6954 - protein, 2094 aa, synthetic construct
MPAAKRVKLDGGDKKYSIGLDIGTNSVGWAVITDEYKVPSKKFKVLGNTDRHSIKKNLIGALLFDSGETAEATRLKRTARRRYTRRKNRICYLQEIFSNEMAKVDDSFFHRLEESFLVEEDKKHERHPIFGNIVDEVAYHEKYPTIYHLRKKLVDSTDKADLRLIYLALAHMIKFRGHFLIEGDLNPDNSDVDKLFIQLVQTYNQLFEENPINASGVDAKAILSARLSKSRRLENLIAQLPGEKKNGLFGNLIALSLGLTPNFKSNFDLAEDAKLQLSKDTYDDDLDNLLAQIGDQYADLFLAAKNLSDAILLSDILRVNTEITKAPLSASMIKRYDEHHQDLTLLKALVRQQLPEKYKEIFFDQSKNGYAGYIDGGASQEEFYKFIKPILEKMDGTEELLVKLNREDLLRKQRTFDNGSIPHQIHLGELHAILRRQEDFYPFLKDNREKIEKILTFRIPYYVGPLARGNSRFAWMTRKSEETITPWNFEEVVDKGASAQSFIERMTNFDKNLPNEKVLPKHSLLYEYFTVYNELTKVKYVTEGMRKPAFLSGEQKKAIVDLLFKTNRKVTVKQLKEDYFKKIECFDSVEISGVEDRFNASLGTYHDLLKIIKDKDFLDNEENEDILEDIVLTLTLFEDREMIEERLKTYAHLFDDKVMKQLKRRRYTGWGRLSRKLINGIRDKQSGKTILDFLKSDGFANRNFMQLIHDDSLTFKEDIQKAQVSGQGDSLHEHIANLAGSPAIKKGILQTVKVVDELVKVMGRHKPENIVIEMARENQTTQKGQKNSRERMKRIEEGIKELGSQILKEHPVENTQLQNEKLYLYYLQNGRDMYVDQELDINRLSDYDVDHIVPQSFLKDDSIDNKVLTRSDKARGKSDNVPSEEVVKKMKNYWRQLLNAKLITQRKFDNLTKAERGGLSELDKAGFIKRQLVETRQITKHVAQILDSRMNTKYDENDKLIREVKVITLKSKLVSDFRKDFQFYKVREINNYHHAHDAYLNAVVGTALIKKYPKLESEFVYGDYKVYDVRKMIAKSEQEIGKATAKYFFYSNIMNFFKTEITLANGEIRKRPLIETNGETGEIVWDKGRDFATVRKVLSMPQVNIVKKTEVQTGGFSKESILPKRNSDKLIARKKDWDPKKYGGFDSPTVAYSVLVVAKVEKGKSKKLKSVKELLGITIMERSSFEKNPIDFLEAKGYKEVKKDLIIKLPKYSLFELENGRKRMLASAGELQKGNELALPSKYVNFLYLASHYEKLKGSPEDNEQKQLFVEQHKHYLDEIIEQISEFSKRVILADANLDKVLSAYNKHRDKPIREQAENIIHLFTLTNLGAPAAFKYFDTTIDRKRYTSTKEVLDATLIHQSITGLYETRIDLSQLGGDGGEAAAKGGSGGGGGVLNLEEEYRLHEKPVPSSIDPSWLQLFPTVWAERAGMGLANQVPPVVVELRSGASPVAVRQYPMSKEAREGIRPHIQRFLDLGVLVPCQSPWNTPLLPVKKPGTNDYRPVQDLREINKRVQDIHPTVPNPYNLLSSLPPSHTWYSVLDLKDAFFCLKLHPNSQPLFAFEWRDPEKGNTGQLTWTRLPQGFKNSPTLFNEALHRDLAPFRALNPQVVLLQYVDDLLVAAPTYRDCKEGTQKLLQELSKLGYRVSAKKAQLCQKEVTYLGYLLKEGKRWLTPARKATVMKIPPPTTPRQVREFLGKAGFCRLFIPGFASLAAPLYPLTKPSIPFIWTEEHQKAFDRIKEALLSAPALALPDLTKPFTLYVDERAGVARGVLTQTLGPWRRPVAYLSKKLDPVASGWPTCLKAVAAVALLLKDADKLTLGQNVTVIASHSLESIVRQPPDRWMTNARMTHYQSLLLNERVSFAPPAVLNPATLLPVESEATPVHRCSEILAEETGTRRDLKDQPLPGVPAWYTDGSSFIAEGKRRAGAAIVDGKRTVWASSLPEGTSAQKAELVALTQALRLAEGKDINIYTDSRYAFATAHIHGAIYKQRGWLTSAGKDIKNKEEILALLEAIHLPKRVAIIHCPGHQKGNDPVATGNRRADEAAKQAALSTRVLAETTKPAGKRTADGSEFEKRTADGSEFESPKKKAKVE

SEQ ID NO: 6955 - protein, 2096 aa, synthetic construct
MPAAKRVKLDGGDKKYSIGLDIGTNSVGWAVITDEYKVPSKKFKVLGNTDRHSIKKNLIGALLFDSGETAEATRLKRTARRRYTRRKNRICYLQEIFSNEMAKVDDSFFHRLEESFLVEEDKKHERHPIFGNIVDEVAYHEKYPTIYHLRKKLVDSTDKADLRLIYLALAHMIKFRGHFLIEGDLNPDNSDVDKLFIQLVQTYNQLFEENPINASGVDAKAILSARLSKSRRLENLIAQLPGEKKNGLFGNLIALSLGLTPNFKSNFDLAEDAKLQLSKDTYDDDLDNLLAQIGDQYADLFLAAKNLSDAILLSDILRVNTEITKAPLSASMIKRYDEHHQDLTLLKALVRQQLPEKYKEIFFDQSKNGYAGYIDGGASQEEFYKFIKPILEKMDGTEELLVKLNREDLLRKQRTFDNGSIPHQIHLGELHAILRRQEDFYPFLKDNREKIEKILTFRIPYYVGPLARGNSRFAWMTRKSEETITPWNFEEVVDKGASAQSFIERMTNFDKNLPNEKVLPKHSLLYEYFTVYNELTKVKYVTEGMRKPAFLSGEQKKAIVDLLFKTNRKVTVKQLKEDYFKKIECFDSVEISGVEDRFNASLGTYHDLLKIIKDKDFLDNEENEDILEDIVLTLTLFEDREMIEERLKTYAHLFDDKVMKQLKRRRYTGWGRLSRKLINGIRDKQSGKTILDFLKSDGFANRNFMQLIHDDSLTFKEDIQKAQVSGQGDSLHEHIANLAGSPAIKKGILQTVKVVDELVKVMGRHKPENIVIEMARENQTTQKGQKNSRERMKRIEEGIKELGSQILKEHPVENTQLQNEKLYLYYLQNGRDMYVDQELDINRLSDYDVDHIVPQSFLKDDSIDNKVLTRSDKARGKSDNVPSEEVVKKMKNYWRQLLNAKLITQRKFDNLTKAERGGLSELDKAGFIKRQLVETRQITKHVAQILDSRMNTKYDENDKLIREVKVITLKSKLVSDFRKDFQFYKVREINNYHHAHDAYLNAVVGTALIKKYPKLESEFVYGDYKVYDVRKMIAKSEQEIGKATAKYFFYSNIMNFFKTEITLANGEIRKRPLIETNGETGEIVWDKGRDFATVRKVLSMPQVNIVKKTEVQTGGFSKESILPKRNSDKLIARKKDWDPKKYGGFDSPTVAYSVLVVAKVEKGKSKKLKSVKELLGITIMERSSFEKNPIDFLEAKGYKEVKKDLIIKLPKYSLFELENGRKRMLASAGELQKGNELALPSKYVNFLYLASHYEKLKGSPEDNEQKQLFVEQHKHYLDEIIEQISEFSKRVILADANLDKVLSAYNKHRDKPIREQAENIIHLFTLTNLGAPAAFKYFDTTIDRKRYTSTKEVLDATLIHQSITGLYETRIDLSQLGGDGGEAAAKGGSGGGGGTLNIEDEYRLHETSKEPDVPLGSTWLSDFPQAWAETGGMGLAVRQAPLIIPLKATSTPVSIKQYPMSQEARLGIKPHIQRLLDQGILVPCQSPWNTPLLPVKKPGTNDYRPVQDLREVNKRVEDIHPTVPNPYNLLSGLPPSHQWYTVLDLKDAFFCLRLHPTSQPLFAFEWRDPEMGISGQLTWTRLPQGFKNSPTLFDEALHRDLADFRIQHPDLILLQYVDDLLLAATSEQDCQRGTRALLQTLGNLGYRASAKKAQICQKQVKYLGYLLKEGQRWLTEARKETVMGQPTPKTPRQLREFLGTAGFCRLWIPGFAEMAAPLYPLTKTGTLFNWGPDQQKAYQEIKQALLTAPALGLPDLTKPFELFVDEKQGYAKGVLTQKLGPWRRPVAYLSKKLDPVAAGWPPCLRMVAAIAVLTKDAGKLTMGQPLVILAPHAVEALVKQPPDRWLSNARMTHYQAMLLDTDRVQFGPVVALNPATLLPLPEKEAPHDCLEILAETHGTRPDLTDQPIPDADYTWYTDGSSFLQEGQRRAGAAVTTETEVIWARALPAGTSAQRAELIALTQALKMAEGKKLNVYTDSRYAFATAHVHGEIYRRRGLLTSEGREIKNKNEILALLKALFLPKRLSIIHCPGHQKGNSAEARGNRMADQAAREAAMKAVLETSTLLAGKRTADGSEFEKRTADGSEFESPKKKAKVE

SEQ ID NO: 6956 - protein, 2096 aa, synthetic construct
MPAAKRVKLDGGDKKYSIGLDIGTNSVGWAVITDEYKVPSKKFKVLGNTDRHSIKKNLIGALLFDSGETAEATRLKRTARRRYTRRKNRICYLQEIFSNEMAKVDDSFFHRLEESFLVEEDKKHERHPIFGNIVDEVAYHEKYPTIYHLRKKLVDSTDKADLRLIYLALAHMIKFRGHFLIEGDLNPDNSDVDKLFIQLVQTYNQLFEENPINASGVDAKAILSARLSKSRRLENLIAQLPGEKKNGLFGNLIALSLGLTPNFKSNFDLAEDAKLQLSKDTYDDDLDNLLAQIGDQYADLFLAAKNLSDAILLSDILRVNTEITKAPLSASMIKRYDEHHQDLTLLKALVRQQLPEKYKEIFFDQSKNGYAGYIDGGASQEEFYKFIKPILEKMDGTEELLVKLNREDLLRKQRTFDNGSIPHQIHLGELHAILRRQEDFYPFLKDNREKIEKILTFRIPYYVGPLARGNSRFAWMTRKSEETITPWNFEEVVDKGASAQSFIERMTNFDKNLPNEKVLPKHSLLYEYFTVYNELTKVKYVTEGMRKPAFLSGEQKKAIVDLLFKTNRKVTVKQLKEDYFKKIECFDSVEISGVEDRFNASLGTYHDLLKIIKDKDFLDNEENEDILEDIVLTLTLFEDREMIEERLKTYAHLFDDKVMKQLKRRRYTGWGRLSRKLINGIRDKQSGKTILDFLKSDGFANRNFMQLIHDDSLTFKEDIQKAQVSGQGDSLHEHIANLAGSPAIKKGILQTVKVVDELVKVMGRHKPENIVIEMARENQTTQKGQKNSRERMKRIEEGIKELGSQILKEHPVENTQLQNEKLYLYYLQNGRDMYVDQELDINRLSDYDVDHIVPQSFLKDDSIDNKVLTRSDKARGKSDNVPSEEVVKKMKNYWRQLLNAKLITQRKFDNLTKAERGGLSELDKAGFIKRQLVETRQITKHVAQILDSRMNTKYDENDKLIREVKVITLKSKLVSDFRKDFQFYKVREINNYHHAHDAYLNAVVGTALIKKYPKLESEFVYGDYKVYDVRKMIAKSEQEIGKATAKYFFYSNIMNFFKTEITLANGEIRKRPLIETNGETGEIVWDKGRDFATVRKVLSMPQVNIVKKTEVQTGGFSKESILPKRNSDKLIARKKDWDPKKYGGFDSPTVAYSVLVVAKVEKGKSKKLKSVKELLGITIMERSSFEKNPIDFLEAKGYKEVKKDLIIKLPKYSLFELENGRKRMLASAGELQKGNELALPSKYVNFLYLASHYEKLKGSPEDNEQKQLFVEQHKHYLDEIIEQISEFSKRVILADANLDKVLSAYNKHRDKPIREQAENIIHLFTLTNLGAPAAFKYFDTTIDRKRYTSTKEVLDATLIHQSITGLYETRIDLSQLGGDGGEAAAKGGSGGGGGTLNIEDEYRLHETSKEPDVPLGSTWLSDFPQAWAETGGMGLAVRQAPLIIPLKATSTPVSIKQYPMSQEARLGIKPHIQRLLDQGILVPCQSPWNTPLLPVKKPGTNDYRPVQDLREVNKRVEDIHPTVPNPYNLLSGLPPSHQWYTVLDLKDAFFCLRLHPTSQPLFAFEWRDPEMGISGQLTWTRLPQGFKNSPTLFNEALHRDLADFRIQHPDLILLQYVDDLLLAATSEQDCQRGTRALLQTLGNLGYRASAKKAQICQKQVKYLGYLLKEGQRWLTEARKETVMGQPTPKTPRQLREFLGTAGFCRLWIPGFAEMAAPLYPLTKPGTLFNWGPDQQKAYQEIKQALLTAPALGLPDLTKPFELFVDEKQGYAKGVLTQKLGPWRRPVAYLSKKLDPVAAGWPPCLRMVAAIAVLTKDAGKLTMGQPLVILAPHAVEALVKQPPDRWLSNARMTHYQAMLLDTDRVQFGPVVALNPATLLPLPEKEAPHDCLEILAETHGTRPDLTDQPIPDADYTWYTDGSSFLQEGQRRAGAAVTTETEVIWARALPAGTSAQRAELIALTQALKMAEGKKLNVYTDSRYAFATAHVHGEIYRRRGWLTSEGREIKNKNEILALLKALFLPKRLSIIHCPGHQKGNSAEARGNRMADQAAREAAMKAVLETSTLLAGKRTADGSEFEKRTADGSEFESPKKKAKVE

SEQ ID NO: 6957 - protein, 2102 aa, synthetic construct
MPAAKRVKLDGGDKKYSIGLDIGTNSVGWAVITDEYKVPSKKFKVLGNTDRHSIKKNLIGALLFDSGETAEATRLKRTARRRYTRRKNRICYLQEIFSNEMAKVDDSFFHRLEESFLVEEDKKHERHPIFGNIVDEVAYHEKYPTIYHLRKKLVDSTDKADLRLIYLALAHMIKFRGHFLIEGDLNPDNSDVDKLFIQLVQTYNQLFEENPINASGVDAKAILSARLSKSRRLENLIAQLPGEKKNGLFGNLIALSLGLTPNFKSNFDLAEDAKLQLSKDTYDDDLDNLLAQIGDQYADLFLAAKNLSDAILLSDILRVNTEITKAPLSASMIKRYDEHHQDLTLLKALVRQQLPEKYKEIFFDQSKNGYAGYIDGGASQEEFYKFIKPILEKMDGTEELLVKLNREDLLRKQRTFDNGSIPHQIHLGELHAILRRQEDFYPFLKDNREKIEKILTFRIPYYVGPLARGNSRFAWMTRKSEETITPWNFEEVVDKGASAQSFIERMTNFDKNLPNEKVLPKHSLLYEYFTVYNELTKVKYVTEGMRKPAFLSGEQKKAIVDLLFKTNRKVTVKQLKEDYFKKIECFDSVEISGVEDRFNASLGTYHDLLKIIKDKDFLDNEENEDILEDIVLTLTLFEDREMIEERLKTYAHLFDDKVMKQLKRRRYTGWGRLSRKLINGIRDKQSGKTILDFLKSDGFANRNFMQLIHDDSLTFKEDIQKAQVSGQGDSLHEHIANLAGSPAIKKGILQTVKVVDELVKVMGRHKPENIVIEMARENQTTQKGQKNSRERMKRIEEGIKELGSQILKEHPVENTQLQNEKLYLYYLQNGRDMYVDQELDINRLSDYDVDHIVPQSFLKDDSIDNKVLTRSDKARGKSDNVPSEEVVKKMKNYWRQLLNAKLITQRKFDNLTKAERGGLSELDKAGFIKRQLVETRQITKHVAQILDSRMNTKYDENDKLIREVKVITLKSKLVSDFRKDFQFYKVREINNYHHAHDAYLNAVVGTALIKKYPKLESEFVYGDYKVYDVRKMIAKSEQEIGKATAKYFFYSNIMNFFKTEITLANGEIRKRPLIETNGETGEIVWDKGRDFATVRKVLSMPQVNIVKKTEVQTGGFSKESILPKRNSDKLIARKKDWDPKKYGGFDSPTVAYSVLVVAKVEKGKSKKLKSVKELLGITIMERSSFEKNPIDFLEAKGYKEVKKDLIIKLPKYSLFELENGRKRMLASAGELQKGNELALPSKYVNFLYLASHYEKLKGSPEDNEQKQLFVEQHKHYLDEIIEQISEFSKRVILADANLDKVLSAYNKHRDKPIREQAENIIHLFTLTNLGAPAAFKYFDTTIDRKRYTSTKEVLDATLIHQSITGLYETRIDLSQLGGDGGEAAAKGGGGGSGGTVSLQDEHRLFDIPVTTSLPDVWLQDFPQAWAETGGLGRAKCQAPIIIDLKPTAVPVSIKQYPMSLEAHMGIRQHIIKFLELGVLRPCRSPWNTPLLPVKKPGTQDYRPVQDLREINKRTVDIHPTVPNPYNLLSTLKPDYSWYTVLDLKDAFFCLPLAPQSQELFAFEWKDPERGISGQLTWTRLPQGFKNSPTLFNEALHRDLTDFRTQHPEVTLLQYVDDLLLAAPTKKACTQGTRHLLQELGEKGYRASAKKAQICQTKVTYLGYILSEGKRWLTPGRIETVARIPPPRNPREVREFLGKAGFCRLFIPGFAELAAPLYALTKPSTPFTWQTEHQLAFEALKKALLSAPALGLPDTSKPFTLFLDERQGIAKGVLTQKLGPWKRPVAYLSKKLDPVAAGWPPCLRIMAATAMLVKDSAKLTLGQPLTVITPHTLEAIVRQPPDRWITNARLTHYQALLLDTDRVQFGPPVTLNPATLLPVPENQPSPHDCRQVLAETHGTREDLKDQELPDADHTWYTDGSSYLDSGTRRAGAAVVDGHNTIWAQSLPPGTSAQKAELIALTKALELSKGKKANIYTDSRYAFATAHTHGSIYERRGWLTSEGKEIKNKAEIIALLKALFLPQEVAIIHCPGHQKGQDPVAVGNRQADRVARQAAMAEVLTLATEPDNTSHITAGKRTADGSEFEKRTADGSEFESPKKKAKVE

SEQ ID NO: 6958 - protein, 2095 aa, synthetic construct
MPAAKRVKLDGGDKKYSIGLDIGTNSVGWAVITDEYKVPSKKFKVLGNTDRHSIKKNLIGALLFDSGETAEATRLKRTARRRYTRRKNRICYLQEIFSNEMAKVDDSFFHRLEESFLVEEDKKHERHPIFGNIVDEVAYHEKYPTIYHLRKKLVDSTDKADLRLIYLALAHMIKFRGHFLIEGDLNPDNSDVDKLFIQLVQTYNQLFEENPINASGVDAKAILSARLSKSRRLENLIAQLPGEKKNGLFGNLIALSLGLTPNFKSNFDLAEDAKLQLSKDTYDDDLDNLLAQIGDQYADLFLAAKNLSDAILLSDILRVNTEITKAPLSASMIKRYDEHHQDLTLLKALVRQQLPEKYKEIFFDQSKNGYAGYIDGGASQEEFYKFIKPILEKMDGTEELLVKLNREDLLRKQRTFDNGSIPHQIHLGELHAILRRQEDFYPFLKDNREKIEKILTFRIPYYVGPLARGNSRFAWMTRKSEETITPWNFEEVVDKGASAQSFIERMTNFDKNLPNEKVLPKHSLLYEYFTVYNELTKVKYVTEGMRKPAFLSGEQKKAIVDLLFKTNRKVTVKQLKEDYFKKIECFDSVEISGVEDRFNASLGTYHDLLKIIKDKDFLDNEENEDILEDIVLTLTLFEDREMIEERLKTYAHLFDDKVMKQLKRRRYTGWGRLSRKLINGIRDKQSGKTILDFLKSDGFANRNFMQLIHDDSLTFKEDIQKAQVSGQGDSLHEHIANLAGSPAIKKGILQTVKVVDELVKVMGRHKPENIVIEMARENQTTQKGQKNSRERMKRIEEGIKELGSQILKEHPVENTQLQNEKLYLYYLQNGRDMYVDQELDINRLSDYDVDHIVPQSFLKDDSIDNKVLTRSDKARGKSDNVPSEEVVKKMKNYWRQLLNAKLITQRKFDNLTKAERGGLSELDKAGFIKRQLVETRQITKHVAQILDSRMNTKYDENDKLIREVKVITLKSKLVSDFRKDFQFYKVREINNYHHAHDAYLNAVVGTALIKKYPKLESEFVYGDYKVYDVRKMIAKSEQEIGKATAKYFFYSNIMNFFKTEITLANGEIRKRPLIETNGETGEIVWDKGRDFATVRKVLSMPQVNIVKKTEVQTGGFSKESILPKRNSDKLIARKKDWDPKKYGGFDSPTVAYSVLVVAKVEKGKSKKLKSVKELLGITIMERSSFEKNPIDFLEAKGYKEVKKDLIIKLPKYSLFELENGRKRMLASAGELQKGNELALPSKYVNFLYLASHYEKLKGSPEDNEQKQLFVEQHKHYLDEIIEQISEFSKRVILADANLDKVLSAYNKHRDKPIREQAENIIHLFTLTNLGAPAAFKYFDTTIDRKRYTSTKEVLDATLIHQSITGLYETRIDLSQLGGDGGEAAAKGGGGGSGGTLQLEEEYRLFEPESTQKQEMDIWLKNFPQAWAETGGMGTAHCQAPVLIQLKATATPISIRQYPMPHEAYQGIKPHIRRMLDQGILKPCQSPWNTPLLPVKKPGTEDYRPVQDLREVNKRVEDIHPTVPNPYNLLSTLPPSHPWYTVLDLKDAFFCLRLHSESQLLFAFEWRDPEIGLSGQLTWTRLPQGFKNSPTLFNEALHSDLADFRVRYPALVLLQYVDDLLLAAATRTECLEGTKALLETLGNKGYRASAKKAQICLQEVTYLGYSLKDGQRWLTKARKEAILSIPVPKNSRQVREFLGTAGYCRLWIPGFAELAAPLYPLTRPGTLFQWGTEQQLAFEDIKKALLSSPALGLPDITKPFELFIDENSGFAKGVLVQKLGPWKRPVAYLSKKLDTVASGWPPCLRMVAAIAILVKDAGKLTLGQPLTILTSHPVEALVRQPPNKWLSNARMTHYQAMLLDAERVHFGPTVSLNPATLLPLPSGGNHHDCLQILAETHGTRPDLTDQPLPDADLTWYTDGSSFIRNGEREAGAAVTTESEVIWAAPLPPGTSAQRAELIALTQALKMAEGKKLTVYTDSRYAFATTHVHGEIYRRRGWLTSEGKEIKNKNEILALLEALFLPKRLSIIHCPGHQKGDSPQAKGNRLADDTAKKAATETHSSLTVLPAGKRTADGSEFEKRTADGSEFESPKKKAKVE

SEQ ID NO: 6959 - protein, 2087 aa, synthetic construct
MPAAKRVKLDGGDKKYSIGLDIGTNSVGWAVITDEYKVPSKKFKVLGNTDRHSIKKNLIGALLFDSGETAEATRLKRTARRRYTRRKNRICYLQEIFSNEMAKVDDSFFHRLEESFLVEEDKKHERHPIFGNIVDEVAYHEKYPTIYHLRKKLVDSTDKADLRLIYLALAHMIKFRGHFLIEGDLNPDNSDVDKLFIQLVQTYNQLFEENPINASGVDAKAILSARLSKSRRLENLIAQLPGEKKNGLFGNLIALSLGLTPNFKSNFDLAEDAKLQLSKDTYDDDLDNLLAQIGDQYADLFLAAKNLSDAILLSDILRVNTEITKAPLSASMIKRYDEHHQDLTLLKALVRQQLPEKYKEIFFDQSKNGYAGYIDGGASQEEFYKFIKPILEKMDGTEELLVKLNREDLLRKQRTFDNGSIPHQIHLGELHAILRRQEDFYPFLKDNREKIEKILTFRIPYYVGPLARGNSRFAWMTRKSEETITPWNFEEVVDKGASAQSFIERMTNFDKNLPNEKVLPKHSLLYEYFTVYNELTKVKYVTEGMRKPAFLSGEQKKAIVDLLFKTNRKVTVKQLKEDYFKKIECFDSVEISGVEDRFNASLGTYHDLLKIIKDKDFLDNEENEDILEDIVLTLTLFEDREMIEERLKTYAHLFDDKVMKQLKRRRYTGWGRLSRKLINGIRDKQSGKTILDFLKSDGFANRNFMQLIHDDSLTFKEDIQKAQVSGQGDSLHEHIANLAGSPAIKKGILQTVKVVDELVKVMGRHKPENIVIEMARENQTTQKGQKNSRERMKRIEEGIKELGSQILKEHPVENTQLQNEKLYLYYLQNGRDMYVDQELDINRLSDYDVDHIVPQSFLKDDSIDNKVLTRSDKARGKSDNVPSEEVVKKMKNYWRQLLNAKLITQRKFDNLTKAERGGLSELDKAGFIKRQLVETRQITKHVAQILDSRMNTKYDENDKLIREVKVITLKSKLVSDFRKDFQFYKVREINNYHHAHDAYLNAVVGTALIKKYPKLESEFVYGDYKVYDVRKMIAKSEQEIGKATAKYFFYSNIMNFFKTEITLANGEIRKRPLIETNGETGEIVWDKGRDFATVRKVLSMPQVNIVKKTEVQTGGFSKESILPKRNSDKLIARKKDWDPKKYGGFDSPTVAYSVLVVAKVEKGKSKKLKSVKELLGITIMERSSFEKNPIDFLEAKGYKEVKKDLIIKLPKYSLFELENGRKRMLASAGELQKGNELALPSKYVNFLYLASHYEKLKGSPEDNEQKQLFVEQHKHYLDEIIEQISEFSKRVILADANLDKVLSAYNKHRDKPIREQAENIIHLFTLTNLGAPAAFKYFDTTIDRKRYTSTKEVLDATLIHQSITGLYETRIDLSQLGGDGGEAAAKGGGGGSGGVPWLTQQPLQLTILVPLQEYQEKILSKTALPEDQKQQLKTLFVKYDNLWQHWENQVGHRKIRPHNIATGDYPPRPQKQYPINPKAKPSIQIVIDDLLKQGVLTPQNSTMNTPVYPVPKPDGRWRMVLDYREVNKTIPLTAAQNQHSAGILATIVRQKYKTTLDLANGFWAHPITPESYWLTAFTWQGKQYCWTRLPQGFLNSPALFNADVVDLLKEIPNVQVYVDDIYLSHDDPKEHVQQLEKVFQILLQAGYVVSLKKSEIGQKTVEFLGFNITKEGRGLTDTFKTKLLNITPPKDLKQLQSILGKLNFARNFIPNFAELVQPLYNLIAPAKGKYIEWSEENTKQLNMVIEALNTASNLEERLPEQRLVIKVNTSPSAGYVRYYNETGKKPIMYLNYVFSKAELKFSMLEKLLTTMHKALIKAMDLAMGQEILVYSPIVSMTKIQKTPLPERKALPIRWITWMTYLEDPRIQFHYDKTLPELKHIPDVYTSSQSPVKHPSQYEGVFYTDGSAIKSPDPTKSNNAGMGIVHATYKPEYQVLNQWSIPLGNHTAQMAEIAAVEFACKKALKIPGPVLVITDSFYVAESANKELPYWKSNGFVNNKKKPLKHISKWKSIAECLSMKPDITIQHEKGISLQIPVFILKGNALADKLATQGSYVVNAGKRTADGSEFEKRTADGSEFESPKKKAKVE

SEQ ID NO: 6960 - protein, 2218 aa, synthetic construct
MPAAKRVKLDGGDKKYSIGLDIGTNSVGWAVITDEYKVPSKKFKVLGNTDRHSIKKNLIGALLFDSGETAEATRLKRTARRRYTRRKNRICYLQEIFSNEMAKVDDSFFHRLEESFLVEEDKKHERHPIFGNIVDEVAYHEKYPTIYHLRKKLVDSTDKADLRLIYLALAHMIKFRGHFLIEGDLNPDNSDVDKLFIQLVQTYNQLFEENPINASGVDAKAILSARLSKSRRLENLIAQLPGEKKNGLFGNLIALSLGLTPNFKSNFDLAEDAKLQLSKDTYDDDLDNLLAQIGDQYADLFLAAKNLSDAILLSDILRVNTEITKAPLSASMIKRYDEHHQDLTLLKALVRQQLPEKYKEIFFDQSKNGYAGYIDGGASQEEFYKFIKPILEKMDGTEELLVKLNREDLLRKQRTFDNGSIPHQIHLGELHAILRRQEDFYPFLKDNREKIEKILTFRIPYYVGPLARGNSRFAWMTRKSEETITPWNFEEVVDKGASAQSFIERMTNFDKNLPNEKVLPKHSLLYEYFTVYNELTKVKYVTEGMRKPAFLSGEQKKAIVDLLFKTNRKVTVKQLKEDYFKKIECFDSVEISGVEDRFNASLGTYHDLLKIIKDKDFLDNEENEDILEDIVLTLTLFEDREMIEERLKTYAHLFDDKVMKQLKRRRYTGWGRLSRKLINGIRDKQSGKTILDFLKSDGFANRNFMQLIHDDSLTFKEDIQKAQVSGQGDSLHEHIANLAGSPAIKKGILQTVKVVDELVKVMGRHKPENIVIEMARENQTTQKGQKNSRERMKRIEEGIKELGSQILKEHPVENTQLQNEKLYLYYLQNGRDMYVDQELDINRLSDYDVDHIVPQSFLKDDSIDNKVLTRSDKARGKSDNVPSEEVVKKMKNYWRQLLNAKLITQRKFDNLTKAERGGLSELDKAGFIKRQLVETRQITKHVAQILDSRMNTKYDENDKLIREVKVITLKSKLVSDFRKDFQFYKVREINNYHHAHDAYLNAVVGTALIKKYPKLESEFVYGDYKVYDVRKMIAKSEQEIGKATAKYFFYSNIMNFFKTEITLANGEIRKRPLIETNGETGEIVWDKGRDFATVRKVLSMPQVNIVKKTEVQTGGFSKESILPKRNSDKLIARKKDWDPKKYGGFDSPTVAYSVLVVAKVEKGKSKKLKSVKELLGITIMERSSFEKNPIDFLEAKGYKEVKKDLIIKLPKYSLFELENGRKRMLASAGELQKGNELALPSKYVNFLYLASHYEKLKGSPEDNEQKQLFVEQHKHYLDEIIEQISEFSKRVILADANLDKVLSAYNKHRDKPIREQAENIIHLFTLTNLGAPAAFKYFDTTIDRKRYTSTKEVLDATLIHQSITGLYETRIDLSQLGGDGGEAAAKGGGGGSGGTLGDQGSRGSDPLPEPRVTLTVEGIPTEFLVNTGAEHSVLTKPMGKMGSKRTVVAGATGSKVYPWTTKRLLKIGQKQVTHSFLVIPECPAPLLGRDLLTKLKAQIQFSTEGPQVTWEDRPAMCLVLNLEEEYRLHEKPVPPSIDPSWLQLFPMVWAEKAGMGLANQVPPVVVELKSDASPVAVRQYPMSKEAREGIRPHIQRFLDLGILVPCQSPWNTPLLPVKKPGTNDYRPVQDLREVNKRVQDIHPTVPNPYNLLSSLPPSHTWYSVLDLKDAFFCLKLHPNSQPLFAFEWRDPEKGNTGQLTWTRLPQGFKNSPTLFDEALHRDLASFRALNPQVVMLQYVDDLLVAAPTYRDCKEGTRRLLQELSKLGYRVSAKKAQLCREEVTYLGYLLKGGKRWLTPARKATVMKIPTPTTPRQVREFLGTAGFCRLWIPGFASLAAPLYPLTREKVPFTWTEAHQEAFGRIKEALLSAPALALPDLTKPFALYVDEKEGVARGVLTQTLGPWRRPVAYLSKKLDPVASGWPTCLKAIAAVALLLKDADKLTLGQNVLVIAPHNLESIVRQPPDRWMTNARMTHYQSLLLNERVSFAPPAILNPATLLPVESDDTPIHICSEILAEETGTRPDLRDQPLPGVPAWYTDGSSFIMDGRRQAGAAIVDNKRTVWASNLPEGTSAQKAELIALTQALRLAEGKSINIYTDSRYAFATAHVHGAIYKQRGLLTSAGKDIKNKEEILALLEAIHLPKRVAIIHCPGHQRGTDPVATGNRKADEAAKQAAQSTRILTETTKNAGKRTADGSEFEKRTADGSEFESPKKKAKVE

SEQ ID NO: 6961 - protein, 2218 aa, synthetic construct
MPAAKRVKLDGGDKKYSIGLDIGTNSVGWAVITDEYKVPSKKFKVLGNTDRHSIKKNLIGALLFDSGETAEATRLKRTARRRYTRRKNRICYLQEIFSNEMAKVDDSFFHRLEESFLVEEDKKHERHPIFGNIVDEVAYHEKYPTIYHLRKKLVDSTDKADLRLIYLALAHMIKFRGHFLIEGDLNPDNSDVDKLFIQLVQTYNQLFEENPINASGVDAKAILSARLSKSRRLENLIAQLPGEKKNGLFGNLIALSLGLTPNFKSNFDLAEDAKLQLSKDTYDDDLDNLLAQIGDQYADLFLAAKNLSDAILLSDILRVNTEITKAPLSASMIKRYDEHHQDLTLLKALVRQQLPEKYKEIFFDQSKNGYAGYIDGGASQEEFYKFIKPILEKMDGTEELLVKLNREDLLRKQRTFDNGSIPHQIHLGELHAILRRQEDFYPFLKDNREKIEKILTFRIPYYVGPLARGNSRFAWMTRKSEETITPWNFEEVVDKGASAQSFIERMTNFDKNLPNEKVLPKHSLLYEYFTVYNELTKVKYVTEGMRKPAFLSGEQKKAIVDLLFKTNRKVTVKQLKEDYFKKIECFDSVEISGVEDRFNASLGTYHDLLKIIKDKDFLDNEENEDILEDIVLTLTLFEDREMIEERLKTYAHLFDDKVMKQLKRRRYTGWGRLSRKLINGIRDKQSGKTILDFLKSDGFANRNFMQLIHDDSLTFKEDIQKAQVSGQGDSLHEHIANLAGSPAIKKGILQTVKVVDELVKVMGRHKPENIVIEMARENQTTQKGQKNSRERMKRIEEGIKELGSQILKEHPVENTQLQNEKLYLYYLQNGRDMYVDQELDINRLSDYDVDHIVPQSFLKDDSIDNKVLTRSDKARGKSDNVPSEEVVKKMKNYWRQLLNAKLITQRKFDNLTKAERGGLSELDKAGFIKRQLVETRQITKHVAQILDSRMNTKYDENDKLIREVKVITLKSKLVSDFRKDFQFYKVREINNYHHAHDAYLNAVVGTALIKKYPKLESEFVYGDYKVYDVRKMIAKSEQEIGKATAKYFFYSNIMNFFKTEITLANGEIRKRPLIETNGETGEIVWDKGRDFATVRKVLSMPQVNIVKKTEVQTGGFSKESILPKRNSDKLIARKKDWDPKKYGGFDSPTVAYSVLVVAKVEKGKSKKLKSVKELLGITIMERSSFEKNPIDFLEAKGYKEVKKDLIIKLPKYSLFELENGRKRMLASAGELQKGNELALPSKYVNFLYLASHYEKLKGSPEDNEQKQLFVEQHKHYLDEIIEQISEFSKRVILADANLDKVLSAYNKHRDKPIREQAENIIHLFTLTNLGAPAAFKYFDTTIDRKRYTSTKEVLDATLIHQSITGLYETRIDLSQLGGDGGEAAAKGGGGGSGGTLGDQGSRGSDPLPEPRVTLTVEGIPTEFLVNTGAEHSVLTKPMGKMGSKRTVVAGATGSKVYPWTTKRLLKIGQKQVTHSFLVIPECPAPLLGRDLLTKLKAQIQFSTEGPQVTWEDRPAMCLVLNLEEEYRLHEKPVPPSIDPSWLQLFPMVWAEKAGMGLANQVPPVVVELKSDASPVAVRQYPMSKEAREGIRPHIQRFLDLGILVPCQSPWNTPLLPVKKPGTNDYRPVQDLREVNKRVQDIHPTVPNPYNLLSSLPPSHTWYSVLDLKDAFFCLKLHPNSQPLFAFEWRDPEKGNTGQLTWTRLPQGFKNSPTLFNEALHRDLASFRALNPQVVMLQYVDDLLVAAPTYRDCKEGTRRLLQELSKLGYRVSAKKAQLCREEVTYLGYLLKGGKRWLTPARKATVMKIPTPTTPRQVREFLGTAGFCRLWIPGFASLAAPLYPLTRPKVPFTWTEAHQEAFGRIKEALLSAPALALPDLTKPFALYVDEKEGVARGVLTQTLGPWRRPVAYLSKKLDPVASGWPTCLKAIAAVALLLKDADKLTLGQNVLVIAPHNLESIVRQPPDRWMTNARMTHYQSLLLNERVSFAPPAILNPATLLPVESDDTPIHICSEILAEETGTRPDLRDQPLPGVPAWYTDGSSFIMDGRRQAGAAIVDNKRTVWASNLPEGTSAQKAELIALTQALRLAEGKSINIYTDSRYAFATAHVHGAIYKQRGWLTSAGKDIKNKEEILALLEAIHLPKRVAIIHCPGHQRGTDPVATGNRKADEAAKQAAQSTRILTETTKNAGKRTADGSEFEKRTADGSEFESPKKKAKVE

SEQ ID NO: 6962 - protein, 2218 aa, synthetic construct
MPAAKRVKLDGGDKKYSIGLDIGTNSVGWAVITDEYKVPSKKFKVLGNTDRHSIKKNLIGALLFDSGETAEATRLKRTARRRYTRRKNRICYLQEIFSNEMAKVDDSFFHRLEESFLVEEDKKHERHPIFGNIVDEVAYHEKYPTIYHLRKKLVDSTDKADLRLIYLALAHMIKFRGHFLIEGDLNPDNSDVDKLFIQLVQTYNQLFEENPINASGVDAKAILSARLSKSRRLENLIAQLPGEKKNGLFGNLIALSLGLTPNFKSNFDLAEDAKLQLSKDTYDDDLDNLLAQIGDQYADLFLAAKNLSDAILLSDILRVNTEITKAPLSASMIKRYDEHHQDLTLLKALVRQQLPEKYKEIFFDQSKNGYAGYIDGGASQEEFYKFIKPILEKMDGTEELLVKLNREDLLRKQRTFDNGSIPHQIHLGELHAILRRQEDFYPFLKDNREKIEKILTFRIPYYVGPLARGNSRFAWMTRKSEETITPWNFEEVVDKGASAQSFIERMTNFDKNLPNEKVLPKHSLLYEYFTVYNELTKVKYVTEGMRKPAFLSGEQKKAIVDLLFKTNRKVTVKQLKEDYFKKIECFDSVEISGVEDRFNASLGTYHDLLKIIKDKDFLDNEENEDILEDIVLTLTLFEDREMIEERLKTYAHLFDDKVMKQLKRRRYTGWGRLSRKLINGIRDKQSGKTILDFLKSDGFANRNFMQLIHDDSLTFKEDIQKAQVSGQGDSLHEHIANLAGSPAIKKGILQTVKVVDELVKVMGRHKPENIVIEMARENQTTQKGQKNSRERMKRIEEGIKELGSQILKEHPVENTQLQNEKLYLYYLQNGRDMYVDQELDINRLSDYDVDHIVPQSFLKDDSIDNKVLTRSDKARGKSDNVPSEEVVKKMKNYWRQLLNAKLITQRKFDNLTKAERGGLSELDKAGFIKRQLVETRQITKHVAQILDSRMNTKYDENDKLIREVKVITLKSKLVSDFRKDFQFYKVREINNYHHAHDAYLNAVVGTALIKKYPKLESEFVYGDYKVYDVRKMIAKSEQEIGKATAKYFFYSNIMNFFKTEITLANGEIRKRPLIETNGETGEIVWDKGRDFATVRKVLSMPQVNIVKKTEVQTGGFSKESILPKRNSDKLIARKKDWDPKKYGGFDSPTVAYSVLVVAKVEKGKSKKLKSVKELLGITIMERSSFEKNPIDFLEAKGYKEVKKDLIIKLPKYSLFELENGRKRMLASAGELQKGNELALPSKYVNFLYLASHYEKLKGSPEDNEQKQLFVEQHKHYLDEIIEQISEFSKRVILADANLDKVLSAYNKHRDKPIREQAENIIHLFTLTNLGAPAAFKYFDTTIDRKRYTSTKEVLDATLIHQSITGLYETRIDLSQLGGDGGEAAAKGGGGGSGGTLGDQGSRGSDPLPEPRVTLTVEGIPTEFLVNTGAEHSVLTKPMGKMGSKRTVVAGATGSKVYPWTTKRLLKIGQKQVTHSFLVIPECPAPLLGRDLLTKLKAQIQFSTEGPQVTWEDRPAMCLVLNLEEEYRLHEKPVPPSIDPSWLQLFPMVWAEKAGMGLANQVPPVVVELKSDASPVAVRQYPMSKEAREGIRPHIQRFLDLGILVPCQSPWNTPLLPVKKPGTNDYRPVQDLREVNKRVQDIHPTVPNPYNLLSSLPPSHTWYSVLDLKDAFFCLKLHPNSQPLFAFEWRDPEKGNTGQLTWTRLPQGFKNSPTLFNEALHRDLASFRALNPQVVMLQYVDDLLVAAPTYRDCKEGTRRLLQELSKLGYRVSAKKAQLCREEVTYLGYLLKGGKRWLTPARKATVMKIPTPTTPRQVREFLGKAGFCRLFIPGFASLAAPLYPLTRPKVPFTWTEAHQEAFGRIKEALLSAPALALPDLTKPFALYVDEKEGVARGVLTQTLGPWRRPVAYLSKKLDPVASGWPTCLKAIAAVALLLKDADKLTLGQNVLVIAPHNLESIVRQPPDRWMTNARMTHYQSLLLNERVSFAPPAILNPATLLPVESDDTPIHICSEILAEETGTRPDLRDQPLPGVPAWYTDGSSFIMDGRRQAGAAIVDNKRTVWASNLPEGTSAQKAELIALTQALRLAEGKSINIYTDSRYAFATAHVHGAIYKQRGWLTSAGKDIKNKEEILALLEAIHLPKRVAIIHCPGHQRGTDPVATGNRKADEAAKQAAQSTRILTETTKNAGKRTADGSEFEKRTADGSEFESPKKKAKVE

SEQ ID NO: 6963 - protein, 2096 aa, synthetic construct
MPAAKRVKLDGGDKKYSIGLDIGTNSVGWAVITDEYKVPSKKFKVLGNTDRHSIKKNLIGALLFDSGETAEATRLKRTARRRYTRRKNRICYLQEIFSNEMAKVDDSFFHRLEESFLVEEDKKHERHPIFGNIVDEVAYHEKYPTIYHLRKKLVDSTDKADLRLIYLALAHMIKFRGHFLIEGDLNPDNSDVDKLFIQLVQTYNQLFEENPINASGVDAKAILSARLSKSRRLENLIAQLPGEKKNGLFGNLIALSLGLTPNFKSNFDLAEDAKLQLSKDTYDDDLDNLLAQIGDQYADLFLAAKNLSDAILLSDILRVNTEITKAPLSASMIKRYDEHHQDLTLLKALVRQQLPEKYKEIFFDQSKNGYAGYIDGGASQEEFYKFIKPILEKMDGTEELLVKLNREDLLRKQRTFDNGSIPHQIHLGELHAILRRQEDFYPFLKDNREKIEKILTFRIPYYVGPLARGNSRFAWMTRKSEETITPWNFEEVVDKGASAQSFIERMTNFDKNLPNEKVLPKHSLLYEYFTVYNELTKVKYVTEGMRKPAFLSGEQKKAIVDLLFKTNRKVTVKQLKEDYFKKIECFDSVEISGVEDRFNASLGTYHDLLKIIKDKDFLDNEENEDILEDIVLTLTLFEDREMIEERLKTYAHLFDDKVMKQLKRRRYTGWGRLSRKLINGIRDKQSGKTILDFLKSDGFANRNFMQLIHDDSLTFKEDIQKAQVSGQGDSLHEHIANLAGSPAIKKGILQTVKVVDELVKVMGRHKPENIVIEMARENQTTQKGQKNSRERMKRIEEGIKELGSQILKEHPVENTQLQNEKLYLYYLQNGRDMYVDQELDINRLSDYDVDHIVPQSFLKDDSIDNKVLTRSDKARGKSDNVPSEEVVKKMKNYWRQLLNAKLITQRKFDNLTKAERGGLSELDKAGFIKRQLVETRQITKHVAQILDSRMNTKYDENDKLIREVKVITLKSKLVSDFRKDFQFYKVREINNYHHAHDAYLNAVVGTALIKKYPKLESEFVYGDYKVYDVRKMIAKSEQEIGKATAKYFFYSNIMNFFKTEITLANGEIRKRPLIETNGETGEIVWDKGRDFATVRKVLSMPQVNIVKKTEVQTGGFSKESILPKRNSDKLIARKKDWDPKKYGGFDSPTVAYSVLVVAKVEKGKSKKLKSVKELLGITIMERSSFEKNPIDFLEAKGYKEVKKDLIIKLPKYSLFELENGRKRMLASAGELQKGNELALPSKYVNFLYLASHYEKLKGSPEDNEQKQLFVEQHKHYLDEIIEQISEFSKRVILADANLDKVLSAYNKHRDKPIREQAENIIHLFTLTNLGAPAAFKYFDTTIDRKRYTSTKEVLDATLIHQSITGLYETRIDLSQLGGDGGEAAAKGGGGGSGGTLNLEDEYRLYETSAEPEVSPGSTWLSDFPQAWAETGGMGLAVRQAPLIIPLKATSTPVSIKQYPMSQEAKLGIKPHIQRLLDQGILVPCQSPWNTPLLPVKKPGTNDYRPVQDLREVNKRVEDIHPTVPNPYNLLSGLPPSHRWYTVLDLKDAFFCLRLHPTSQPLFAFEWRDPGMGISGQLTWTRLPQGFKNSPTLFNEALHRDLADFRIQHPDLILLQYVDDILLAATSELDCQQGTRALLLTLGNLGYRASAKKAQLCQKQVKYLGYLLKEGQRWLTEARKETVMGQPTPKTPRQLREFLGKAGFCRLFIPGFAEMAAPLYPLTKPGTLFNWGPDQQKAYQEIKQALLTAPALGLPDLTKPFELFVDEKQGYAKGVLTQKLGPWRRPVAYLSKKLDPVAAGWPPCLRMVAAIAVLRKDAGKLTMGQPLVILAPHAVEALVKQPPDRWLSNARMTHYQAMLLDTDRVQFGPVVALNPATLLPLPEEGAPHDCLEILAETHGTRPDLTDQPIPDADHTWYTDGSSFLQEGQRKAGAAVTTETEVIWARALPAGTSAQRAELIALTQALKMAEGKRLNVYTDSRYAFATAHIHGEIYRRRGWLTSEGREIKNKSEILALLKALFLPKRLSIIHCLGHQKGDSAEARGNRLADQAAREAAIKTPPDTSTLLAGKRTADGSEFEKRTADGSEFESPKKKAKVE

SEQ ID NO: 6964 - protein, 2096 aa, synthetic construct
MPAAKRVKLDGGDKKYSIGLDIGTNSVGWAVITDEYKVPSKKFKVLGNTDRHSIKKNLIGALLFDSGETAEATRLKRTARRRYTRRKNRICYLQEIFSNEMAKVDDSFFHRLEESFLVEEDKKHERHPIFGNIVDEVAYHEKYPTIYHLRKKLVDSTDKADLRLIYLALAHMIKFRGHFLIEGDLNPDNSDVDKLFIQLVQTYNQLFEENPINASGVDAKAILSARLSKSRRLENLIAQLPGEKKNGLFGNLIALSLGLTPNFKSNFDLAEDAKLQLSKDTYDDDLDNLLAQIGDQYADLFLAAKNLSDAILLSDILRVNTEITKAPLSASMIKRYDEHHQDLTLLKALVRQQLPEKYKEIFFDQSKNGYAGYIDGGASQEEFYKFIKPILEKMDGTEELLVKLNREDLLRKQRTFDNGSIPHQIHLGELHAILRRQEDFYPFLKDNREKIEKILTFRIPYYVGPLARGNSRFAWMTRKSEETITPWNFEEVVDKGASAQSFIERMTNFDKNLPNEKVLPKHSLLYEYFTVYNELTKVKYVTEGMRKPAFLSGEQKKAIVDLLFKTNRKVTVKQLKEDYFKKIECFDSVEISGVEDRFNASLGTYHDLLKIIKDKDFLDNEENEDILEDIVLTLTLFEDREMIEERLKTYAHLFDDKVMKQLKRRRYTGWGRLSRKLINGIRDKQSGKTILDFLKSDGFANRNFMQLIHDDSLTFKEDIQKAQVSGQGDSLHEHIANLAGSPAIKKGILQTVKVVDELVKVMGRHKPENIVIEMARENQTTQKGQKNSRERMKRIEEGIKELGSQILKEHPVENTQLQNEKLYLYYLQNGRDMYVDQELDINRLSDYDVDHIVPQSFLKDDSIDNKVLTRSDKARGKSDNVPSEEVVKKMKNYWRQLLNAKLITQRKFDNLTKAERGGLSELDKAGFIKRQLVETRQITKHVAQILDSRMNTKYDENDKLIREVKVITLKSKLVSDFRKDFQFYKVREINNYHHAHDAYLNAVVGTALIKKYPKLESEFVYGDYKVYDVRKMIAKSEQEIGKATAKYFFYSNIMNFFKTEITLANGEIRKRPLIETNGETGEIVWDKGRDFATVRKVLSMPQVNIVKKTEVQTGGFSKESILPKRNSDKLIARKKDWDPKKYGGFDSPTVAYSVLVVAKVEKGKSKKLKSVKELLGITIMERSSFEKNPIDFLEAKGYKEVKKDLIIKLPKYSLFELENGRKRMLASAGELQKGNELALPSKYVNFLYLASHYEKLKGSPEDNEQKQLFVEQHKHYLDEIIEQISEFSKRVILADANLDKVLSAYNKHRDKPIREQAENIIHLFTLTNLGAPAAFKYFDTTIDRKRYTSTKEVLDATLIHQSITGLYETRIDLSQLGGDGGEAAAKGGGGGSGGTLGIEDEYRLHETSTEPDVSLGSTWLSDFPQAWAETGGMGLAVRQAPLIIPLKATSTPVSIQQYPMSHEARLGIKPHIQRLLDQGILVPCQSPWNTPLLPVKKPGTNDYRPVQDLREVNKRVEDIHPTVPNPYNLLSGLPPSHQWYTVLDLKDAFFCLRLHPTSQPLFAFEWRDPGMGISGQLTWTRLPQGFKNSPTLFDEALHRDLADFRIQHPDLILLQYVDDILLAATSELDCQQGTRALLQTLGDLGYRASAKKAQICQKQVKYLGYLLREGQRWLTEARKETVMGQPVPKTPRQLREFLGTAGFCRLWIPGFAEMAAPLYPLTKTGTLFSWGPDQQKAYQEIKQALLTAPALGLPDLTKPFELFVDEKQGYAKGVLTQKLGPWRRPVAYLSKKLDPVAAGWPPCLRMVAAIAVLTKDAGKLTMGQPLVILAPHAVEALVKQPPDRWLSNARMTHYQAMLLDTDRVQFGPVVALNPATLLPLPEEGAPHDCLEILAETHGTRPDLTDQPIPDADHTWYTDGSSFLQEGQRKAGAAVTTETEVIWAGALPAGTSAQRAELIALTQALKMAEGKRLNVYTDSRYAFATAHIHGEIYRRRGLLTSEGREIKNKSEILALLKALFLPKRLSIIHCLGHQKGDSAEARGNRLADQAAREAAIKTPPDTSTLLAGKRTADGSEFEKRTADGSEFESPKKKAKVE

SEQ ID NO: 6965 - protein, 2096 aa, synthetic construct
MPAAKRVKLDGGDKKYSIGLDIGTNSVGWAVITDEYKVPSKKFKVLGNTDRHSIKKNLIGALLFDSGETAEATRLKRTARRRYTRRKNRICYLQEIFSNEMAKVDDSFFHRLEESFLVEEDKKHERHPIFGNIVDEVAYHEKYPTIYHLRKKLVDSTDKADLRLIYLALAHMIKFRGHFLIEGDLNPDNSDVDKLFIQLVQTYNQLFEENPINASGVDAKAILSARLSKSRRLENLIAQLPGEKKNGLFGNLIALSLGLTPNFKSNFDLAEDAKLQLSKDTYDDDLDNLLAQIGDQYADLFLAAKNLSDAILLSDILRVNTEITKAPLSASMIKRYDEHHQDLTLLKALVRQQLPEKYKEIFFDQSKNGYAGYIDGGASQEEFYKFIKPILEKMDGTEELLVKLNREDLLRKQRTFDNGSIPHQIHLGELHAILRRQEDFYPFLKDNREKIEKILTFRIPYYVGPLARGNSRFAWMTRKSEETITPWNFEEVVDKGASAQSFIERMTNFDKNLPNEKVLPKHSLLYEYFTVYNELTKVKYVTEGMRKPAFLSGEQKKAIVDLLFKTNRKVTVKQLKEDYFKKIECFDSVEISGVEDRFNASLGTYHDLLKIIKDKDFLDNEENEDILEDIVLTLTLFEDREMIEERLKTYAHLFDDKVMKQLKRRRYTGWGRLSRKLINGIRDKQSGKTILDFLKSDGFANRNFMQLIHDDSLTFKEDIQKAQVSGQGDSLHEHIANLAGSPAIKKGILQTVKVVDELVKVMGRHKPENIVIEMARENQTTQKGQKNSRERMKRIEEGIKELGSQILKEHPVENTQLQNEKLYLYYLQNGRDMYVDQELDINRLSDYDVDHIVPQSFLKDDSIDNKVLTRSDKARGKSDNVPSEEVVKKMKNYWRQLLNAKLITQRKFDNLTKAERGGLSELDKAGFIKRQLVETRQITKHVAQILDSRMNTKYDENDKLIREVKVITLKSKLVSDFRKDFQFYKVREINNYHHAHDAYLNAVVGTALIKKYPKLESEFVYGDYKVYDVRKMIAKSEQEIGKATAKYFFYSNIMNFFKTEITLANGEIRKRPLIETNGETGEIVWDKGRDFATVRKVLSMPQVNIVKKTEVQTGGFSKESILPKRNSDKLIARKKDWDPKKYGGFDSPTVAYSVLVVAKVEKGKSKKLKSVKELLGITIMERSSFEKNPIDFLEAKGYKEVKKDLIIKLPKYSLFELENGRKRMLASAGELQKGNELALPSKYVNFLYLASHYEKLKGSPEDNEQKQLFVEQHKHYLDEIIEQISEFSKRVILADANLDKVLSAYNKHRDKPIREQAENIIHLFTLTNLGAPAAFKYFDTTIDRKRYTSTKEVLDATLIHQSITGLYETRIDLSQLGGDGGEAAAKGGGGGSGGTLNIEDEYRLHETSKGPDVPLGSTWLSDFPQAWAETGGMGLAVRQAPLIIPLKATSTPVSIKQYPMSQEARLGIKPHIQRLLDQGILVPCQSPWNTPLLPVKKPGTNDYRPVQDLREVNKRVEDIHPTVPNPYNLLSGLPPSHQWYTVLDLKDAFFCLRLHPTSQSLFAFEWRDPEMGISGQLTWTRLPQGFKNSPTLFDEALHRDLADFRIQHPDLILLQYVDDLLLAATSELDCQQGTRALLQTLGDLGYRASAKKAQICQKQVKYLGYLLKEGQRWLTEARKETVMGQPTPKTPRQLREFLGTAGFCRLWIPGFAEMAAPLYPLTKTGTLFEWGPDQQKAYQEIKQALLTAPALGLPDLTKPFELFVDEKQGYAKGVLTQKLGPWRRPVAYLSKKLDPVAAGWPPCLRMVAAIAVLTKDAGKLTMGQPLVILAPHAVEALVKQPPDRWLSNARMTHYQALLLDTDRVQFGPIVALNPATLLPLPEEGLQHDCLDILAEAHGTRPDLTDQPLPDADHTWYTDGSSFLQEGQRKAGAAVTTETEVVWAKALPAGTSAQRAELIALTQALKMAEGKKLNVYTDSRYAFATAHIHGEIYRRRGLLTSEGKEIKNKDEILALLKALFLPKRLSIIHCPGHQKGNRAEARGNRMADQAAREVATRETPETSTLLAGKRTADGSEFEKRTADGSEFESPKKKAKVE

SEQ ID NO: 6966 - protein, 2087 aa, synthetic construct
MPAAKRVKLDGGDKKYSIGLDIGTNSVGWAVITDEYKVPSKKFKVLGNTDRHSIKKNLIGALLFDSGETAEATRLKRTARRRYTRRKNRICYLQEIFSNEMAKVDDSFFHRLEESFLVEEDKKHERHPIFGNIVDEVAYHEKYPTIYHLRKKLVDSTDKADLRLIYLALAHMIKFRGHFLIEGDLNPDNSDVDKLFIQLVQTYNQLFEENPINASGVDAKAILSARLSKSRRLENLIAQLPGEKKNGLFGNLIALSLGLTPNFKSNFDLAEDAKLQLSKDTYDDDLDNLLAQIGDQYADLFLAAKNLSDAILLSDILRVNTEITKAPLSASMIKRYDEHHQDLTLLKALVRQQLPEKYKEIFFDQSKNGYAGYIDGGASQEEFYKFIKPILEKMDGTEELLVKLNREDLLRKQRTFDNGSIPHQIHLGELHAILRRQEDFYPFLKDNREKIEKILTFRIPYYVGPLARGNSRFAWMTRKSEETITPWNFEEVVDKGASAQSFIERMTNFDKNLPNEKVLPKHSLLYEYFTVYNELTKVKYVTEGMRKPAFLSGEQKKAIVDLLFKTNRKVTVKQLKEDYFKKIECFDSVEISGVEDRFNASLGTYHDLLKIIKDKDFLDNEENEDILEDIVLTLTLFEDREMIEERLKTYAHLFDDKVMKQLKRRRYTGWGRLSRKLINGIRDKQSGKTILDFLKSDGFANRNFMQLIHDDSLTFKEDIQKAQVSGQGDSLHEHIANLAGSPAIKKGILQTVKVVDELVKVMGRHKPENIVIEMARENQTTQKGQKNSRERMKRIEEGIKELGSQILKEHPVENTQLQNEKLYLYYLQNGRDMYVDQELDINRLSDYDVDHIVPQSFLKDDSIDNKVLTRSDKARGKSDNVPSEEVVKKMKNYWRQLLNAKLITQRKFDNLTKAERGGLSELDKAGFIKRQLVETRQITKHVAQILDSRMNTKYDENDKLIREVKVITLKSKLVSDFRKDFQFYKVREINNYHHAHDAYLNAVVGTALIKKYPKLESEFVYGDYKVYDVRKMIAKSEQEIGKATAKYFFYSNIMNFFKTEITLANGEIRKRPLIETNGETGEIVWDKGRDFATVRKVLSMPQVNIVKKTEVQTGGFSKESILPKRNSDKLIARKKDWDPKKYGGFDSPTVAYSVLVVAKVEKGKSKKLKSVKELLGITIMERSSFEKNPIDFLEAKGYKEVKKDLIIKLPKYSLFELENGRKRMLASAGELQKGNELALPSKYVNFLYLASHYEKLKGSPEDNEQKQLFVEQHKHYLDEIIEQISEFSKRVILADANLDKVLSAYNKHRDKPIREQAENIIHLFTLTNLGAPAAFKYFDTTIDRKRYTSTKEVLDATLIHQSITGLYETRIDLSQLGGDGGEAAAKGGGGGSGGIPWLMKKPLQLTTLVPLQEYEERLLKQTMLTGSYKEKLQSLFLKYDALWQHWENQVGHRRIKPHHIATGTVNPRPQKQYPINPKAKASIQTVINDLLKQGVLIQQNSIMNTPVYPVPKPDGKWRMVLDYREVNKTIPLIAAQNQHSAGILSSIFRGKYKTTLDLSNGFWAHSITPESYWLTAFTWLGQQYCWTRLPQGFLNSPALFNADVVDLLKEVPNVQVYVDDIYISHDDPREHLEQLEKVFSLLLNAGYVVSLKKSEIAQHEVEFLGFNITKEGRGLTETFKQKLLNITPPRDLKQLQSILGLLNFARNFIPNFSELVKPLYNIIATAPGKYITWTTDNSQQLQNIISMLNSAENLEERNPEVRLIMKVNTSPSAGYIRFYNEFAKRPIMYLNYVYTKAEVKFTNTEKLLTTIHKGLIKALDLGMGQEILVYSPIVSMTKIQKTPLPERKALPIRWITWMSYLEDPRIQFHYDKTLPELQQVPTVTDDIIAKIKHPSEFSMVFYTDGSAIKHPNVNKSHNAGMGIAQVQFKPEFTVINTWSIPLGDHTAQLAEVAAVEFACKKALKIDGPVLIVTDSFYVAESVNKELPYWQSNGFFNNKKKPLKHVSKWKSIADCIQLKPDIIIIHEKGHQPTASTFHTEGNNLADKLATQGSYVVNAGKRTADGSEFEKRTADGSEFESPKKKAKVE

SEQ ID NO: 6967 - protein, 2087 aa, synthetic construct
MPAAKRVKLDGGDKKYSIGLDIGTNSVGWAVITDEYKVPSKKFKVLGNTDRHSIKKNLIGALLFDSGETAEATRLKRTARRRYTRRKNRICYLQEIFSNEMAKVDDSFFHRLEESFLVEEDKKHERHPIFGNIVDEVAYHEKYPTIYHLRKKLVDSTDKADLRLIYLALAHMIKFRGHFLIEGDLNPDNSDVDKLFIQLVQTYNQLFEENPINASGVDAKAILSARLSKSRRLENLIAQLPGEKKNGLFGNLIALSLGLTPNFKSNFDLAEDAKLQLSKDTYDDDLDNLLAQIGDQYADLFLAAKNLSDAILLSDILRVNTEITKAPLSASMIKRYDEHHQDLTLLKALVRQQLPEKYKEIFFDQSKNGYAGYIDGGASQEEFYKFIKPILEKMDGTEELLVKLNREDLLRKQRTFDNGSIPHQIHLGELHAILRRQEDFYPFLKDNREKIEKILTFRIPYYVGPLARGNSRFAWMTRKSEETITPWNFEEVVDKGASAQSFIERMTNFDKNLPNEKVLPKHSLLYEYFTVYNELTKVKYVTEGMRKPAFLSGEQKKAIVDLLFKTNRKVTVKQLKEDYFKKIECFDSVEISGVEDRFNASLGTYHDLLKIIKDKDFLDNEENEDILEDIVLTLTLFEDREMIEERLKTYAHLFDDKVMKQLKRRRYTGWGRLSRKLINGIRDKQSGKTILDFLKSDGFANRNFMQLIHDDSLTFKEDIQKAQVSGQGDSLHEHIANLAGSPAIKKGILQTVKVVDELVKVMGRHKPENIVIEMARENQTTQKGQKNSRERMKRIEEGIKELGSQILKEHPVENTQLQNEKLYLYYLQNGRDMYVDQELDINRLSDYDVDHIVPQSFLKDDSIDNKVLTRSDKARGKSDNVPSEEVVKKMKNYWRQLLNAKLITQRKFDNLTKAERGGLSELDKAGFIKRQLVETRQITKHVAQILDSRMNTKYDENDKLIREVKVITLKSKLVSDFRKDFQFYKVREINNYHHAHDAYLNAVVGTALIKKYPKLESEFVYGDYKVYDVRKMIAKSEQEIGKATAKYFFYSNIMNFFKTEITLANGEIRKRPLIETNGETGEIVWDKGRDFATVRKVLSMPQVNIVKKTEVQTGGFSKESILPKRNSDKLIARKKDWDPKKYGGFDSPTVAYSVLVVAKVEKGKSKKLKSVKELLGITIMERSSFEKNPIDFLEAKGYKEVKKDLIIKLPKYSLFELENGRKRMLASAGELQKGNELALPSKYVNFLYLASHYEKLKGSPEDNEQKQLFVEQHKHYLDEIIEQISEFSKRVILADANLDKVLSAYNKHRDKPIREQAENIIHLFTLTNLGAPAAFKYFDTTIDRKRYTSTKEVLDATLIHQSITGLYETRIDLSQLGGDGGEAAAKGGGGGSGGIPWLMKKPLQLTTLVPLQEYEERLLKQTMLTGSYKEKLQSLFLKYDALWQHWENQVGHRRIKPHHIATGTVNPRPQKQYPINPKAKASIQTVINDLLKQGVLIQQNSIMNTPVYPVPKPDGKWRMVLDYREVNKTIPLIAAQNQHSAGILSSIFRGKYKTTLDLSNGFWAHSITPESYWLTAFTWLGQQYCWTRLPQGFLNSPALFNADVVDLLKEVPNVQVYVDDIYISHDDPREHLEQLEKVFSLLLNAGYVVSLKKSEIAQHEVEFLGFNITKEGRGLTETFKQKLLNITPPRDLKQLQSILGKLNFARNFIPNFSELVKPLYNIIATAPGKYITWTTDNSQQLQNIISMLNSAENLEERNPEVRLIMKVNTSPSAGYIRFYNEFAKRPIMYLNYVYTKAEVKFTNTEKLLTTIHKGLIKALDLGMGQEILVYSPIVSMTKIQKTPLPERKALPIRWITWMSYLEDPRIQFHYDKTLPELQQVPTVTDDIIAKIKHPSEFSMVFYTDGSAIKHPNVNKSHNAGMGIAQVQFKPEFTVINTWSIPLGDHTAQLAEVAAVEFACKKALKIDGPVLIVTDSFYVAESVNKELPYWQSNGFFNNKKKPLKHVSKWKSIADCIQLKPDIIIIHEKGHQPTASTFHTEGNNLADKLATQGSYVVNAGKRTADGSEFEKRTADGSEFESPKKKAKVE

SEQ ID NO: 6968 - protein, 2094 aa, synthetic construct
MPAAKRVKLDGGDKKYSIGLDIGTNSVGWAVITDEYKVPSKKFKVLGNTDRHSIKKNLIGALLFDSGETAEATRLKRTARRRYTRRKNRICYLQEIFSNEMAKVDDSFFHRLEESFLVEEDKKHERHPIFGNIVDEVAYHEKYPTIYHLRKKLVDSTDKADLRLIYLALAHMIKFRGHFLIEGDLNPDNSDVDKLFIQLVQTYNQLFEENPINASGVDAKAILSARLSKSRRLENLIAQLPGEKKNGLFGNLIALSLGLTPNFKSNFDLAEDAKLQLSKDTYDDDLDNLLAQIGDQYADLFLAAKNLSDAILLSDILRVNTEITKAPLSASMIKRYDEHHQDLTLLKALVRQQLPEKYKEIFFDQSKNGYAGYIDGGASQEEFYKFIKPILEKMDGTEELLVKLNREDLLRKQRTFDNGSIPHQIHLGELHAILRRQEDFYPFLKDNREKIEKILTFRIPYYVGPLARGNSRFAWMTRKSEETITPWNFEEVVDKGASAQSFIERMTNFDKNLPNEKVLPKHSLLYEYFTVYNELTKVKYVTEGMRKPAFLSGEQKKAIVDLLFKTNRKVTVKQLKEDYFKKIECFDSVEISGVEDRFNASLGTYHDLLKIIKDKDFLDNEENEDILEDIVLTLTLFEDREMIEERLKTYAHLFDDKVMKQLKRRRYTGWGRLSRKLINGIRDKQSGKTILDFLKSDGFANRNFMQLIHDDSLTFKEDIQKAQVSGQGDSLHEHIANLAGSPAIKKGILQTVKVVDELVKVMGRHKPENIVIEMARENQTTQKGQKNSRERMKRIEEGIKELGSQILKEHPVENTQLQNEKLYLYYLQNGRDMYVDQELDINRLSDYDVDHIVPQSFLKDDSIDNKVLTRSDKARGKSDNVPSEEVVKKMKNYWRQLLNAKLITQRKFDNLTKAERGGLSELDKAGFIKRQLVETRQITKHVAQILDSRMNTKYDENDKLIREVKVITLKSKLVSDFRKDFQFYKVREINNYHHAHDAYLNAVVGTALIKKYPKLESEFVYGDYKVYDVRKMIAKSEQEIGKATAKYFFYSNIMNFFKTEITLANGEIRKRPLIETNGETGEIVWDKGRDFATVRKVLSMPQVNIVKKTEVQTGGFSKESILPKRNSDKLIARKKDWDPKKYGGFDSPTVAYSVLVVAKVEKGKSKKLKSVKELLGITIMERSSFEKNPIDFLEAKGYKEVKKDLIIKLPKYSLFELENGRKRMLASAGELQKGNELALPSKYVNFLYLASHYEKLKGSPEDNEQKQLFVEQHKHYLDEIIEQISEFSKRVILADANLDKVLSAYNKHRDKPIREQAENIIHLFTLTNLGAPAAFKYFDTTIDRKRYTSTKEVLDATLIHQSITGLYETRIDLSQLGGDGGEAAAKGGGGGSGGVLNLEEEYRLHEKPVPSSIDPSWLQLFPTVWAERAGMGLANQVPPVVVELRSGASPVAVRQYPMSKEAREGIRPHIQRFLDLGVLVPCQSPWNTPLLPVKKPGTNDYRPVQDLREINKRVQDIHPTVPNPYNLLSSLPPSHTWYSVLDLKDAFFCLKLHPNSQPLFAFEWRDPEKGNTGQLTWTRLPQGFKNSPTLFNEALHRDLAPFRALNPQVVLLQYVDDLLVAAPTYRDCKEGTQKLLQELSKLGYRVSAKKAQLCQKEVTYLGYLLKEGKRWLTPARKATVMKIPPPTTPRQVREFLGKAGFCRLFIPGFASLAAPLYPLTKPSIPFIWTEEHQKAFDRIKEALLSAPALALPDLTKPFTLYVDERAGVARGVLTQTLGPWRRPVAYLSKKLDPVASGWPTCLKAVAAVALLLKDADKLTLGQNVTVIASHSLESIVRQPPDRWMTNARMTHYQSLLLNERVSFAPPAVLNPATLLPVESEATPVHRCSEILAEETGTRRDLKDQPLPGVPAWYTDGSSFIAEGKRRAGAAIVDGKRTVWASSLPEGTSAQKAELVALTQALRLAEGKDINIYTDSRYAFATAHIHGAIYKQRGWLTSAGKDIKNKEEILALLEAIHLPKRVAIIHCPGHQKGNDPVATGNRRADEAAKQAALSTRVLAETTKPAGKRTADGSEFEKRTADGSEFESPKKKAKVE

SEQ ID NO: 6969 - protein, 2096 aa, synthetic construct
MPAAKRVKLDGGDKKYSIGLDIGTNSVGWAVITDEYKVPSKKFKVLGNTDRHSIKKNLIGALLFDSGETAEATRLKRTARRRYTRRKNRICYLQEIFSNEMAKVDDSFFHRLEESFLVEEDKKHERHPIFGNIVDEVAYHEKYPTIYHLRKKLVDSTDKADLRLIYLALAHMIKFRGHFLIEGDLNPDNSDVDKLFIQLVQTYNQLFEENPINASGVDAKAILSARLSKSRRLENLIAQLPGEKKNGLFGNLIALSLGLTPNFKSNFDLAEDAKLQLSKDTYDDDLDNLLAQIGDQYADLFLAAKNLSDAILLSDILRVNTEITKAPLSASMIKRYDEHHQDLTLLKALVRQQLPEKYKEIFFDQSKNGYAGYIDGGASQEEFYKFIKPILEKMDGTEELLVKLNREDLLRKQRTFDNGSIPHQIHLGELHAILRRQEDFYPFLKDNREKIEKILTFRIPYYVGPLARGNSRFAWMTRKSEETITPWNFEEVVDKGASAQSFIERMTNFDKNLPNEKVLPKHSLLYEYFTVYNELTKVKYVTEGMRKPAFLSGEQKKAIVDLLFKTNRKVTVKQLKEDYFKKIECFDSVEISGVEDRFNASLGTYHDLLKIIKDKDFLDNEENEDILEDIVLTLTLFEDREMIEERLKTYAHLFDDKVMKQLKRRRYTGWGRLSRKLINGIRDKQSGKTILDFLKSDGFANRNFMQLIHDDSLTFKEDIQKAQVSGQGDSLHEHIANLAGSPAIKKGILQTVKVVDELVKVMGRHKPENIVIEMARENQTTQKGQKNSRERMKRIEEGIKELGSQILKEHPVENTQLQNEKLYLYYLQNGRDMYVDQELDINRLSDYDVDHIVPQSFLKDDSIDNKVLTRSDKARGKSDNVPSEEVVKKMKNYWRQLLNAKLITQRKFDNLTKAERGGLSELDKAGFIKRQLVETRQITKHVAQILDSRMNTKYDENDKLIREVKVITLKSKLVSDFRKDFQFYKVREINNYHHAHDAYLNAVVGTALIKKYPKLESEFVYGDYKVYDVRKMIAKSEQEIGKATAKYFFYSNIMNFFKTEITLANGEIRKRPLIETNGETGEIVWDKGRDFATVRKVLSMPQVNIVKKTEVQTGGFSKESILPKRNSDKLIARKKDWDPKKYGGFDSPTVAYSVLVVAKVEKGKSKKLKSVKELLGITIMERSSFEKNPIDFLEAKGYKEVKKDLIIKLPKYSLFELENGRKRMLASAGELQKGNELALPSKYVNFLYLASHYEKLKGSPEDNEQKQLFVEQHKHYLDEIIEQISEFSKRVILADANLDKVLSAYNKHRDKPIREQAENIIHLFTLTNLGAPAAFKYFDTTIDRKRYTSTKEVLDATLIHQSITGLYETRIDLSQLGGDGGEAAAKGGGGGSGGTLNIEDEYRLHETSKEPDVPLGSTWLSDFPQAWAETGGMGLAVRQAPLIIPLKATSTPVSIKQYPMSQEARLGIKPHIQRLLDQGILVPCQSPWNTPLLPVKKPGTNDYRPVQDLREVNKRVEDIHPTVPNPYNLLSGLPPSHQWYTVLDLKDAFFCLRLHPTSQPLFAFEWRDPEMGISGQLTWTRLPQGFKNSPTLFNEALHRDLADFRIQHPDLILLQYVDDLLLAATSEQDCQRGTRALLQTLGNLGYRASAKKAQICQKQVKYLGYLLKEGQRWLTEARKETVMGQPTPKTPRQLREFLGTAGFCRLWIPGFAEMAAPLYPLTKPGTLFNWGPDQQKAYQEIKQALLTAPALGLPDLTKPFELFVDEKQGYAKGVLTQKLGPWRRPVAYLSKKLDPVAAGWPPCLRMVAAIAVLTKDAGKLTMGQPLVILAPHAVEALVKQPPDRWLSNARMTHYQAMLLDTDRVQFGPVVALNPATLLPLPEKEAPHDCLEILAETHGTRPDLTDQPIPDADYTWYTDGSSFLQEGQRRAGAAVTTETEVIWARALPAGTSAQRAELIALTQALKMAEGKKLNVYTDSRYAFATAHVHGEIYRRRGWLTSEGREIKNKNEILALLKALFLPKRLSIIHCPGHQKGNSAEARGNRMADQAAREAAMKAVLETSTLLAGKRTADGSEFEKRTADGSEFESPKKKAKVE

SEQ ID NO: 6970 - protein, 2096 aa, synthetic construct
MPAAKRVKLDGGDKKYSIGLDIGTNSVGWAVITDEYKVPSKKFKVLGNTDRHSIKKNLIGALLFDSGETAEATRLKRTARRRYTRRKNRICYLQEIFSNEMAKVDDSFFHRLEESFLVEEDKKHERHPIFGNIVDEVAYHEKYPTIYHLRKKLVDSTDKADLRLIYLALAHMIKFRGHFLIEGDLNPDNSDVDKLFIQLVQTYNQLFEENPINASGVDAKAILSARLSKSRRLENLIAQLPGEKKNGLFGNLIALSLGLTPNFKSNFDLAEDAKLQLSKDTYDDDLDNLLAQIGDQYADLFLAAKNLSDAILLSDILRVNTEITKAPLSASMIKRYDEHHQDLTLLKALVRQQLPEKYKEIFFDQSKNGYAGYIDGGASQEEFYKFIKPILEKMDGTEELLVKLNREDLLRKQRTFDNGSIPHQIHLGELHAILRRQEDFYPFLKDNREKIEKILTFRIPYYVGPLARGNSRFAWMTRKSEETITPWNFEEVVDKGASAQSFIERMTNFDKNLPNEKVLPKHSLLYEYFTVYNELTKVKYVTEGMRKPAFLSGEQKKAIVDLLFKTNRKVTVKQLKEDYFKKIECFDSVEISGVEDRFNASLGTYHDLLKIIKDKDFLDNEENEDILEDIVLTLTLFEDREMIEERLKTYAHLFDDKVMKQLKRRRYTGWGRLSRKLINGIRDKQSGKTILDFLKSDGFANRNFMQLIHDDSLTFKEDIQKAQVSGQGDSLHEHIANLAGSPAIKKGILQTVKVVDELVKVMGRHKPENIVIEMARENQTTQKGQKNSRERMKRIEEGIKELGSQILKEHPVENTQLQNEKLYLYYLQNGRDMYVDQELDINRLSDYDVDHIVPQSFLKDDSIDNKVLTRSDKARGKSDNVPSEEVVKKMKNYWRQLLNAKLITQRKFDNLTKAERGGLSELDKAGFIKRQLVETRQITKHVAQILDSRMNTKYDENDKLIREVKVITLKSKLVSDFRKDFQFYKVREINNYHHAHDAYLNAVVGTALIKKYPKLESEFVYGDYKVYDVRKMIAKSEQEIGKATAKYFFYSNIMNFFKTEITLANGEIRKRPLIETNGETGEIVWDKGRDFATVRKVLSMPQVNIVKKTEVQTGGFSKESILPKRNSDKLIARKKDWDPKKYGGFDSPTVAYSVLVVAKVEKGKSKKLKSVKELLGITIMERSSFEKNPIDFLEAKGYKEVKKDLIIKLPKYSLFELENGRKRMLASAGELQKGNELALPSKYVNFLYLASHYEKLKGSPEDNEQKQLFVEQHKHYLDEIIEQISEFSKRVILADANLDKVLSAYNKHRDKPIREQAENIIHLFTLTNLGAPAAFKYFDTTIDRKRYTSTKEVLDATLIHQSITGLYETRIDLSQLGGDGGGGSGGGPAPGGTAPLEEEYRLFLEAPIQNVTLLEQWKREIPKVWAEINPPGLASTQAPIHVQLLSTALPVRVRQYPITLEAKRSLRETIRKFRAAGILRPVHSPWNTPLLPVRKSGTSEYRMVQDLREVNKRVETIHPTVPNPYTLLSLLPPDRIWYSVLDLKDAFFCIPLAPESQLIFAFEWADAEEGESGQLTWTRLPQGFKNSPTLFDEALNRDLQGFRLDHPSVSLLQYVDDLLIAADTQAACLSATRDLLMTLAELGYRVSGKKAQLCQEEVTYLGFKIHKGSRSLSNSRTQAILQIPVPKTKRQVREFLGTIGYCRLWIPGFAELAQPLYAATRGGNDPLVWGEKEEEAFQSLKLALTQPPALALPSLDKPFQLFVEETSGAAKGVLTQALGPWKRPVAYLSKRLDPVAAGWPRCLRAIAAAALLTREASKLTFGQDIEITSSHNLESLLRSPPDKWLTNARITQYQVLLLDPPRVRFKQTAALNPATLLPETDDTLPIHHCLDTLDSLTSTRPDLTDQPLAQAEATLFTDGSSYIRDGKRYAGAAVVTLDSVIWAEPLPIGTSAQKAELIALTKALEWSKDKSVNIYTDSRYAFATLHVHGMIYRERGLLTAGGKAIKNAPEILALLTAVWLPKRVAVMHCKGHQKDDAPTSTGNRRADEVAREVAIRPLSTQATISAGKRTADGSEFEKRTADGSEFESPKKKAKVE

SEQ ID NO: 6971 - protein, 2096 aa, synthetic construct
MPAAKRVKLDGGDKKYSIGLDIGTNSVGWAVITDEYKVPSKKFKVLGNTDRHSIKKNLIGALLFDSGETAEATRLKRTARRRYTRRKNRICYLQEIFSNEMAKVDDSFFHRLEESFLVEEDKKHERHPIFGNIVDEVAYHEKYPTIYHLRKKLVDSTDKADLRLIYLALAHMIKFRGHFLIEGDLNPDNSDVDKLFIQLVQTYNQLFEENPINASGVDAKAILSARLSKSRRLENLIAQLPGEKKNGLFGNLIALSLGLTPNFKSNFDLAEDAKLQLSKDTYDDDLDNLLAQIGDQYADLFLAAKNLSDAILLSDILRVNTEITKAPLSASMIKRYDEHHQDLTLLKALVRQQLPEKYKEIFFDQSKNGYAGYIDGGASQEEFYKFIKPILEKMDGTEELLVKLNREDLLRKQRTFDNGSIPHQIHLGELHAILRRQEDFYPFLKDNREKIEKILTFRIPYYVGPLARGNSRFAWMTRKSEETITPWNFEEVVDKGASAQSFIERMTNFDKNLPNEKVLPKHSLLYEYFTVYNELTKVKYVTEGMRKPAFLSGEQKKAIVDLLFKTNRKVTVKQLKEDYFKKIECFDSVEISGVEDRFNASLGTYHDLLKIIKDKDFLDNEENEDILEDIVLTLTLFEDREMIEERLKTYAHLFDDKVMKQLKRRRYTGWGRLSRKLINGIRDKQSGKTILDFLKSDGFANRNFMQLIHDDSLTFKEDIQKAQVSGQGDSLHEHIANLAGSPAIKKGILQTVKVVDELVKVMGRHKPENIVIEMARENQTTQKGQKNSRERMKRIEEGIKELGSQILKEHPVENTQLQNEKLYLYYLQNGRDMYVDQELDINRLSDYDVDHIVPQSFLKDDSIDNKVLTRSDKARGKSDNVPSEEVVKKMKNYWRQLLNAKLITQRKFDNLTKAERGGLSELDKAGFIKRQLVETRQITKHVAQILDSRMNTKYDENDKLIREVKVITLKSKLVSDFRKDFQFYKVREINNYHHAHDAYLNAVVGTALIKKYPKLESEFVYGDYKVYDVRKMIAKSEQEIGKATAKYFFYSNIMNFFKTEITLANGEIRKRPLIETNGETGEIVWDKGRDFATVRKVLSMPQVNIVKKTEVQTGGFSKESILPKRNSDKLIARKKDWDPKKYGGFDSPTVAYSVLVVAKVEKGKSKKLKSVKELLGITIMERSSFEKNPIDFLEAKGYKEVKKDLIIKLPKYSLFELENGRKRMLASAGELQKGNELALPSKYVNFLYLASHYEKLKGSPEDNEQKQLFVEQHKHYLDEIIEQISEFSKRVILADANLDKVLSAYNKHRDKPIREQAENIIHLFTLTNLGAPAAFKYFDTTIDRKRYTSTKEVLDATLIHQSITGLYETRIDLSQLGGDGGGGSGGGPAPGGTAPLEEEYRLFLEAPIQNVTLLEQWKREIPKVWAEINPPGLASTQAPIHVQLLSTALPVRVRQYPITLEAKRSLRETIRKFRAAGILRPVHSPWNTPLLPVRKSGTSEYRMVQDLREVNKRVETIHPTVPNPYTLLSLLPPDRIWYSVLDLKDAFFCIPLAPESQLIFAFEWADAEEGESGQLTWTRLPQGFKNSPTLFNEALNRDLQGFRLDHPSVSLLQYVDDLLIAADTQAACLSATRDLLMTLAELGYRVSGKKAQLCQEEVTYLGFKIHKGSRSLSNSRTQAILQIPVPKTKRQVREFLGTIGYCRLWIPGFAELAQPLYAATRPGNDPLVWGEKEEEAFQSLKLALTQPPALALPSLDKPFQLFVEETSGAAKGVLTQALGPWKRPVAYLSKRLDPVAAGWPRCLRAIAAAALLTREASKLTFGQDIEITSSHNLESLLRSPPDKWLTNARITQYQVLLLDPPRVRFKQTAALNPATLLPETDDTLPIHHCLDTLDSLTSTRPDLTDQPLAQAEATLFTDGSSYIRDGKRYAGAAVVTLDSVIWAEPLPIGTSAQKAELIALTKALEWSKDKSVNIYTDSRYAFATLHVHGMIYRERGWLTAGGKAIKNAPEILALLTAVWLPKRVAVMHCKGHQKDDAPTSTGNRRADEVAREVAIRPLSTQATISAGKRTADGSEFEKRTADGSEFESPKKKAKVE

SEQ ID NO: 6972 - protein, 2096 aa, synthetic construct
MPAAKRVKLDGGDKKYSIGLDIGTNSVGWAVITDEYKVPSKKFKVLGNTDRHSIKKNLIGALLFDSGETAEATRLKRTARRRYTRRKNRICYLQEIFSNEMAKVDDSFFHRLEESFLVEEDKKHERHPIFGNIVDEVAYHEKYPTIYHLRKKLVDSTDKADLRLIYLALAHMIKFRGHFLIEGDLNPDNSDVDKLFIQLVQTYNQLFEENPINASGVDAKAILSARLSKSRRLENLIAQLPGEKKNGLFGNLIALSLGLTPNFKSNFDLAEDAKLQLSKDTYDDDLDNLLAQIGDQYADLFLAAKNLSDAILLSDILRVNTEITKAPLSASMIKRYDEHHQDLTLLKALVRQQLPEKYKEIFFDQSKNGYAGYIDGGASQEEFYKFIKPILEKMDGTEELLVKLNREDLLRKQRTFDNGSIPHQIHLGELHAILRRQEDFYPFLKDNREKIEKILTFRIPYYVGPLARGNSRFAWMTRKSEETITPWNFEEVVDKGASAQSFIERMTNFDKNLPNEKVLPKHSLLYEYFTVYNELTKVKYVTEGMRKPAFLSGEQKKAIVDLLFKTNRKVTVKQLKEDYFKKIECFDSVEISGVEDRFNASLGTYHDLLKIIKDKDFLDNEENEDILEDIVLTLTLFEDREMIEERLKTYAHLFDDKVMKQLKRRRYTGWGRLSRKLINGIRDKQSGKTILDFLKSDGFANRNFMQLIHDDSLTFKEDIQKAQVSGQGDSLHEHIANLAGSPAIKKGILQTVKVVDELVKVMGRHKPENIVIEMARENQTTQKGQKNSRERMKRIEEGIKELGSQILKEHPVENTQLQNEKLYLYYLQNGRDMYVDQELDINRLSDYDVDHIVPQSFLKDDSIDNKVLTRSDKARGKSDNVPSEEVVKKMKNYWRQLLNAKLITQRKFDNLTKAERGGLSELDKAGFIKRQLVETRQITKHVAQILDSRMNTKYDENDKLIREVKVITLKSKLVSDFRKDFQFYKVREINNYHHAHDAYLNAVVGTALIKKYPKLESEFVYGDYKVYDVRKMIAKSEQEIGKATAKYFFYSNIMNFFKTEITLANGEIRKRPLIETNGETGEIVWDKGRDFATVRKVLSMPQVNIVKKTEVQTGGFSKESILPKRNSDKLIARKKDWDPKKYGGFDSPTVAYSVLVVAKVEKGKSKKLKSVKELLGITIMERSSFEKNPIDFLEAKGYKEVKKDLIIKLPKYSLFELENGRKRMLASAGELQKGNELALPSKYVNFLYLASHYEKLKGSPEDNEQKQLFVEQHKHYLDEIIEQISEFSKRVILADANLDKVLSAYNKHRDKPIREQAENIIHLFTLTNLGAPAAFKYFDTTIDRKRYTSTKEVLDATLIHQSITGLYETRIDLSQLGGDGGGGSGGGPAPGGTAPLEEEYRLFLEAPIQNVTLLEQWKREIPKVWAEINPPGLASTQAPIHVQLLSTALPVRVRQYPITLEAKRSLRETIRKFRAAGILRPVHSPWNTPLLPVRKSGTSEYRMVQDLREVNKRVETIHPTVPNPYTLLSLLPPDRIWYSVLDLKDAFFCIPLAPESQLIFAFEWADAEEGESGQLTWTRLPQGFKNSPTLFNEALNRDLQGFRLDHPSVSLLQYVDDLLIAADTQAACLSATRDLLMTLAELGYRVSGKKAQLCQEEVTYLGFKIHKGSRSLSNSRTQAILQIPVPKTKRQVREFLGKIGYCRLFIPGFAELAQPLYAATRPGNDPLVWGEKEEEAFQSLKLALTQPPALALPSLDKPFQLFVEETSGAAKGVLTQALGPWKRPVAYLSKRLDPVAAGWPRCLRAIAAAALLTREASKLTFGQDIEITSSHNLESLLRSPPDKWLTNARITQYQVLLLDPPRVRFKQTAALNPATLLPETDDTLPIHHCLDTLDSLTSTRPDLTDQPLAQAEATLFTDGSSYIRDGKRYAGAAVVTLDSVIWAEPLPIGTSAQKAELIALTKALEWSKDKSVNIYTDSRYAFATLHVHGMIYRERGWLTAGGKAIKNAPEILALLTAVWLPKRVAVMHCKGHQKDDAPTSTGNRRADEVAREVAIRPLSTQATISAGKRTADGSEFEKRTADGSEFESPKKKAKVE

SEQ ID NO: 6973 - protein, 2100 aa, synthetic construct
MPAAKRVKLDGGDKKYSIGLDIGTNSVGWAVITDEYKVPSKKFKVLGNTDRHSIKKNLIGALLFDSGETAEATRLKRTARRRYTRRKNRICYLQEIFSNEMAKVDDSFFHRLEESFLVEEDKKHERHPIFGNIVDEVAYHEKYPTIYHLRKKLVDSTDKADLRLIYLALAHMIKFRGHFLIEGDLNPDNSDVDKLFIQLVQTYNQLFEENPINASGVDAKAILSARLSKSRRLENLIAQLPGEKKNGLFGNLIALSLGLTPNFKSNFDLAEDAKLQLSKDTYDDDLDNLLAQIGDQYADLFLAAKNLSDAILLSDILRVNTEITKAPLSASMIKRYDEHHQDLTLLKALVRQQLPEKYKEIFFDQSKNGYAGYIDGGASQEEFYKFIKPILEKMDGTEELLVKLNREDLLRKQRTFDNGSIPHQIHLGELHAILRRQEDFYPFLKDNREKIEKILTFRIPYYVGPLARGNSRFAWMTRKSEETITPWNFEEVVDKGASAQSFIERMTNFDKNLPNEKVLPKHSLLYEYFTVYNELTKVKYVTEGMRKPAFLSGEQKKAIVDLLFKTNRKVTVKQLKEDYFKKIECFDSVEISGVEDRFNASLGTYHDLLKIIKDKDFLDNEENEDILEDIVLTLTLFEDREMIEERLKTYAHLFDDKVMKQLKRRRYTGWGRLSRKLINGIRDKQSGKTILDFLKSDGFANRNFMQLIHDDSLTFKEDIQKAQVSGQGDSLHEHIANLAGSPAIKKGILQTVKVVDELVKVMGRHKPENIVIEMARENQTTQKGQKNSRERMKRIEEGIKELGSQILKEHPVENTQLQNEKLYLYYLQNGRDMYVDQELDINRLSDYDVDHIVPQSFLKDDSIDNKVLTRSDKARGKSDNVPSEEVVKKMKNYWRQLLNAKLITQRKFDNLTKAERGGLSELDKAGFIKRQLVETRQITKHVAQILDSRMNTKYDENDKLIREVKVITLKSKLVSDFRKDFQFYKVREINNYHHAHDAYLNAVVGTALIKKYPKLESEFVYGDYKVYDVRKMIAKSEQEIGKATAKYFFYSNIMNFFKTEITLANGEIRKRPLIETNGETGEIVWDKGRDFATVRKVLSMPQVNIVKKTEVQTGGFSKESILPKRNSDKLIARKKDWDPKKYGGFDSPTVAYSVLVVAKVEKGKSKKLKSVKELLGITIMERSSFEKNPIDFLEAKGYKEVKKDLIIKLPKYSLFELENGRKRMLASAGELQKGNELALPSKYVNFLYLASHYEKLKGSPEDNEQKQLFVEQHKHYLDEIIEQISEFSKRVILADANLDKVLSAYNKHRDKPIREQAENIIHLFTLTNLGAPAAFKYFDTTIDRKRYTSTKEVLDATLIHQSITGLYETRIDLSQLGGDGGGGSGGGPAPGGTVSLQDEHRLFDIPVTTSLPDVWLQDFPQAWAETGGLGRAKCQAPIIIDLKPTAVPVSIKQYPMSLEAHMGIRQHIIKFLELGVLRPCRSPWNTPLLPVKKPGTQDYRPVQDLREINKRTVDIHPTVPNPYNLLSTLKPDYSWYTVLDLKDAFFCLPLAPQSQELFAFEWKDPERGISGQLTWTRLPQGFKNSPTLFNEALHRDLTDFRTQHPEVTLLQYVDDLLLAAPTKKACTQGTRHLLQELGEKGYRASAKKAQICQTKVTYLGYILSEGKRWLTPGRIETVARIPPPRNPREVREFLGTAGFCRLWIPGFAELAAPLYALTKPSTPFTWQTEHQLAFEALKKALLSAPALGLPDTSKPFTLFLDERQGIAKGVLTQKLGPWKRPVAYLSKKLDPVAAGWPPCLRIMAATAMLVKDSAKLTLGQPLTVITPHTLEAIVRQPPDRWITNARLTHYQALLLDTDRVQFGPPVTLNPATLLPVPENQPSPHDCRQVLAETHGTREDLKDQELPDADHTWYTDGSSYLDSGTRRAGAAVVDGHNTIWAQSLPPGTSAQKAELIALTKALELSKGKKANIYTDSRYAFATAHTHGSIYERRGWLTSEGKEIKNKAEIIALLKALFLPQEVAIIHCPGHQKGQDPVAVGNRQADRVARQAAMAEVLTLATEPDNTSHITAGKRTADGSEFEKRTADGSEFESPKKKAKVE

SEQ ID NO: 6974 - protein, 2092 aa, synthetic construct
MPAAKRVKLDGGDKKYSIGLDIGTNSVGWAVITDEYKVPSKKFKVLGNTDRHSIKKNLIGALLFDSGETAEATRLKRTARRRYTRRKNRICYLQEIFSNEMAKVDDSFFHRLEESFLVEEDKKHERHPIFGNIVDEVAYHEKYPTIYHLRKKLVDSTDKADLRLIYLALAHMIKFRGHFLIEGDLNPDNSDVDKLFIQLVQTYNQLFEENPINASGVDAKAILSARLSKSRRLENLIAQLPGEKKNGLFGNLIALSLGLTPNFKSNFDLAEDAKLQLSKDTYDDDLDNLLAQIGDQYADLFLAAKNLSDAILLSDILRVNTEITKAPLSASMIKRYDEHHQDLTLLKALVRQQLPEKYKEIFFDQSKNGYAGYIDGGASQEEFYKFIKPILEKMDGTEELLVKLNREDLLRKQRTFDNGSIPHQIHLGELHAILRRQEDFYPFLKDNREKIEKILTFRIPYYVGPLARGNSRFAWMTRKSEETITPWNFEEVVDKGASAQSFIERMTNFDKNLPNEKVLPKHSLLYEYFTVYNELTKVKYVTEGMRKPAFLSGEQKKAIVDLLFKTNRKVTVKQLKEDYFKKIECFDSVEISGVEDRFNASLGTYHDLLKIIKDKDFLDNEENEDILEDIVLTLTLFEDREMIEERLKTYAHLFDDKVMKQLKRRRYTGWGRLSRKLINGIRDKQSGKTILDFLKSDGFANRNFMQLIHDDSLTFKEDIQKAQVSGQGDSLHEHIANLAGSPAIKKGILQTVKVVDELVKVMGRHKPENIVIEMARENQTTQKGQKNSRERMKRIEEGIKELGSQILKEHPVENTQLQNEKLYLYYLQNGRDMYVDQELDINRLSDYDVDHIVPQSFLKDDSIDNKVLTRSDKARGKSDNVPSEEVVKKMKNYWRQLLNAKLITQRKFDNLTKAERGGLSELDKAGFIKRQLVETRQITKHVAQILDSRMNTKYDENDKLIREVKVITLKSKLVSDFRKDFQFYKVREINNYHHAHDAYLNAVVGTALIKKYPKLESEFVYGDYKVYDVRKMIAKSEQEIGKATAKYFFYSNIMNFFKTEITLANGEIRKRPLIETNGETGEIVWDKGRDFATVRKVLSMPQVNIVKKTEVQTGGFSKESILPKRNSDKLIARKKDWDPKKYGGFDSPTVAYSVLVVAKVEKGKSKKLKSVKELLGITIMERSSFEKNPIDFLEAKGYKEVKKDLIIKLPKYSLFELENGRKRMLASAGELQKGNELALPSKYVNFLYLASHYEKLKGSPEDNEQKQLFVEQHKHYLDEIIEQISEFSKRVILADANLDKVLSAYNKHRDKPIREQAENIIHLFTLTNLGAPAAFKYFDTTIDRKRYTSTKEVLDATLIHQSITGLYETRIDLSQLGGDGGGGSGGGPAPGGVLNLEEEYRLHEKPVPSSIDPSWLQLFPTVWAERAGMGLANQVPPVVVELRSGASPVAVRQYPMSKEAREGIRPHIQKFLDLGVLVPCRSPWNTPLLPVKKPGTNDYRPVQDLREINKRVQDIHPTVPNPYNLLSSLPPSYTWYSVLDLKDAFFCLRLHPNSQPLFAFEWKDPEKGNTGQLTWTRLPQGFKNSPTLFNEALHRDLAPFRALNPQVVLLQYVDDLLVAAPTYEDCKKGTQKLLQELSKLGYRVSAKKAQLCQREVTYLGYLLKEGKRWLTPARKATVMKIPVPTTPRQVREFLGTAGFCRLWIPGFASLAAPLYPLTKPSIPFIWTEEHQQAFDHIKKALLSAPALALPDLTKPFTLYIDERAGVARGVLTQTLGPWRRPVAYLSKKLDPVASGWPTCLKAVAAVALLLKDADKLTLGQNVTVIASHSLESIVRQPPDRWMTNARMTHYQSLLLNERVSFAPPAVLNPATLLPVESEATPVHRCSEILAEETGTRRDLEDQPLPGVPTWYTDGSSFITEGKRRAGAPIVDGKRTVWASSLPEGTSAQKAELVALTQALRLAEGKNINIYTDSRYAFATAHIHGAIYKQRGWLTSAGKDIKNKEEILALLEAIHLPRRVAIIHCPGHQRGSNPVATGNRRADEAAKQAALSTRVLAGTTKPAGKRTADGSEFEKRTADGSEFESPKKKAKVE

SEQ ID NO: 6975 - protein, 2092 aa, synthetic construct
MPAAKRVKLDGGDKKYSIGLDIGTNSVGWAVITDEYKVPSKKFKVLGNTDRHSIKKNLIGALLFDSGETAEATRLKRTARRRYTRRKNRICYLQEIFSNEMAKVDDSFFHRLEESFLVEEDKKHERHPIFGNIVDEVAYHEKYPTIYHLRKKLVDSTDKADLRLIYLALAHMIKFRGHFLIEGDLNPDNSDVDKLFIQLVQTYNQLFEENPINASGVDAKAILSARLSKSRRLENLIAQLPGEKKNGLFGNLIALSLGLTPNFKSNFDLAEDAKLQLSKDTYDDDLDNLLAQIGDQYADLFLAAKNLSDAILLSDILRVNTEITKAPLSASMIKRYDEHHQDLTLLKALVRQQLPEKYKEIFFDQSKNGYAGYIDGGASQEEFYKFIKPILEKMDGTEELLVKLNREDLLRKQRTFDNGSIPHQIHLGELHAILRRQEDFYPFLKDNREKIEKILTFRIPYYVGPLARGNSRFAWMTRKSEETITPWNFEEVVDKGASAQSFIERMTNFDKNLPNEKVLPKHSLLYEYFTVYNELTKVKYVTEGMRKPAFLSGEQKKAIVDLLFKTNRKVTVKQLKEDYFKKIECFDSVEISGVEDRFNASLGTYHDLLKIIKDKDFLDNEENEDILEDIVLTLTLFEDREMIEERLKTYAHLFDDKVMKQLKRRRYTGWGRLSRKLINGIRDKQSGKTILDFLKSDGFANRNFMQLIHDDSLTFKEDIQKAQVSGQGDSLHEHIANLAGSPAIKKGILQTVKVVDELVKVMGRHKPENIVIEMARENQTTQKGQKNSRERMKRIEEGIKELGSQILKEHPVENTQLQNEKLYLYYLQNGRDMYVDQELDINRLSDYDVDHIVPQSFLKDDSIDNKVLTRSDKARGKSDNVPSEEVVKKMKNYWRQLLNAKLITQRKFDNLTKAERGGLSELDKAGFIKRQLVETRQITKHVAQILDSRMNTKYDENDKLIREVKVITLKSKLVSDFRKDFQFYKVREINNYHHAHDAYLNAVVGTALIKKYPKLESEFVYGDYKVYDVRKMIAKSEQEIGKATAKYFFYSNIMNFFKTEITLANGEIRKRPLIETNGETGEIVWDKGRDFATVRKVLSMPQVNIVKKTEVQTGGFSKESILPKRNSDKLIARKKDWDPKKYGGFDSPTVAYSVLVVAKVEKGKSKKLKSVKELLGITIMERSSFEKNPIDFLEAKGYKEVKKDLIIKLPKYSLFELENGRKRMLASAGELQKGNELALPSKYVNFLYLASHYEKLKGSPEDNEQKQLFVEQHKHYLDEIIEQISEFSKRVILADANLDKVLSAYNKHRDKPIREQAENIIHLFTLTNLGAPAAFKYFDTTIDRKRYTSTKEVLDATLIHQSITGLYETRIDLSQLGGDGGGGSGGGPAPGGVLNLEEEYRLHEKPVPSSIDPSWLQLFPTVWAERAGMGLANQVPPVVVELRSGASPVAVRQYPMSKEAREGIRPHIQKFLDLGVLVPCRSPWNTPLLPVKKPGTNDYRPVQDLREINKRVQDIHPTVPNPYNLLSSLPPSYTWYSVLDLKDAFFCLRLHPNSQPLFAFEWKDPEKGNTGQLTWTRLPQGFKNSPTLFNEALHRDLAPFRALNPQVVLLQYVDDLLVAAPTYEDCKKGTQKLLQELSKLGYRVSAKKAQLCQREVTYLGYLLKEGKRWLTPARKATVMKIPVPTTPRQVREFLGKAGFCRLFIPGFASLAAPLYPLTKPSIPFIWTEEHQQAFDHIKKALLSAPALALPDLTKPFTLYIDERAGVARGVLTQTLGPWRRPVAYLSKKLDPVASGWPTCLKAVAAVALLLKDADKLTLGQNVTVIASHSLESIVRQPPDRWMTNARMTHYQSLLLNERVSFAPPAVLNPATLLPVESEATPVHRCSEILAEETGTRRDLEDQPLPGVPTWYTDGSSFITEGKRRAGAPIVDGKRTVWASSLPEGTSAQKAELVALTQALRLAEGKNINIYTDSRYAFATAHIHGAIYKQRGWLTSAGKDIKNKEEILALLEAIHLPRRVAIIHCPGHQRGSNPVATGNRRADEAAKQAALSTRVLAGTTKPAGKRTADGSEFEKRTADGSEFESPKKKAKVE

SEQ ID NO: 6976 - protein, 2125 aa, synthetic construct
MPAAKRVKLDGGDKKYSIGLDIGTNSVGWAVITDEYKVPSKKFKVLGNTDRHSIKKNLIGALLFDSGETAEATRLKRTARRRYTRRKNRICYLQEIFSNEMAKVDDSFFHRLEESFLVEEDKKHERHPIFGNIVDEVAYHEKYPTIYHLRKKLVDSTDKADLRLIYLALAHMIKFRGHFLIEGDLNPDNSDVDKLFIQLVQTYNQLFEENPINASGVDAKAILSARLSKSRRLENLIAQLPGEKKNGLFGNLIALSLGLTPNFKSNFDLAEDAKLQLSKDTYDDDLDNLLAQIGDQYADLFLAAKNLSDAILLSDILRVNTEITKAPLSASMIKRYDEHHQDLTLLKALVRQQLPEKYKEIFFDQSKNGYAGYIDGGASQEEFYKFIKPILEKMDGTEELLVKLNREDLLRKQRTFDNGSIPHQIHLGELHAILRRQEDFYPFLKDNREKIEKILTFRIPYYVGPLARGNSRFAWMTRKSEETITPWNFEEVVDKGASAQSFIERMTNFDKNLPNEKVLPKHSLLYEYFTVYNELTKVKYVTEGMRKPAFLSGEQKKAIVDLLFKTNRKVTVKQLKEDYFKKIECFDSVEISGVEDRFNASLGTYHDLLKIIKDKDFLDNEENEDILEDIVLTLTLFEDREMIEERLKTYAHLFDDKVMKQLKRRRYTGWGRLSRKLINGIRDKQSGKTILDFLKSDGFANRNFMQLIHDDSLTFKEDIQKAQVSGQGDSLHEHIANLAGSPAIKKGILQTVKVVDELVKVMGRHKPENIVIEMARENQTTQKGQKNSRERMKRIEEGIKELGSQILKEHPVENTQLQNEKLYLYYLQNGRDMYVDQELDINRLSDYDVDHIVPQSFLKDDSIDNKVLTRSDKARGKSDNVPSEEVVKKMKNYWRQLLNAKLITQRKFDNLTKAERGGLSELDKAGFIKRQLVETRQITKHVAQILDSRMNTKYDENDKLIREVKVITLKSKLVSDFRKDFQFYKVREINNYHHAHDAYLNAVVGTALIKKYPKLESEFVYGDYKVYDVRKMIAKSEQEIGKATAKYFFYSNIMNFFKTEITLANGEIRKRPLIETNGETGEIVWDKGRDFATVRKVLSMPQVNIVKKTEVQTGGFSKESILPKRNSDKLIARKKDWDPKKYGGFDSPTVAYSVLVVAKVEKGKSKKLKSVKELLGITIMERSSFEKNPIDFLEAKGYKEVKKDLIIKLPKYSLFELENGRKRMLASAGELQKGNELALPSKYVNFLYLASHYEKLKGSPEDNEQKQLFVEQHKHYLDEIIEQISEFSKRVILADANLDKVLSAYNKHRDKPIREQAENIIHLFTLTNLGAPAAFKYFDTTIDRKRYTSTKEVLDATLIHQSITGLYETRIDLSQLGGDGGGGSGGGPAPGGLLGRDLLTKLKAQIQFSTEGPQVTWEDRPAMCLVLNLEEEYRLHEKPVPPSIDPSWLQLFPMVWAEKAGMGLANQVPPVVVELKSDASPVAVRQYPMSKEAREGIRPHIQRFLDLGILVPCQSPWNTPLLPVKKPGTNDYRPVQDLREVNKRVQDIHPTVPNPYNLLSSLPPSHTWYSVLDLKDAFFCLKLHPNSQPLFAFEWRDPEKGNTGQLTWTRLPQGFKNSPTLFNEALHRDLASFRALNPQVVMLQYVDDLLVAAPTYRDCKEGTRRLLQELSKLGYRVSAKKAQLCREEVTYLGYLLKGGKRWLTPARKATVMKIPTPTTPRQVREFLGTAGFCRLWIPGFASLAAPLYPLTRPKVPFTWTEAHQEAFGRIKEALLSAPALALPDLTKPFALYVDEKEGVARGVLTQTLGPWRRPVAYLSKKLDPVASGWPTCLKAIAAVALLLKDADKLTLGQNVLVIAPHNLESIVRQPPDRWMTNARMTHYQSLLLNERVSFAPPAILNPATLLPVESDDTPIHICSEILAEETGTRPDLRDQPLPGVPAWYTDGSSFIMDGRRQAGAAIVDNKRTVWASNLPEGTSAQKAELIALTQALRLAEGKSINIYTDSRYAFATAHVHGAIYKQRGWLTSAGKDIKNKEEILALLEAIHLPKRVAIIHCPGHQRGTDPVATGNRKADEAAKQAAQSTRILTETTKNAGKRTADGSEFEKRTADGSEFESPKKKAKVE

SEQ ID NO: 6977 - protein, 2125 aa, synthetic construct
MPAAKRVKLDGGDKKYSIGLDIGTNSVGWAVITDEYKVPSKKFKVLGNTDRHSIKKNLIGALLFDSGETAEATRLKRTARRRYTRRKNRICYLQEIFSNEMAKVDDSFFHRLEESFLVEEDKKHERHPIFGNIVDEVAYHEKYPTIYHLRKKLVDSTDKADLRLIYLALAHMIKFRGHFLIEGDLNPDNSDVDKLFIQLVQTYNQLFEENPINASGVDAKAILSARLSKSRRLENLIAQLPGEKKNGLFGNLIALSLGLTPNFKSNFDLAEDAKLQLSKDTYDDDLDNLLAQIGDQYADLFLAAKNLSDAILLSDILRVNTEITKAPLSASMIKRYDEHHQDLTLLKALVRQQLPEKYKEIFFDQSKNGYAGYIDGGASQEEFYKFIKPILEKMDGTEELLVKLNREDLLRKQRTFDNGSIPHQIHLGELHAILRRQEDFYPFLKDNREKIEKILTFRIPYYVGPLARGNSRFAWMTRKSEETITPWNFEEVVDKGASAQSFIERMTNFDKNLPNEKVLPKHSLLYEYFTVYNELTKVKYVTEGMRKPAFLSGEQKKAIVDLLFKTNRKVTVKQLKEDYFKKIECFDSVEISGVEDRFNASLGTYHDLLKIIKDKDFLDNEENEDILEDIVLTLTLFEDREMIEERLKTYAHLFDDKVMKQLKRRRYTGWGRLSRKLINGIRDKQSGKTILDFLKSDGFANRNFMQLIHDDSLTFKEDIQKAQVSGQGDSLHEHIANLAGSPAIKKGILQTVKVVDELVKVMGRHKPENIVIEMARENQTTQKGQKNSRERMKRIEEGIKELGSQILKEHPVENTQLQNEKLYLYYLQNGRDMYVDQELDINRLSDYDVDHIVPQSFLKDDSIDNKVLTRSDKARGKSDNVPSEEVVKKMKNYWRQLLNAKLITQRKFDNLTKAERGGLSELDKAGFIKRQLVETRQITKHVAQILDSRMNTKYDENDKLIREVKVITLKSKLVSDFRKDFQFYKVREINNYHHAHDAYLNAVVGTALIKKYPKLESEFVYGDYKVYDVRKMIAKSEQEIGKATAKYFFYSNIMNFFKTEITLANGEIRKRPLIETNGETGEIVWDKGRDFATVRKVLSMPQVNIVKKTEVQTGGFSKESILPKRNSDKLIARKKDWDPKKYGGFDSPTVAYSVLVVAKVEKGKSKKLKSVKELLGITIMERSSFEKNPIDFLEAKGYKEVKKDLIIKLPKYSLFELENGRKRMLASAGELQKGNELALPSKYVNFLYLASHYEKLKGSPEDNEQKQLFVEQHKHYLDEIIEQISEFSKRVILADANLDKVLSAYNKHRDKPIREQAENIIHLFTLTNLGAPAAFKYFDTTIDRKRYTSTKEVLDATLIHQSITGLYETRIDLSQLGGDGGGGSGGGPAPGGLLGRDLLTKLKAQIQFSTEGPQVTWEDRPAMCLVLNLEEEYRLHEKPVPPSIDPSWLQLFPMVWAEKAGMGLANQVPPVVVELKSDASPVAVRQYPMSKEAREGIRPHIQRFLDLGILVPCQSPWNTPLLPVKKPGTNDYRPVQDLREVNKRVQDIHPTVPNPYNLLSSLPPSHTWYSVLDLKDAFFCLKLHPNSQPLFAFEWRDPEKGNTGQLTWTRLPQGFKNSPTLFNEALHRDLASFRALNPQVVMLQYVDDLLVAAPTYRDCKEGTRRLLQELSKLGYRVSAKKAQLCREEVTYLGYLLKGGKRWLTPARKATVMKIPTPTTPRQVREFLGKAGFCRLFIPGFASLAAPLYPLTRPKVPFTWTEAHQEAFGRIKEALLSAPALALPDLTKPFALYVDEKEGVARGVLTQTLGPWRRPVAYLSKKLDPVASGWPTCLKAIAAVALLLKDADKLTLGQNVLVIAPHNLESIVRQPPDRWMTNARMTHYQSLLLNERVSFAPPAILNPATLLPVESDDTPIHICSEILAEETGTRPDLRDQPLPGVPAWYTDGSSFIMDGRRQAGAAIVDNKRTVWASNLPEGTSAQKAELIALTQALRLAEGKSINIYTDSRYAFATAHVHGAIYKQRGWLTSAGKDIKNKEEILALLEAIHLPKRVAIIHCPGHQRGTDPVATGNRKADEAAKQAAQSTRILTETTKNAGKRTADGSEFEKRTADGSEFESPKKKAKVE

SEQ ID NO: 6978 - protein, 2094 aa, synthetic construct
MPAAKRVKLDGGDKKYSIGLDIGTNSVGWAVITDEYKVPSKKFKVLGNTDRHSIKKNLIGALLFDSGETAEATRLKRTARRRYTRRKNRICYLQEIFSNEMAKVDDSFFHRLEESFLVEEDKKHERHPIFGNIVDEVAYHEKYPTIYHLRKKLVDSTDKADLRLIYLALAHMIKFRGHFLIEGDLNPDNSDVDKLFIQLVQTYNQLFEENPINASGVDAKAILSARLSKSRRLENLIAQLPGEKKNGLFGNLIALSLGLTPNFKSNFDLAEDAKLQLSKDTYDDDLDNLLAQIGDQYADLFLAAKNLSDAILLSDILRVNTEITKAPLSASMIKRYDEHHQDLTLLKALVRQQLPEKYKEIFFDQSKNGYAGYIDGGASQEEFYKFIKPILEKMDGTEELLVKLNREDLLRKQRTFDNGSIPHQIHLGELHAILRRQEDFYPFLKDNREKIEKILTFRIPYYVGPLARGNSRFAWMTRKSEETITPWNFEEVVDKGASAQSFIERMTNFDKNLPNEKVLPKHSLLYEYFTVYNELTKVKYVTEGMRKPAFLSGEQKKAIVDLLFKTNRKVTVKQLKEDYFKKIECFDSVEISGVEDRFNASLGTYHDLLKIIKDKDFLDNEENEDILEDIVLTLTLFEDREMIEERLKTYAHLFDDKVMKQLKRRRYTGWGRLSRKLINGIRDKQSGKTILDFLKSDGFANRNFMQLIHDDSLTFKEDIQKAQVSGQGDSLHEHIANLAGSPAIKKGILQTVKVVDELVKVMGRHKPENIVIEMARENQTTQKGQKNSRERMKRIEEGIKELGSQILKEHPVENTQLQNEKLYLYYLQNGRDMYVDQELDINRLSDYDVDHIVPQSFLKDDSIDNKVLTRSDKARGKSDNVPSEEVVKKMKNYWRQLLNAKLITQRKFDNLTKAERGGLSELDKAGFIKRQLVETRQITKHVAQILDSRMNTKYDENDKLIREVKVITLKSKLVSDFRKDFQFYKVREINNYHHAHDAYLNAVVGTALIKKYPKLESEFVYGDYKVYDVRKMIAKSEQEIGKATAKYFFYSNIMNFFKTEITLANGEIRKRPLIETNGETGEIVWDKGRDFATVRKVLSMPQVNIVKKTEVQTGGFSKESILPKRNSDKLIARKKDWDPKKYGGFDSPTVAYSVLVVAKVEKGKSKKLKSVKELLGITIMERSSFEKNPIDFLEAKGYKEVKKDLIIKLPKYSLFELENGRKRMLASAGELQKGNELALPSKYVNFLYLASHYEKLKGSPEDNEQKQLFVEQHKHYLDEIIEQISEFSKRVILADANLDKVLSAYNKHRDKPIREQAENIIHLFTLTNLGAPAAFKYFDTTIDRKRYTSTKEVLDATLIHQSITGLYETRIDLSQLGGDGGGGSGGGPAPGGTLNLEDEYRLYETSAEPEVSPGSTWLSDFPQAWAETGGMGLAVRQAPLIIPLKATSTPVSIKQYPMSQEAKLGIKPHIQRLLDQGILVPCQSPWNTPLLPVKKPGTNDYRPVQDLREVNKRVEDIHPTVPNPYNLLSGLPPSHRWYTVLDLKDAFFCLRLHPTSQPLFAFEWRDPGMGISGQLTWTRLPQGFKNSPTLFNEALHRDLADFRIQHPDLILLQYVDDILLAATSELDCQQGTRALLLTLGNLGYRASAKKAQLCQKQVKYLGYLLKEGQRWLTEARKETVMGQPTPKTPRQLREFLGTAGFCRLWIPGFAEMAAPLYPLTKPGTLFNWGPDQQKAYQEIKQALLTAPALGLPDLTKPFELFVDEKQGYAKGVLTQKLGPWRRPVAYLSKKLDPVAAGWPPCLRMVAAIAVLRKDAGKLTMGQPLVILAPHAVEALVKQPPDRWLSNARMTHYQAMLLDTDRVQFGPVVALNPATLLPLPEEGAPHDCLEILAETHGTRPDLTDQPIPDADHTWYTDGSSFLQEGQRKAGAAVTTETEVIWARALPAGTSAQRAELIALTQALKMAEGKRLNVYTDSRYAFATAHIHGEIYRRRGWLTSEGREIKNKSEILALLKALFLPKRLSIIHCLGHQKGDSAEARGNRLADQAAREAAIKTPPDTSTLLAGKRTADGSEFEKRTADGSEFESPKKKAKVE

SEQ ID NO: 6979 - protein, 2094 aa, synthetic construct
MPAAKRVKLDGGDKKYSIGLDIGTNSVGWAVITDEYKVPSKKFKVLGNTDRHSIKKNLIGALLFDSGETAEATRLKRTARRRYTRRKNRICYLQEIFSNEMAKVDDSFFHRLEESFLVEEDKKHERHPIFGNIVDEVAYHEKYPTIYHLRKKLVDSTDKADLRLIYLALAHMIKFRGHFLIEGDLNPDNSDVDKLFIQLVQTYNQLFEENPINASGVDAKAILSARLSKSRRLENLIAQLPGEKKNGLFGNLIALSLGLTPNFKSNFDLAEDAKLQLSKDTYDDDLDNLLAQIGDQYADLFLAAKNLSDAILLSDILRVNTEITKAPLSASMIKRYDEHHQDLTLLKALVRQQLPEKYKEIFFDQSKNGYAGYIDGGASQEEFYKFIKPILEKMDGTEELLVKLNREDLLRKQRTFDNGSIPHQIHLGELHAILRRQEDFYPFLKDNREKIEKILTFRIPYYVGPLARGNSRFAWMTRKSEETITPWNFEEVVDKGASAQSFIERMTNFDKNLPNEKVLPKHSLLYEYFTVYNELTKVKYVTEGMRKPAFLSGEQKKAIVDLLFKTNRKVTVKQLKEDYFKKIECFDSVEISGVEDRFNASLGTYHDLLKIIKDKDFLDNEENEDILEDIVLTLTLFEDREMIEERLKTYAHLFDDKVMKQLKRRRYTGWGRLSRKLINGIRDKQSGKTILDFLKSDGFANRNFMQLIHDDSLTFKEDIQKAQVSGQGDSLHEHIANLAGSPAIKKGILQTVKVVDELVKVMGRHKPENIVIEMARENQTTQKGQKNSRERMKRIEEGIKELGSQILKEHPVENTQLQNEKLYLYYLQNGRDMYVDQELDINRLSDYDVDHIVPQSFLKDDSIDNKVLTRSDKARGKSDNVPSEEVVKKMKNYWRQLLNAKLITQRKFDNLTKAERGGLSELDKAGFIKRQLVETRQITKHVAQILDSRMNTKYDENDKLIREVKVITLKSKLVSDFRKDFQFYKVREINNYHHAHDAYLNAVVGTALIKKYPKLESEFVYGDYKVYDVRKMIAKSEQEIGKATAKYFFYSNIMNFFKTEITLANGEIRKRPLIETNGETGEIVWDKGRDFATVRKVLSMPQVNIVKKTEVQTGGFSKESILPKRNSDKLIARKKDWDPKKYGGFDSPTVAYSVLVVAKVEKGKSKKLKSVKELLGITIMERSSFEKNPIDFLEAKGYKEVKKDLIIKLPKYSLFELENGRKRMLASAGELQKGNELALPSKYVNFLYLASHYEKLKGSPEDNEQKQLFVEQHKHYLDEIIEQISEFSKRVILADANLDKVLSAYNKHRDKPIREQAENIIHLFTLTNLGAPAAFKYFDTTIDRKRYTSTKEVLDATLIHQSITGLYETRIDLSQLGGDGGGGSGGGPAPGGTLNLEDEYRLYETSAEPEVSPGSTWLSDFPQAWAETGGMGLAVRQAPLIIPLKATSTPVSIKQYPMSQEAKLGIKPHIQRLLDQGILVPCQSPWNTPLLPVKKPGTNDYRPVQDLREVNKRVEDIHPTVPNPYNLLSGLPPSHRWYTVLDLKDAFFCLRLHPTSQPLFAFEWRDPGMGISGQLTWTRLPQGFKNSPTLFNEALHRDLADFRIQHPDLILLQYVDDILLAATSELDCQQGTRALLLTLGNLGYRASAKKAQLCQKQVKYLGYLLKEGQRWLTEARKETVMGQPTPKTPRQLREFLGKAGFCRLFIPGFAEMAAPLYPLTKPGTLFNWGPDQQKAYQEIKQALLTAPALGLPDLTKPFELFVDEKQGYAKGVLTQKLGPWRRPVAYLSKKLDPVAAGWPPCLRMVAAIAVLRKDAGKLTMGQPLVILAPHAVEALVKQPPDRWLSNARMTHYQAMLLDTDRVQFGPVVALNPATLLPLPEEGAPHDCLEILAETHGTRPDLTDQPIPDADHTWYTDGSSFLQEGQRKAGAAVTTETEVIWARALPAGTSAQRAELIALTQALKMAEGKRLNVYTDSRYAFATAHIHGEIYRRRGWLTSEGREIKNKSEILALLKALFLPKRLSIIHCLGHQKGDSAEARGNRLADQAAREAAIKTPPDTSTLLAGKRTADGSEFEKRTADGSEFESPKKKAKVE

SEQ ID NO: 6980 - protein, 2094 aa, synthetic construct
MPAAKRVKLDGGDKKYSIGLDIGTNSVGWAVITDEYKVPSKKFKVLGNTDRHSIKKNLIGALLFDSGETAEATRLKRTARRRYTRRKNRICYLQEIFSNEMAKVDDSFFHRLEESFLVEEDKKHERHPIFGNIVDEVAYHEKYPTIYHLRKKLVDSTDKADLRLIYLALAHMIKFRGHFLIEGDLNPDNSDVDKLFIQLVQTYNQLFEENPINASGVDAKAILSARLSKSRRLENLIAQLPGEKKNGLFGNLIALSLGLTPNFKSNFDLAEDAKLQLSKDTYDDDLDNLLAQIGDQYADLFLAAKNLSDAILLSDILRVNTEITKAPLSASMIKRYDEHHQDLTLLKALVRQQLPEKYKEIFFDQSKNGYAGYIDGGASQEEFYKFIKPILEKMDGTEELLVKLNREDLLRKQRTFDNGSIPHQIHLGELHAILRRQEDFYPFLKDNREKIEKILTFRIPYYVGPLARGNSRFAWMTRKSEETITPWNFEEVVDKGASAQSFIERMTNFDKNLPNEKVLPKHSLLYEYFTVYNELTKVKYVTEGMRKPAFLSGEQKKAIVDLLFKTNRKVTVKQLKEDYFKKIECFDSVEISGVEDRFNASLGTYHDLLKIIKDKDFLDNEENEDILEDIVLTLTLFEDREMIEERLKTYAHLFDDKVMKQLKRRRYTGWGRLSRKLINGIRDKQSGKTILDFLKSDGFANRNFMQLIHDDSLTFKEDIQKAQVSGQGDSLHEHIANLAGSPAIKKGILQTVKVVDELVKVMGRHKPENIVIEMARENQTTQKGQKNSRERMKRIEEGIKELGSQILKEHPVENTQLQNEKLYLYYLQNGRDMYVDQELDINRLSDYDVDHIVPQSFLKDDSIDNKVLTRSDKARGKSDNVPSEEVVKKMKNYWRQLLNAKLITQRKFDNLTKAERGGLSELDKAGFIKRQLVETRQITKHVAQILDSRMNTKYDENDKLIREVKVITLKSKLVSDFRKDFQFYKVREINNYHHAHDAYLNAVVGTALIKKYPKLESEFVYGDYKVYDVRKMIAKSEQEIGKATAKYFFYSNIMNFFKTEITLANGEIRKRPLIETNGETGEIVWDKGRDFATVRKVLSMPQVNIVKKTEVQTGGFSKESILPKRNSDKLIARKKDWDPKKYGGFDSPTVAYSVLVVAKVEKGKSKKLKSVKELLGITIMERSSFEKNPIDFLEAKGYKEVKKDLIIKLPKYSLFELENGRKRMLASAGELQKGNELALPSKYVNFLYLASHYEKLKGSPEDNEQKQLFVEQHKHYLDEIIEQISEFSKRVILADANLDKVLSAYNKHRDKPIREQAENIIHLFTLTNLGAPAAFKYFDTTIDRKRYTSTKEVLDATLIHQSITGLYETRIDLSQLGGDGGGGSGGGPAPGGTLNIEDEYRLHETSKGPDVPLGSTWLSDFPQAWAETGGMGLAVRQAPLIIPLKATSTPVSIKQYPMSQEARLGIKPHIQRLLDQGILVPCQSPWNTPLLPVKKPGTNDYRPVQDLREVNKRVEDIHPTVPNPYNLLSGLPPSHQWYTVLDLKDAFFCLRLHPTSQSLFAFEWRDPEMGISGQLTWTRLPQGFKNSPTLFNEALHRDLADFRIQHPDLILLQYVDDLLLAATSELDCQQGTRALLQTLGDLGYRASAKKAQICQKQVKYLGYLLKEGQRWLTEARKETVMGQPTPKTPRQLREFLGKAGFCRLFIPGFAEMAAPLYPLTKPGTLFEWGPDQQKAYQEIKQALLTAPALGLPDLTKPFELFVDEKQGYAKGVLTQKLGPWRRPVAYLSKKLDPVAAGWPPCLRMVAAIAVLTKDAGKLTMGQPLVILAPHAVEALVKQPPDRWLSNARMTHYQALLLDTDRVQFGPIVALNPATLLPLPEEGLQHDCLDILAEAHGTRPDLTDQPLPDADHTWYTDGSSFLQEGQRKAGAAVTTETEVVWAKALPAGTSAQRAELIALTQALKMAEGKKLNVYTDSRYAFATAHIHGEIYRRRGWLTSEGKEIKNKDEILALLKALFLPKRLSIIHCPGHQKGNRAEARGNRMADQAAREVATRETPETSTLLAGKRTADGSEFEKRTADGSEFESPKKKAKVE

SEQ ID NO: 6981 - protein, 2114 aa, synthetic construct
MPAAKRVKLDGGDKKYSIGLDIGTNSVGWAVITDEYKVPSKKFKVLGNTDRHSIKKNLIGALLFDSGETAEATRLKRTARRRYTRRKNRICYLQEIFSNEMAKVDDSFFHRLEESFLVEEDKKHERHPIFGNIVDEVAYHEKYPTIYHLRKKLVDSTDKADLRLIYLALAHMIKFRGHFLIEGDLNPDNSDVDKLFIQLVQTYNQLFEENPINASGVDAKAILSARLSKSRRLENLIAQLPGEKKNGLFGNLIALSLGLTPNFKSNFDLAEDAKLQLSKDTYDDDLDNLLAQIGDQYADLFLAAKNLSDAILLSDILRVNTEITKAPLSASMIKRYDEHHQDLTLLKALVRQQLPEKYKEIFFDQSKNGYAGYIDGGASQEEFYKFIKPILEKMDGTEELLVKLNREDLLRKQRTFDNGSIPHQIHLGELHAILRRQEDFYPFLKDNREKIEKILTFRIPYYVGPLARGNSRFAWMTRKSEETITPWNFEEVVDKGASAQSFIERMTNFDKNLPNEKVLPKHSLLYEYFTVYNELTKVKYVTEGMRKPAFLSGEQKKAIVDLLFKTNRKVTVKQLKEDYFKKIECFDSVEISGVEDRFNASLGTYHDLLKIIKDKDFLDNEENEDILEDIVLTLTLFEDREMIEERLKTYAHLFDDKVMKQLKRRRYTGWGRLSRKLINGIRDKQSGKTILDFLKSDGFANRNFMQLIHDDSLTFKEDIQKAQVSGQGDSLHEHIANLAGSPAIKKGILQTVKVVDELVKVMGRHKPENIVIEMARENQTTQKGQKNSRERMKRIEEGIKELGSQILKEHPVENTQLQNEKLYLYYLQNGRDMYVDQELDINRLSDYDVDHIVPQSFLKDDSIDNKVLTRSDKARGKSDNVPSEEVVKKMKNYWRQLLNAKLITQRKFDNLTKAERGGLSELDKAGFIKRQLVETRQITKHVAQILDSRMNTKYDENDKLIREVKVITLKSKLVSDFRKDFQFYKVREINNYHHAHDAYLNAVVGTALIKKYPKLESEFVYGDYKVYDVRKMIAKSEQEIGKATAKYFFYSNIMNFFKTEITLANGEIRKRPLIETNGETGEIVWDKGRDFATVRKVLSMPQVNIVKKTEVQTGGFSKESILPKRNSDKLIARKKDWDPKKYGGFDSPTVAYSVLVVAKVEKGKSKKLKSVKELLGITIMERSSFEKNPIDFLEAKGYKEVKKDLIIKLPKYSLFELENGRKRMLASAGELQKGNELALPSKYVNFLYLASHYEKLKGSPEDNEQKQLFVEQHKHYLDEIIEQISEFSKRVILADANLDKVLSAYNKHRDKPIREQAENIIHLFTLTNLGAPAAFKYFDTTIDRKRYTSTKEVLDATLIHQSITGLYETRIDLSQLGGDGGGGSGGGPAPGGVQEISDSRPMLHIYLNGRRFLGLLDTGADKTCIAGRDWPANWPIHQTESSLQGLGMACGVARSSQPLRWQHEDKSGIIHPFVIPTLPFTLWGRDIMKDIKVRLMTDSPDDSQDLMIGAIESNLFADQISWKSDQPVWLNQWPLKQEKLQALQQLVTEQLQLGHLEESNSPWNTPVFVIKKKSGKWRLLQDLRAVNATMHDMGALQPGLPSPPAVPKGWEIIIIDLQDCFFNIKLHPEDCKRFAFSVPSPNFKRPYQRFQWKVLPQGMKNSPTLCQKFVDKAILTVRDKYQDSYIVHYMDDILLAHPSRSIVDEILTSMIQALNKHGLVVSTEKIQKYDNLKYLGTHIQGDSVSYQKLQIRTDKLRTLNDFQKLLGNINWIRPFLKLTTGELKPLFEILNPDSNPISTRKLTPEACKALQLMNERLSTARVKRLDLSQPWSLCILKTEYTPTACLWQDGVVEWIHLPHISPKVITPYDIFCTQLIIKGRHRSKELFSKDPDYIVVPYTKVQFDLLLQEKEDWPISLLGFLGEVHFHLPKDPLLTFTLQTAIIFPHMTSTTPLEKGIVIFTDGSANGRSVTYIQGREPIIKENTQNTAQQAEIVAVITAFEEVSQPFNLYTDSKYVTGLFPEIETATLSPRTKIYTELKHLQRLIHKRQEKFYIGHIRGHTGLPGPLAQGNAYADSLTRILTAAGKRTADGSEFEKRTADGSEFESPKKKAKVE

SEQ ID NO: 6982 - protein, 2088 aa, synthetic construct
MPAAKRVKLDGGDKKYSIGLDIGTNSVGWAVITDEYKVPSKKFKVLGNTDRHSIKKNLIGALLFDSGETAEATRLKRTARRRYTRRKNRICYLQEIFSNEMAKVDDSFFHRLEESFLVEEDKKHERHPIFGNIVDEVAYHEKYPTIYHLRKKLVDSTDKADLRLIYLALAHMIKFRGHFLIEGDLNPDNSDVDKLFIQLVQTYNQLFEENPINASGVDAKAILSARLSKSRRLENLIAQLPGEKKNGLFGNLIALSLGLTPNFKSNFDLAEDAKLQLSKDTYDDDLDNLLAQIGDQYADLFLAAKNLSDAILLSDILRVNTEITKAPLSASMIKRYDEHHQDLTLLKALVRQQLPEKYKEIFFDQSKNGYAGYIDGGASQEEFYKFIKPILEKMDGTEELLVKLNREDLLRKQRTFDNGSIPHQIHLGELHAILRRQEDFYPFLKDNREKIEKILTFRIPYYVGPLARGNSRFAWMTRKSEETITPWNFEEVVDKGASAQSFIERMTNFDKNLPNEKVLPKHSLLYEYFTVYNELTKVKYVTEGMRKPAFLSGEQKKAIVDLLFKTNRKVTVKQLKEDYFKKIECFDSVEISGVEDRFNASLGTYHDLLKIIKDKDFLDNEENEDILEDIVLTLTLFEDREMIEERLKTYAHLFDDKVMKQLKRRRYTGWGRLSRKLINGIRDKQSGKTILDFLKSDGFANRNFMQLIHDDSLTFKEDIQKAQVSGQGDSLHEHIANLAGSPAIKKGILQTVKVVDELVKVMGRHKPENIVIEMARENQTTQKGQKNSRERMKRIEEGIKELGSQILKEHPVENTQLQNEKLYLYYLQNGRDMYVDQELDINRLSDYDVDHIVPQSFLKDDSIDNKVLTRSDKARGKSDNVPSEEVVKKMKNYWRQLLNAKLITQRKFDNLTKAERGGLSELDKAGFIKRQLVETRQITKHVAQILDSRMNTKYDENDKLIREVKVITLKSKLVSDFRKDFQFYKVREINNYHHAHDAYLNAVVGTALIKKYPKLESEFVYGDYKVYDVRKMIAKSEQEIGKATAKYFFYSNIMNFFKTEITLANGEIRKRPLIETNGETGEIVWDKGRDFATVRKVLSMPQVNIVKKTEVQTGGFSKESILPKRNSDKLIARKKDWDPKKYGGFDSPTVAYSVLVVAKVEKGKSKKLKSVKELLGITIMERSSFEKNPIDFLEAKGYKEVKKDLIIKLPKYSLFELENGRKRMLASAGELQKGNELALPSKYVNFLYLASHYEKLKGSPEDNEQKQLFVEQHKHYLDEIIEQISEFSKRVILADANLDKVLSAYNKHRDKPIREQAENIIHLFTLTNLGAPAAFKYFDTTIDRKRYTSTKEVLDATLIHQSITGLYETRIDLSQLGGDGGGGSGGGPAPGGTLQLDDEYRLYSPLVKPDQNIQFWLEQFPQAWAETAGMGLAKQVPPQVIQLKASATPVSVRQYPLSKEAQEGIRPHVQRLIQQGILVPVQSPWNTPLLPVRKPGTNDYRPVQDLREVNKRVQDIHPTVPNPYNLLCALPPQRSWYTVLDLKDAFFCLRLHPTSQPLFAFEWRDPGTGRTGQLTWTRLPQGFKNSPTIFDEALHRDLANFRIQHPQVTLLQYVDDLLLAGATKQDCLEGTKALLLELSDLGYRASAKKAQICRREVTYLGYSLRDGQRWLTEARKKTVVQIPAPTTAKQVREFLGTAGFCRLWIPGFATLAAPLYPLTKEKGEFSWAPEHQKAFDAIKKALLSAPALALPDVTKPFTLYVDERKGVARGVLTQTLGPWRRPVAYLSKKLDPVASGWPVCLKAIAAVAILVKDADKLTLGQNITVIAPHALENIVRQPPDRWMTNARMTHYQSLLLTERVTFAPPAALNPATLLPEETDEPVTHDCHQLLIEETGVRKDLTDIPLTGEVLTWFTDGSSYVVEGKRMAGAAVVDGTRTIWASSLPEGTSAQKAELMALTQALRLAEGKSINIYTDSRYAFATAHVHGAIYKQRGLLTSAGREIKNKEEILSLLEALHLPKRLAIIHCPGHQKAKDPISRGNQMADRVAKQAAQGVNLLAGKRTADGSEFEKRTADGSEFESPKKKAKVE

SEQ ID NO: 6983 - protein, 2085 aa, synthetic construct
MPAAKRVKLDGGDKKYSIGLDIGTNSVGWAVITDEYKVPSKKFKVLGNTDRHSIKKNLIGALLFDSGETAEATRLKRTARRRYTRRKNRICYLQEIFSNEMAKVDDSFFHRLEESFLVEEDKKHERHPIFGNIVDEVAYHEKYPTIYHLRKKLVDSTDKADLRLIYLALAHMIKFRGHFLIEGDLNPDNSDVDKLFIQLVQTYNQLFEENPINASGVDAKAILSARLSKSRRLENLIAQLPGEKKNGLFGNLIALSLGLTPNFKSNFDLAEDAKLQLSKDTYDDDLDNLLAQIGDQYADLFLAAKNLSDAILLSDILRVNTEITKAPLSASMIKRYDEHHQDLTLLKALVRQQLPEKYKEIFFDQSKNGYAGYIDGGASQEEFYKFIKPILEKMDGTEELLVKLNREDLLRKQRTFDNGSIPHQIHLGELHAILRRQEDFYPFLKDNREKIEKILTFRIPYYVGPLARGNSRFAWMTRKSEETITPWNFEEVVDKGASAQSFIERMTNFDKNLPNEKVLPKHSLLYEYFTVYNELTKVKYVTEGMRKPAFLSGEQKKAIVDLLFKTNRKVTVKQLKEDYFKKIECFDSVEISGVEDRFNASLGTYHDLLKIIKDKDFLDNEENEDILEDIVLTLTLFEDREMIEERLKTYAHLFDDKVMKQLKRRRYTGWGRLSRKLINGIRDKQSGKTILDFLKSDGFANRNFMQLIHDDSLTFKEDIQKAQVSGQGDSLHEHIANLAGSPAIKKGILQTVKVVDELVKVMGRHKPENIVIEMARENQTTQKGQKNSRERMKRIEEGIKELGSQILKEHPVENTQLQNEKLYLYYLQNGRDMYVDQELDINRLSDYDVDHIVPQSFLKDDSIDNKVLTRSDKARGKSDNVPSEEVVKKMKNYWRQLLNAKLITQRKFDNLTKAERGGLSELDKAGFIKRQLVETRQITKHVAQILDSRMNTKYDENDKLIREVKVITLKSKLVSDFRKDFQFYKVREINNYHHAHDAYLNAVVGTALIKKYPKLESEFVYGDYKVYDVRKMIAKSEQEIGKATAKYFFYSNIMNFFKTEITLANGEIRKRPLIETNGETGEIVWDKGRDFATVRKVLSMPQVNIVKKTEVQTGGFSKESILPKRNSDKLIARKKDWDPKKYGGFDSPTVAYSVLVVAKVEKGKSKKLKSVKELLGITIMERSSFEKNPIDFLEAKGYKEVKKDLIIKLPKYSLFELENGRKRMLASAGELQKGNELALPSKYVNFLYLASHYEKLKGSPEDNEQKQLFVEQHKHYLDEIIEQISEFSKRVILADANLDKVLSAYNKHRDKPIREQAENIIHLFTLTNLGAPAAFKYFDTTIDRKRYTSTKEVLDATLIHQSITGLYETRIDLSQLGGDGGGGSGGGPAPGGVPWLMKKPLQLTVLVPLHEYQERLLQQTALPKEQKELLQKLFLKYDALWQHWENQVGHRRIKPHNIATGTLAPRPQKQYPINPKAKPSIQIVIDDLLKQGVLIQQNSTMNTPVYPVPKPDGKWRMVLDYREVNKTIPLIAAQNQHSAGILSSIYRGKYKTTLDLTNGFWAHPITPESYWLTAFTWQGKQYCWTRLPQGFLNSPALFTADVVDLLKEIPNVQAYVDDIYISHDDPQEHLEQLEKIFSILLNAGYVVSLKKSEIAQREVEFLGFNITKEGRGLTDTFKQKLLNITPPKDLKQLQSILGLLNFARNFIPNYSELVKPLYTIVANANGKFISWTEDNSNQLQHIISVLNQADNLEERNPETRLIIKVNSSPSAGYIRYYNEGSKRPIMYVNYIFSKAEAKFTQTEKLLTTMHKGLIKAMDLAMGQEILVYSPIVSMTKIQRTPLPERKALPVRWITWMTYLEDPRIQFHYDKSLPELQQIPNVTEDVIAKTKHPSEFAMVFYTDGSAIKHPDVNKSHSAGMGIAQVQFIPEYKIVHQWSIPLGDHTAQLAEIAAVEFACKKALKISGPVLIVTDSFYVAESANKELPYWKSNGFLNNKKKPLRHVSKWKSIAECLQLKPDIIIMHEKGHQQPMTTLHTEGNNLADKLATQGSYVVHAGKRTADGSEFEKRTADGSEFESPKKKAKVE

SEQ ID NO: 6984 - protein, 2085 aa, synthetic construct
MPAAKRVKLDGGDKKYSIGLDIGTNSVGWAVITDEYKVPSKKFKVLGNTDRHSIKKNLIGALLFDSGETAEATRLKRTARRRYTRRKNRICYLQEIFSNEMAKVDDSFFHRLEESFLVEEDKKHERHPIFGNIVDEVAYHEKYPTIYHLRKKLVDSTDKADLRLIYLALAHMIKFRGHFLIEGDLNPDNSDVDKLFIQLVQTYNQLFEENPINASGVDAKAILSARLSKSRRLENLIAQLPGEKKNGLFGNLIALSLGLTPNFKSNFDLAEDAKLQLSKDTYDDDLDNLLAQIGDQYADLFLAAKNLSDAILLSDILRVNTEITKAPLSASMIKRYDEHHQDLTLLKALVRQQLPEKYKEIFFDQSKNGYAGYIDGGASQEEFYKFIKPILEKMDGTEELLVKLNREDLLRKQRTFDNGSIPHQIHLGELHAILRRQEDFYPFLKDNREKIEKILTFRIPYYVGPLARGNSRFAWMTRKSEETITPWNFEEVVDKGASAQSFIERMTNFDKNLPNEKVLPKHSLLYEYFTVYNELTKVKYVTEGMRKPAFLSGEQKKAIVDLLFKTNRKVTVKQLKEDYFKKIECFDSVEISGVEDRFNASLGTYHDLLKIIKDKDFLDNEENEDILEDIVLTLTLFEDREMIEERLKTYAHLFDDKVMKQLKRRRYTGWGRLSRKLINGIRDKQSGKTILDFLKSDGFANRNFMQLIHDDSLTFKEDIQKAQVSGQGDSLHEHIANLAGSPAIKKGILQTVKVVDELVKVMGRHKPENIVIEMARENQTTQKGQKNSRERMKRIEEGIKELGSQILKEHPVENTQLQNEKLYLYYLQNGRDMYVDQELDINRLSDYDVDHIVPQSFLKDDSIDNKVLTRSDKARGKSDNVPSEEVVKKMKNYWRQLLNAKLITQRKFDNLTKAERGGLSELDKAGFIKRQLVETRQITKHVAQILDSRMNTKYDENDKLIREVKVITLKSKLVSDFRKDFQFYKVREINNYHHAHDAYLNAVVGTALIKKYPKLESEFVYGDYKVYDVRKMIAKSEQEIGKATAKYFFYSNIMNFFKTEITLANGEIRKRPLIETNGETGEIVWDKGRDFATVRKVLSMPQVNIVKKTEVQTGGFSKESILPKRNSDKLIARKKDWDPKKYGGFDSPTVAYSVLVVAKVEKGKSKKLKSVKELLGITIMERSSFEKNPIDFLEAKGYKEVKKDLIIKLPKYSLFELENGRKRMLASAGELQKGNELALPSKYVNFLYLASHYEKLKGSPEDNEQKQLFVEQHKHYLDEIIEQISEFSKRVILADANLDKVLSAYNKHRDKPIREQAENIIHLFTLTNLGAPAAFKYFDTTIDRKRYTSTKEVLDATLIHQSITGLYETRIDLSQLGGDGGGGSGGGPAPGGIPWLMKKPLQLTTLVPLQEYEERLLKQTMLTGSYKEKLQSLFLKYDALWQHWENQVGHRRIKPHHIATGTVNPRPQKQYPINPKAKASIQTVINDLLKQGVLIQQNSIMNTPVYPVPKPDGKWRMVLDYREVNKTIPLIAAQNQHSAGILSSIFRGKYKTTLDLSNGFWAHSITPESYWLTAFTWLGQQYCWTRLPQGFLNSPALFNADVVDLLKEVPNVQVYVDDIYISHDDPREHLEQLEKVFSLLLNAGYVVSLKKSEIAQHEVEFLGFNITKEGRGLTETFKQKLLNITPPRDLKQLQSILGLLNFARNFIPNFSELVKPLYNIIATAPGKYITWTTDNSQQLQNIISMLNSAENLEERNPEVRLIMKVNTSPSAGYIRFYNEFAKRPIMYLNYVYTKAEVKFTNTEKLLTTIHKGLIKALDLGMGQEILVYSPIVSMTKIQKTPLPERKALPIRWITWMSYLEDPRIQFHYDKTLPELQQVPTVTDDIIAKIKHPSEFSMVFYTDGSAIKHPNVNKSHNAGMGIAQVQFKPEFTVINTWSIPLGDHTAQLAEVAAVEFACKKALKIDGPVLIVTDSFYVAESVNKELPYWQSNGFFNNKKKPLKHVSKWKSIADCIQLKPDIIIIHEKGHQPTASTFHTEGNNLADKLATQGSYVVNAGKRTADGSEFEKRTADGSEFESPKKKAKVE

SEQ ID NO: 6985 - protein, 2100 aa, synthetic construct
MPAAKRVKLDGGDKKYSIGLDIGTNSVGWAVITDEYKVPSKKFKVLGNTDRHSIKKNLIGALLFDSGETAEATRLKRTARRRYTRRKNRICYLQEIFSNEMAKVDDSFFHRLEESFLVEEDKKHERHPIFGNIVDEVAYHEKYPTIYHLRKKLVDSTDKADLRLIYLALAHMIKFRGHFLIEGDLNPDNSDVDKLFIQLVQTYNQLFEENPINASGVDAKAILSARLSKSRRLENLIAQLPGEKKNGLFGNLIALSLGLTPNFKSNFDLAEDAKLQLSKDTYDDDLDNLLAQIGDQYADLFLAAKNLSDAILLSDILRVNTEITKAPLSASMIKRYDEHHQDLTLLKALVRQQLPEKYKEIFFDQSKNGYAGYIDGGASQEEFYKFIKPILEKMDGTEELLVKLNREDLLRKQRTFDNGSIPHQIHLGELHAILRRQEDFYPFLKDNREKIEKILTFRIPYYVGPLARGNSRFAWMTRKSEETITPWNFEEVVDKGASAQSFIERMTNFDKNLPNEKVLPKHSLLYEYFTVYNELTKVKYVTEGMRKPAFLSGEQKKAIVDLLFKTNRKVTVKQLKEDYFKKIECFDSVEISGVEDRFNASLGTYHDLLKIIKDKDFLDNEENEDILEDIVLTLTLFEDREMIEERLKTYAHLFDDKVMKQLKRRRYTGWGRLSRKLINGIRDKQSGKTILDFLKSDGFANRNFMQLIHDDSLTFKEDIQKAQVSGQGDSLHEHIANLAGSPAIKKGILQTVKVVDELVKVMGRHKPENIVIEMARENQTTQKGQKNSRERMKRIEEGIKELGSQILKEHPVENTQLQNEKLYLYYLQNGRDMYVDQELDINRLSDYDVDHIVPQSFLKDDSIDNKVLTRSDKARGKSDNVPSEEVVKKMKNYWRQLLNAKLITQRKFDNLTKAERGGLSELDKAGFIKRQLVETRQITKHVAQILDSRMNTKYDENDKLIREVKVITLKSKLVSDFRKDFQFYKVREINNYHHAHDAYLNAVVGTALIKKYPKLESEFVYGDYKVYDVRKMIAKSEQEIGKATAKYFFYSNIMNFFKTEITLANGEIRKRPLIETNGETGEIVWDKGRDFATVRKVLSMPQVNIVKKTEVQTGGFSKESILPKRNSDKLIARKKDWDPKKYGGFDSPTVAYSVLVVAKVEKGKSKKLKSVKELLGITIMERSSFEKNPIDFLEAKGYKEVKKDLIIKLPKYSLFELENGRKRMLASAGELQKGNELALPSKYVNFLYLASHYEKLKGSPEDNEQKQLFVEQHKHYLDEIIEQISEFSKRVILADANLDKVLSAYNKHRDKPIREQAENIIHLFTLTNLGAPAAFKYFDTTIDRKRYTSTKEVLDATLIHQSITGLYETRIDLSQLGGDGGGGSPAPGGGGGTVSLQDEHRLFDIPVTTSLPDVWLQDFPQAWAETGGLGRAKCQAPIIIDLKPTAVPVSIKQYPMSLEAHMGIRQHIIKFLELGVLRPCRSPWNTPLLPVKKPGTQDYRPVQDLREINKRTVDIHPTVPNPYNLLSTLKPDYSWYTVLDLKDAFFCLPLAPQSQELFAFEWKDPERGISGQLTWTRLPQGFKNSPTLFNEALHRDLTDFRTQHPEVTLLQYVDDLLLAAPTKKACTQGTRHLLQELGEKGYRASAKKAQICQTKVTYLGYILSEGKRWLTPGRIETVARIPPPRNPREVREFLGTAGFCRLWIPGFAELAAPLYALTKPSTPFTWQTEHQLAFEALKKALLSAPALGLPDTSKPFTLFLDERQGIAKGVLTQKLGPWKRPVAYLSKKLDPVAAGWPPCLRIMAATAMLVKDSAKLTLGQPLTVITPHTLEAIVRQPPDRWITNARLTHYQALLLDTDRVQFGPPVTLNPATLLPVPENQPSPHDCRQVLAETHGTREDLKDQELPDADHTWYTDGSSYLDSGTRRAGAAVVDGHNTIWAQSLPPGTSAQKAELIALTKALELSKGKKANIYTDSRYAFATAHTHGSIYERRGWLTSEGKEIKNKAEIIALLKALFLPQEVAIIHCPGHQKGQDPVAVGNRQADRVARQAAMAEVLTLATEPDNTSHITAGKRTADGSEFEKRTADGSEFESPKKKAKVE

SEQ ID NO: 6986 - protein, 2092 aa, synthetic construct
MPAAKRVKLDGGDKKYSIGLDIGTNSVGWAVITDEYKVPSKKFKVLGNTDRHSIKKNLIGALLFDSGETAEATRLKRTARRRYTRRKNRICYLQEIFSNEMAKVDDSFFHRLEESFLVEEDKKHERHPIFGNIVDEVAYHEKYPTIYHLRKKLVDSTDKADLRLIYLALAHMIKFRGHFLIEGDLNPDNSDVDKLFIQLVQTYNQLFEENPINASGVDAKAILSARLSKSRRLENLIAQLPGEKKNGLFGNLIALSLGLTPNFKSNFDLAEDAKLQLSKDTYDDDLDNLLAQIGDQYADLFLAAKNLSDAILLSDILRVNTEITKAPLSASMIKRYDEHHQDLTLLKALVRQQLPEKYKEIFFDQSKNGYAGYIDGGASQEEFYKFIKPILEKMDGTEELLVKLNREDLLRKQRTFDNGSIPHQIHLGELHAILRRQEDFYPFLKDNREKIEKILTFRIPYYVGPLARGNSRFAWMTRKSEETITPWNFEEVVDKGASAQSFIERMTNFDKNLPNEKVLPKHSLLYEYFTVYNELTKVKYVTEGMRKPAFLSGEQKKAIVDLLFKTNRKVTVKQLKEDYFKKIECFDSVEISGVEDRFNASLGTYHDLLKIIKDKDFLDNEENEDILEDIVLTLTLFEDREMIEERLKTYAHLFDDKVMKQLKRRRYTGWGRLSRKLINGIRDKQSGKTILDFLKSDGFANRNFMQLIHDDSLTFKEDIQKAQVSGQGDSLHEHIANLAGSPAIKKGILQTVKVVDELVKVMGRHKPENIVIEMARENQTTQKGQKNSRERMKRIEEGIKELGSQILKEHPVENTQLQNEKLYLYYLQNGRDMYVDQELDINRLSDYDVDHIVPQSFLKDDSIDNKVLTRSDKARGKSDNVPSEEVVKKMKNYWRQLLNAKLITQRKFDNLTKAERGGLSELDKAGFIKRQLVETRQITKHVAQILDSRMNTKYDENDKLIREVKVITLKSKLVSDFRKDFQFYKVREINNYHHAHDAYLNAVVGTALIKKYPKLESEFVYGDYKVYDVRKMIAKSEQEIGKATAKYFFYSNIMNFFKTEITLANGEIRKRPLIETNGETGEIVWDKGRDFATVRKVLSMPQVNIVKKTEVQTGGFSKESILPKRNSDKLIARKKDWDPKKYGGFDSPTVAYSVLVVAKVEKGKSKKLKSVKELLGITIMERSSFEKNPIDFLEAKGYKEVKKDLIIKLPKYSLFELENGRKRMLASAGELQKGNELALPSKYVNFLYLASHYEKLKGSPEDNEQKQLFVEQHKHYLDEIIEQISEFSKRVILADANLDKVLSAYNKHRDKPIREQAENIIHLFTLTNLGAPAAFKYFDTTIDRKRYTSTKEVLDATLIHQSITGLYETRIDLSQLGGDGGGGSPAPGGGGGVLNLEEEYRLHEKPVPSSIDPSWLQLFPTVWAERAGMGLANQVPPVVVELRSGASPVAVRQYPMSKEAREGIRPHIQKFLDLGVLVPCRSPWNTPLLPVKKPGTNDYRPVQDLREINKRVQDIHPTVPNPYNLLSSLPPSYTWYSVLDLKDAFFCLRLHPNSQPLFAFEWKDPEKGNTGQLTWTRLPQGFKNSPTLFDEALHRDLAPFRALNPQVVLLQYVDDLLVAAPTYEDCKKGTQKLLQELSKLGYRVSAKKAQLCQREVTYLGYLLKEGKRWLTPARKATVMKIPVPTTPRQVREFLGTAGFCRLWIPGFASLAAPLYPLTKESIPFIWTEEHQQAFDHIKKALLSAPALALPDLTKPFTLYIDERAGVARGVLTQTLGPWRRPVAYLSKKLDPVASGWPTCLKAVAAVALLLKDADKLTLGQNVTVIASHSLESIVRQPPDRWMTNARMTHYQSLLLNERVSFAPPAVLNPATLLPVESEATPVHRCSEILAEETGTRRDLEDQPLPGVPTWYTDGSSFITEGKRRAGAPIVDGKRTVWASSLPEGTSAQKAELVALTQALRLAEGKNINIYTDSRYAFATAHIHGAIYKQRGLLTSAGKDIKNKEEILALLEAIHLPRRVAIIHCPGHQRGSNPVATGNRRADEAAKQAALSTRVLAGTTKPAGKRTADGSEFEKRTADGSEFESPKKKAKVE

SEQ ID NO: 6987 - protein, 2092 aa, synthetic construct
MPAAKRVKLDGGDKKYSIGLDIGTNSVGWAVITDEYKVPSKKFKVLGNTDRHSIKKNLIGALLFDSGETAEATRLKRTARRRYTRRKNRICYLQEIFSNEMAKVDDSFFHRLEESFLVEEDKKHERHPIFGNIVDEVAYHEKYPTIYHLRKKLVDSTDKADLRLIYLALAHMIKFRGHFLIEGDLNPDNSDVDKLFIQLVQTYNQLFEENPINASGVDAKAILSARLSKSRRLENLIAQLPGEKKNGLFGNLIALSLGLTPNFKSNFDLAEDAKLQLSKDTYDDDLDNLLAQIGDQYADLFLAAKNLSDAILLSDILRVNTEITKAPLSASMIKRYDEHHQDLTLLKALVRQQLPEKYKEIFFDQSKNGYAGYIDGGASQEEFYKFIKPILEKMDGTEELLVKLNREDLLRKQRTFDNGSIPHQIHLGELHAILRRQEDFYPFLKDNREKIEKILTFRIPYYVGPLARGNSRFAWMTRKSEETITPWNFEEVVDKGASAQSFIERMTNFDKNLPNEKVLPKHSLLYEYFTVYNELTKVKYVTEGMRKPAFLSGEQKKAIVDLLFKTNRKVTVKQLKEDYFKKIECFDSVEISGVEDRFNASLGTYHDLLKIIKDKDFLDNEENEDILEDIVLTLTLFEDREMIEERLKTYAHLFDDKVMKQLKRRRYTGWGRLSRKLINGIRDKQSGKTILDFLKSDGFANRNFMQLIHDDSLTFKEDIQKAQVSGQGDSLHEHIANLAGSPAIKKGILQTVKVVDELVKVMGRHKPENIVIEMARENQTTQKGQKNSRERMKRIEEGIKELGSQILKEHPVENTQLQNEKLYLYYLQNGRDMYVDQELDINRLSDYDVDHIVPQSFLKDDSIDNKVLTRSDKARGKSDNVPSEEVVKKMKNYWRQLLNAKLITQRKFDNLTKAERGGLSELDKAGFIKRQLVETRQITKHVAQILDSRMNTKYDENDKLIREVKVITLKSKLVSDFRKDFQFYKVREINNYHHAHDAYLNAVVGTALIKKYPKLESEFVYGDYKVYDVRKMIAKSEQEIGKATAKYFFYSNIMNFFKTEITLANGEIRKRPLIETNGETGEIVWDKGRDFATVRKVLSMPQVNIVKKTEVQTGGFSKESILPKRNSDKLIARKKDWDPKKYGGFDSPTVAYSVLVVAKVEKGKSKKLKSVKELLGITIMERSSFEKNPIDFLEAKGYKEVKKDLIIKLPKYSLFELENGRKRMLASAGELQKGNELALPSKYVNFLYLASHYEKLKGSPEDNEQKQLFVEQHKHYLDEIIEQISEFSKRVILADANLDKVLSAYNKHRDKPIREQAENIIHLFTLTNLGAPAAFKYFDTTIDRKRYTSTKEVLDATLIHQSITGLYETRIDLSQLGGDGGGGSPAPGGGGGVLNLEEEYRLHEKPVPSSIDPSWLQLFPTVWAERAGMGLANQVPPVVVELRSGASPVAVRQYPMSKEAREGIRPHIQKFLDLGVLVPCRSPWNTPLLPVKKPGTNDYRPVQDLREINKRVQDIHPTVPNPYNLLSSLPPSYTWYSVLDLKDAFFCLRLHPNSQPLFAFEWKDPEKGNTGQLTWTRLPQGFKNSPTLFNEALHRDLAPFRALNPQVVLLQYVDDLLVAAPTYEDCKKGTQKLLQELSKLGYRVSAKKAQLCQREVTYLGYLLKEGKRWLTPARKATVMKIPVPTTPRQVREFLGTAGFCRLWIPGFASLAAPLYPLTKPSIPFIWTEEHQQAFDHIKKALLSAPALALPDLTKPFTLYIDERAGVARGVLTQTLGPWRRPVAYLSKKLDPVASGWPTCLKAVAAVALLLKDADKLTLGQNVTVIASHSLESIVRQPPDRWMTNARMTHYQSLLLNERVSFAPPAVLNPATLLPVESEATPVHRCSEILAEETGTRRDLEDQPLPGVPTWYTDGSSFITEGKRRAGAPIVDGKRTVWASSLPEGTSAQKAELVALTQALRLAEGKNINIYTDSRYAFATAHIHGAIYKQRGWLTSAGKDIKNKEEILALLEAIHLPRRVAIIHCPGHQRGSNPVATGNRRADEAAKQAALSTRVLAGTTKPAGKRTADGSEFEKRTADGSEFESPKKKAKVE

SEQ ID NO: 6988 - protein, 2125 aa, synthetic construct
MPAAKRVKLDGGDKKYSIGLDIGTNSVGWAVITDEYKVPSKKFKVLGNTDRHSIKKNLIGALLFDSGETAEATRLKRTARRRYTRRKNRICYLQEIFSNEMAKVDDSFFHRLEESFLVEEDKKHERHPIFGNIVDEVAYHEKYPTIYHLRKKLVDSTDKADLRLIYLALAHMIKFRGHFLIEGDLNPDNSDVDKLFIQLVQTYNQLFEENPINASGVDAKAILSARLSKSRRLENLIAQLPGEKKNGLFGNLIALSLGLTPNFKSNFDLAEDAKLQLSKDTYDDDLDNLLAQIGDQYADLFLAAKNLSDAILLSDILRVNTEITKAPLSASMIKRYDEHHQDLTLLKALVRQQLPEKYKEIFFDQSKNGYAGYIDGGASQEEFYKFIKPILEKMDGTEELLVKLNREDLLRKQRTFDNGSIPHQIHLGELHAILRRQEDFYPFLKDNREKIEKILTFRIPYYVGPLARGNSRFAWMTRKSEETITPWNFEEVVDKGASAQSFIERMTNFDKNLPNEKVLPKHSLLYEYFTVYNELTKVKYVTEGMRKPAFLSGEQKKAIVDLLFKTNRKVTVKQLKEDYFKKIECFDSVEISGVEDRFNASLGTYHDLLKIIKDKDFLDNEENEDILEDIVLTLTLFEDREMIEERLKTYAHLFDDKVMKQLKRRRYTGWGRLSRKLINGIRDKQSGKTILDFLKSDGFANRNFMQLIHDDSLTFKEDIQKAQVSGQGDSLHEHIANLAGSPAIKKGILQTVKVVDELVKVMGRHKPENIVIEMARENQTTQKGQKNSRERMKRIEEGIKELGSQILKEHPVENTQLQNEKLYLYYLQNGRDMYVDQELDINRLSDYDVDHIVPQSFLKDDSIDNKVLTRSDKARGKSDNVPSEEVVKKMKNYWRQLLNAKLITQRKFDNLTKAERGGLSELDKAGFIKRQLVETRQITKHVAQILDSRMNTKYDENDKLIREVKVITLKSKLVSDFRKDFQFYKVREINNYHHAHDAYLNAVVGTALIKKYPKLESEFVYGDYKVYDVRKMIAKSEQEIGKATAKYFFYSNIMNFFKTEITLANGEIRKRPLIETNGETGEIVWDKGRDFATVRKVLSMPQVNIVKKTEVQTGGFSKESILPKRNSDKLIARKKDWDPKKYGGFDSPTVAYSVLVVAKVEKGKSKKLKSVKELLGITIMERSSFEKNPIDFLEAKGYKEVKKDLIIKLPKYSLFELENGRKRMLASAGELQKGNELALPSKYVNFLYLASHYEKLKGSPEDNEQKQLFVEQHKHYLDEIIEQISEFSKRVILADANLDKVLSAYNKHRDKPIREQAENIIHLFTLTNLGAPAAFKYFDTTIDRKRYTSTKEVLDATLIHQSITGLYETRIDLSQLGGDGGGGSPAPGGGGGLLGRDLLTKLKAQIQFSTEGPQVTWEDRPAMCLVLNLEEEYRLHEKPVPPSIDPSWLQLFPMVWAEKAGMGLANQVPPVVVELKSDASPVAVRQYPMSKEAREGIRPHIQRFLDLGILVPCQSPWNTPLLPVKKPGTNDYRPVQDLREVNKRVQDIHPTVPNPYNLLSSLPPSHTWYSVLDLKDAFFCLKLHPNSQPLFAFEWRDPEKGNTGQLTWTRLPQGFKNSPTLFNEALHRDLASFRALNPQVVMLQYVDDLLVAAPTYRDCKEGTRRLLQELSKLGYRVSAKKAQLCREEVTYLGYLLKGGKRWLTPARKATVMKIPTPTTPRQVREFLGTAGFCRLWIPGFASLAAPLYPLTRPKVPFTWTEAHQEAFGRIKEALLSAPALALPDLTKPFALYVDEKEGVARGVLTQTLGPWRRPVAYLSKKLDPVASGWPTCLKAIAAVALLLKDADKLTLGQNVLVIAPHNLESIVRQPPDRWMTNARMTHYQSLLLNERVSFAPPAILNPATLLPVESDDTPIHICSEILAEETGTRPDLRDQPLPGVPAWYTDGSSFIMDGRRQAGAAIVDNKRTVWASNLPEGTSAQKAELIALTQALRLAEGKSINIYTDSRYAFATAHVHGAIYKQRGWLTSAGKDIKNKEEILALLEAIHLPKRVAIIHCPGHQRGTDPVATGNRKADEAAKQAAQSTRILTETTKNAGKRTADGSEFEKRTADGSEFESPKKKAKVE

SEQ ID NO: 6989 - protein, 2216 aa, synthetic construct
MPAAKRVKLDGGDKKYSIGLDIGTNSVGWAVITDEYKVPSKKFKVLGNTDRHSIKKNLIGALLFDSGETAEATRLKRTARRRYTRRKNRICYLQEIFSNEMAKVDDSFFHRLEESFLVEEDKKHERHPIFGNIVDEVAYHEKYPTIYHLRKKLVDSTDKADLRLIYLALAHMIKFRGHFLIEGDLNPDNSDVDKLFIQLVQTYNQLFEENPINASGVDAKAILSARLSKSRRLENLIAQLPGEKKNGLFGNLIALSLGLTPNFKSNFDLAEDAKLQLSKDTYDDDLDNLLAQIGDQYADLFLAAKNLSDAILLSDILRVNTEITKAPLSASMIKRYDEHHQDLTLLKALVRQQLPEKYKEIFFDQSKNGYAGYIDGGASQEEFYKFIKPILEKMDGTEELLVKLNREDLLRKQRTFDNGSIPHQIHLGELHAILRRQEDFYPFLKDNREKIEKILTFRIPYYVGPLARGNSRFAWMTRKSEETITPWNFEEVVDKGASAQSFIERMTNFDKNLPNEKVLPKHSLLYEYFTVYNELTKVKYVTEGMRKPAFLSGEQKKAIVDLLFKTNRKVTVKQLKEDYFKKIECFDSVEISGVEDRFNASLGTYHDLLKIIKDKDFLDNEENEDILEDIVLTLTLFEDREMIEERLKTYAHLFDDKVMKQLKRRRYTGWGRLSRKLINGIRDKQSGKTILDFLKSDGFANRNFMQLIHDDSLTFKEDIQKAQVSGQGDSLHEHIANLAGSPAIKKGILQTVKVVDELVKVMGRHKPENIVIEMARENQTTQKGQKNSRERMKRIEEGIKELGSQILKEHPVENTQLQNEKLYLYYLQNGRDMYVDQELDINRLSDYDVDHIVPQSFLKDDSIDNKVLTRSDKARGKSDNVPSEEVVKKMKNYWRQLLNAKLITQRKFDNLTKAERGGLSELDKAGFIKRQLVETRQITKHVAQILDSRMNTKYDENDKLIREVKVITLKSKLVSDFRKDFQFYKVREINNYHHAHDAYLNAVVGTALIKKYPKLESEFVYGDYKVYDVRKMIAKSEQEIGKATAKYFFYSNIMNFFKTEITLANGEIRKRPLIETNGETGEIVWDKGRDFATVRKVLSMPQVNIVKKTEVQTGGFSKESILPKRNSDKLIARKKDWDPKKYGGFDSPTVAYSVLVVAKVEKGKSKKLKSVKELLGITIMERSSFEKNPIDFLEAKGYKEVKKDLIIKLPKYSLFELENGRKRMLASAGELQKGNELALPSKYVNFLYLASHYEKLKGSPEDNEQKQLFVEQHKHYLDEIIEQISEFSKRVILADANLDKVLSAYNKHRDKPIREQAENIIHLFTLTNLGAPAAFKYFDTTIDRKRYTSTKEVLDATLIHQSITGLYETRIDLSQLGGDGGGGSPAPGGGGGTLGDQGSRGSDPLPEPRVTLTVEGIPTEFLVNTGAEHSVLTKPMGKMGSKRTVVAGATGSKVYPWTTKRLLKIGQKQVTHSFLVIPECPAPLLGRDLLTKLKAQIQFSTEGPQVTWEDRPAMCLVLNLEEEYRLHEKPVPPSIDPSWLQLFPMVWAEKAGMGLANQVPPVVVELKSDASPVAVRQYPMSKEAREGIRPHIQRFLDLGILVPCQSPWNTPLLPVKKPGTNDYRPVQDLREVNKRVQDIHPTVPNPYNLLSSLPPSHTWYSVLDLKDAFFCLKLHPNSQPLFAFEWRDPEKGNTGQLTWTRLPQGFKNSPTLFNEALHRDLASFRALNPQVVMLQYVDDLLVAAPTYRDCKEGTRRLLQELSKLGYRVSAKKAQLCREEVTYLGYLLKGGKRWLTPARKATVMKIPTPTTPRQVREFLGTAGFCRLWIPGFASLAAPLYPLTRPKVPFTWTEAHQEAFGRIKEALLSAPALALPDLTKPFALYVDEKEGVARGVLTQTLGPWRRPVAYLSKKLDPVASGWPTCLKAIAAVALLLKDADKLTLGQNVLVIAPHNLESIVRQPPDRWMTNARMTHYQSLLLNERVSFAPPAILNPATLLPVESDDTPIHICSEILAEETGTRPDLRDQPLPGVPAWYTDGSSFIMDGRRQAGAAIVDNKRTVWASNLPEGTSAQKAELIALTQALRLAEGKSINIYTDSRYAFATAHVHGAIYKQRGWLTSAGKDIKNKEEILALLEAIHLPKRVAIIHCPGHQRGTDPVATGNRKADEAAKQAAQSTRILTETTKNAGKRTADGSEFEKRTADGSEFESPKKKAKVE

SEQ ID NO: 6990 - protein, 2088 aa, synthetic construct
MPAAKRVKLDGGDKKYSIGLDIGTNSVGWAVITDEYKVPSKKFKVLGNTDRHSIKKNLIGALLFDSGETAEATRLKRTARRRYTRRKNRICYLQEIFSNEMAKVDDSFFHRLEESFLVEEDKKHERHPIFGNIVDEVAYHEKYPTIYHLRKKLVDSTDKADLRLIYLALAHMIKFRGHFLIEGDLNPDNSDVDKLFIQLVQTYNQLFEENPINASGVDAKAILSARLSKSRRLENLIAQLPGEKKNGLFGNLIALSLGLTPNFKSNFDLAEDAKLQLSKDTYDDDLDNLLAQIGDQYADLFLAAKNLSDAILLSDILRVNTEITKAPLSASMIKRYDEHHQDLTLLKALVRQQLPEKYKEIFFDQSKNGYAGYIDGGASQEEFYKFIKPILEKMDGTEELLVKLNREDLLRKQRTFDNGSIPHQIHLGELHAILRRQEDFYPFLKDNREKIEKILTFRIPYYVGPLARGNSRFAWMTRKSEETITPWNFEEVVDKGASAQSFIERMTNFDKNLPNEKVLPKHSLLYEYFTVYNELTKVKYVTEGMRKPAFLSGEQKKAIVDLLFKTNRKVTVKQLKEDYFKKIECFDSVEISGVEDRFNASLGTYHDLLKIIKDKDFLDNEENEDILEDIVLTLTLFEDREMIEERLKTYAHLFDDKVMKQLKRRRYTGWGRLSRKLINGIRDKQSGKTILDFLKSDGFANRNFMQLIHDDSLTFKEDIQKAQVSGQGDSLHEHIANLAGSPAIKKGILQTVKVVDELVKVMGRHKPENIVIEMARENQTTQKGQKNSRERMKRIEEGIKELGSQILKEHPVENTQLQNEKLYLYYLQNGRDMYVDQELDINRLSDYDVDHIVPQSFLKDDSIDNKVLTRSDKARGKSDNVPSEEVVKKMKNYWRQLLNAKLITQRKFDNLTKAERGGLSELDKAGFIKRQLVETRQITKHVAQILDSRMNTKYDENDKLIREVKVITLKSKLVSDFRKDFQFYKVREINNYHHAHDAYLNAVVGTALIKKYPKLESEFVYGDYKVYDVRKMIAKSEQEIGKATAKYFFYSNIMNFFKTEITLANGEIRKRPLIETNGETGEIVWDKGRDFATVRKVLSMPQVNIVKKTEVQTGGFSKESILPKRNSDKLIARKKDWDPKKYGGFDSPTVAYSVLVVAKVEKGKSKKLKSVKELLGITIMERSSFEKNPIDFLEAKGYKEVKKDLIIKLPKYSLFELENGRKRMLASAGELQKGNELALPSKYVNFLYLASHYEKLKGSPEDNEQKQLFVEQHKHYLDEIIEQISEFSKRVILADANLDKVLSAYNKHRDKPIREQAENIIHLFTLTNLGAPAAFKYFDTTIDRKRYTSTKEVLDATLIHQSITGLYETRIDLSQLGGDGGGGSPAPGGGGGTLQLDDEYRLYSPLVKPDQNIQFWLEQFPQAWAETAGMGLAKQVPPQVIQLKASATPVSVRQYPLSKEAQEGIRPHVQRLIQQGILVPVQSPWNTPLLPVRKPGTNDYRPVQDLREVNKRVQDIHPTVPNPYNLLCALPPQRSWYTVLDLKDAFFCLRLHPTSQPLFAFEWRDPGTGRTGQLTWTRLPQGFKNSPTIFDEALHRDLANFRIQHPQVTLLQYVDDLLLAGATKQDCLEGTKALLLELSDLGYRASAKKAQICRREVTYLGYSLRDGQRWLTEARKKTVVQIPAPTTAKQVREFLGTAGFCRLWIPGFATLAAPLYPLTKEKGEFSWAPEHQKAFDAIKKALLSAPALALPDVTKPFTLYVDERKGVARGVLTQTLGPWRRPVAYLSKKLDPVASGWPVCLKAIAAVAILVKDADKLTLGQNITVIAPHALENIVRQPPDRWMTNARMTHYQSLLLTERVTFAPPAALNPATLLPEETDEPVTHDCHQLLIEETGVRKDLTDIPLTGEVLTWFTDGSSYVVEGKRMAGAAVVDGTRTIWASSLPEGTSAQKAELMALTQALRLAEGKSINIYTDSRYAFATAHVHGAIYKQRGLLTSAGREIKNKEEILSLLEALHLPKRLAIIHCPGHQKAKDPISRGNQMADRVAKQAAQGVNLLAGKRTADGSEFEKRTADGSEFESPKKKAKVE

SEQ ID NO: 6991 - protein, 2174 aa, synthetic construct
MPAAKRVKLDGGDKKYSIGLDIGTNSVGWAVITDEYKVPSKKFKVLGNTDRHSIKKNLIGALLFDSGETAEATRLKRTARRRYTRRKNRICYLQEIFSNEMAKVDDSFFHRLEESFLVEEDKKHERHPIFGNIVDEVAYHEKYPTIYHLRKKLVDSTDKADLRLIYLALAHMIKFRGHFLIEGDLNPDNSDVDKLFIQLVQTYNQLFEENPINASGVDAKAILSARLSKSRRLENLIAQLPGEKKNGLFGNLIALSLGLTPNFKSNFDLAEDAKLQLSKDTYDDDLDNLLAQIGDQYADLFLAAKNLSDAILLSDILRVNTEITKAPLSASMIKRYDEHHQDLTLLKALVRQQLPEKYKEIFFDQSKNGYAGYIDGGASQEEFYKFIKPILEKMDGTEELLVKLNREDLLRKQRTFDNGSIPHQIHLGELHAILRRQEDFYPFLKDNREKIEKILTFRIPYYVGPLARGNSRFAWMTRKSEETITPWNFEEVVDKGASAQSFIERMTNFDKNLPNEKVLPKHSLLYEYFTVYNELTKVKYVTEGMRKPAFLSGEQKKAIVDLLFKTNRKVTVKQLKEDYFKKIECFDSVEISGVEDRFNASLGTYHDLLKIIKDKDFLDNEENEDILEDIVLTLTLFEDREMIEERLKTYAHLFDDKVMKQLKRRRYTGWGRLSRKLINGIRDKQSGKTILDFLKSDGFANRNFMQLIHDDSLTFKEDIQKAQVSGQGDSLHEHIANLAGSPAIKKGILQTVKVVDELVKVMGRHKPENIVIEMARENQTTQKGQKNSRERMKRIEEGIKELGSQILKEHPVENTQLQNEKLYLYYLQNGRDMYVDQELDINRLSDYDVDHIVPQSFLKDDSIDNKVLTRSDKARGKSDNVPSEEVVKKMKNYWRQLLNAKLITQRKFDNLTKAERGGLSELDKAGFIKRQLVETRQITKHVAQILDSRMNTKYDENDKLIREVKVITLKSKLVSDFRKDFQFYKVREINNYHHAHDAYLNAVVGTALIKKYPKLESEFVYGDYKVYDVRKMIAKSEQEIGKATAKYFFYSNIMNFFKTEITLANGEIRKRPLIETNGETGEIVWDKGRDFATVRKVLSMPQVNIVKKTEVQTGGFSKESILPKRNSDKLIARKKDWDPKKYGGFDSPTVAYSVLVVAKVEKGKSKKLKSVKELLGITIMERSSFEKNPIDFLEAKGYKEVKKDLIIKLPKYSLFELENGRKRMLASAGELQKGNELALPSKYVNFLYLASHYEKLKGSPEDNEQKQLFVEQHKHYLDEIIEQISEFSKRVILADANLDKVLSAYNKHRDKPIREQAENIIHLFTLTNLGAPAAFKYFDTTIDRKRYTSTKEVLDATLIHQSITGLYETRIDLSQLGGDGGGGSPAPGGGGGMDPLQLLQPLEAEIKGTKLKAHWNSGATITCVPEAFLEDERPIQTMLIKTIHGEKQQDVYYLTFKVQGRKVEAEVLASPYDYILLNPSDVPWLMKKPLQLTVLVPLHEYQERLLQQTALPKEQKELLQKLFLKYDALWQHWENQVGHRRIKPHNIATGTLAPRPQKQYPINPKAKPSIQIVIDDLLKQGVLIQQNSTMNTPVYPVPKPDGKWRMVLDYREVNKTIPLIAAQNQHSAGILSSIYRGKYKTTLDLTNGFWAHPITPESYWLTAFTWQGKQYCWTRLPQGFLNSPALFNADVVDLLKEIPNVQAYVDDIYISHDDPQEHLEQLEKIFSILLNAGYVVSLKKSEIAQREVEFLGFNITKEGRGLTDTFKQKLLNITPPKDLKQLQSILGLLNFARNFIPNYSELVKPLYTIVAPANGKFISWTEDNSNQLQHIISVLNQADNLEERNPETRLIIKVNSSPSAGYIRYYNEGSKRPIMYVNYIFSKAEAKFTQTEKLLTTMHKGLIKAMDLAMGQEILVYSPIVSMTKIQRTPLPERKALPVRWITWMTYLEDPRIQFHYDKSLPELQQIPNVTEDVIAKTKHPSEFAMVFYTDGSAIKHPDVNKSHSAGMGIAQVQFIPEYKIVHQWSIPLGDHTAQLAEIAAVEFACKKALKISGPVLIVTDSFYVAESANKELPYWKSNGFLNNKKKPLRHVSKWKSIAECLQLKPDIIIMHEKGHQQPMTTLHTEGNNLADKLATQGSYVVHAGKRTADGSEFEKRTADGSEFESPKKKAKVE

SEQ ID NO: 6992 - protein, 2092 aa, synthetic construct
MPAAKRVKLDGGDKKYSIGLDIGTNSVGWAVITDEYKVPSKKFKVLGNTDRHSIKKNLIGALLFDSGETAEATRLKRTARRRYTRRKNRICYLQEIFSNEMAKVDDSFFHRLEESFLVEEDKKHERHPIFGNIVDEVAYHEKYPTIYHLRKKLVDSTDKADLRLIYLALAHMIKFRGHFLIEGDLNPDNSDVDKLFIQLVQTYNQLFEENPINASGVDAKAILSARLSKSRRLENLIAQLPGEKKNGLFGNLIALSLGLTPNFKSNFDLAEDAKLQLSKDTYDDDLDNLLAQIGDQYADLFLAAKNLSDAILLSDILRVNTEITKAPLSASMIKRYDEHHQDLTLLKALVRQQLPEKYKEIFFDQSKNGYAGYIDGGASQEEFYKFIKPILEKMDGTEELLVKLNREDLLRKQRTFDNGSIPHQIHLGELHAILRRQEDFYPFLKDNREKIEKILTFRIPYYVGPLARGNSRFAWMTRKSEETITPWNFEEVVDKGASAQSFIERMTNFDKNLPNEKVLPKHSLLYEYFTVYNELTKVKYVTEGMRKPAFLSGEQKKAIVDLLFKTNRKVTVKQLKEDYFKKIECFDSVEISGVEDRFNASLGTYHDLLKIIKDKDFLDNEENEDILEDIVLTLTLFEDREMIEERLKTYAHLFDDKVMKQLKRRRYTGWGRLSRKLINGIRDKQSGKTILDFLKSDGFANRNFMQLIHDDSLTFKEDIQKAQVSGQGDSLHEHIANLAGSPAIKKGILQTVKVVDELVKVMGRHKPENIVIEMARENQTTQKGQKNSRERMKRIEEGIKELGSQILKEHPVENTQLQNEKLYLYYLQNGRDMYVDQELDINRLSDYDVDHIVPQSFLKDDSIDNKVLTRSDKARGKSDNVPSEEVVKKMKNYWRQLLNAKLITQRKFDNLTKAERGGLSELDKAGFIKRQLVETRQITKHVAQILDSRMNTKYDENDKLIREVKVITLKSKLVSDFRKDFQFYKVREINNYHHAHDAYLNAVVGTALIKKYPKLESEFVYGDYKVYDVRKMIAKSEQEIGKATAKYFFYSNIMNFFKTEITLANGEIRKRPLIETNGETGEIVWDKGRDFATVRKVLSMPQVNIVKKTEVQTGGFSKESILPKRNSDKLIARKKDWDPKKYGGFDSPTVAYSVLVVAKVEKGKSKKLKSVKELLGITIMERSSFEKNPIDFLEAKGYKEVKKDLIIKLPKYSLFELENGRKRMLASAGELQKGNELALPSKYVNFLYLASHYEKLKGSPEDNEQKQLFVEQHKHYLDEIIEQISEFSKRVILADANLDKVLSAYNKHRDKPIREQAENIIHLFTLTNLGAPAAFKYFDTTIDRKRYTSTKEVLDATLIHQSITGLYETRIDLSQLGGDGGGGSPAPGGGGGVLNLEEEYRLHEKPVPSSIDPSWLQLFPTVWAERAGMGLANQVPPVVVELRSGASPVAVRQYPMSKEAREGIRPHIQRFLDLGVLVPCQSPWNTPLLPVKKPGTNDYRPVQDLREINKRVQDIHPTVPNPYNLLSSLPPSHTWYSVLDLKDAFFCLKLHPNSQPLFAFEWRDPEKGNTGQLTWTRLPQGFKNSPTLFDEALHRDLAPFRALNPQVVLLQYVDDLLVAAPTYRDCKEGTQKLLQELSKLGYRVSAKKAQLCQKEVTYLGYLLKEGKRWLTPARKATVMKIPPPTTPRQVREFLGTAGFCRLWIPGFASLAAPLYPLTKESIPFIWTEEHQKAFDRIKEALLSAPALALPDLTKPFTLYVDERAGVARGVLTQTLGPWRRPVAYLSKKLDPVASGWPTCLKAVAAVALLLKDADKLTLGQNVTVIASHSLESIVRQPPDRWMTNARMTHYQSLLLNERVSFAPPAVLNPATLLPVESEATPVHRCSEILAEETGTRRDLKDQPLPGVPAWYTDGSSFIAEGKRRAGAAIVDGKRTVWASSLPEGTSAQKAELVALTQALRLAEGKDINIYTDSRYAFATAHIHGAIYKQRGLLTSAGKDIKNKEEILALLEAIHLPKRVAIIHCPGHQKGNDPVATGNRRADEAAKQAALSTRVLAETTKPAGKRTADGSEFEKRTADGSEFESPKKKAKVE

SEQ ID NO: 6993 - protein, 2100 aa, synthetic construct
MPAAKRVKLDGGDKKYSIGLDIGTNSVGWAVITDEYKVPSKKFKVLGNTDRHSIKKNLIGALLFDSGETAEATRLKRTARRRYTRRKNRICYLQEIFSNEMAKVDDSFFHRLEESFLVEEDKKHERHPIFGNIVDEVAYHEKYPTIYHLRKKLVDSTDKADLRLIYLALAHMIKFRGHFLIEGDLNPDNSDVDKLFIQLVQTYNQLFEENPINASGVDAKAILSARLSKSRRLENLIAQLPGEKKNGLFGNLIALSLGLTPNFKSNFDLAEDAKLQLSKDTYDDDLDNLLAQIGDQYADLFLAAKNLSDAILLSDILRVNTEITKAPLSASMIKRYDEHHQDLTLLKALVRQQLPEKYKEIFFDQSKNGYAGYIDGGASQEEFYKFIKPILEKMDGTEELLVKLNREDLLRKQRTFDNGSIPHQIHLGELHAILRRQEDFYPFLKDNREKIEKILTFRIPYYVGPLARGNSRFAWMTRKSEETITPWNFEEVVDKGASAQSFIERMTNFDKNLPNEKVLPKHSLLYEYFTVYNELTKVKYVTEGMRKPAFLSGEQKKAIVDLLFKTNRKVTVKQLKEDYFKKIECFDSVEISGVEDRFNASLGTYHDLLKIIKDKDFLDNEENEDILEDIVLTLTLFEDREMIEERLKTYAHLFDDKVMKQLKRRRYTGWGRLSRKLINGIRDKQSGKTILDFLKSDGFANRNFMQLIHDDSLTFKEDIQKAQVSGQGDSLHEHIANLAGSPAIKKGILQTVKVVDELVKVMGRHKPENIVIEMARENQTTQKGQKNSRERMKRIEEGIKELGSQILKEHPVENTQLQNEKLYLYYLQNGRDMYVDQELDINRLSDYDVDHIVPQSFLKDDSIDNKVLTRSDKARGKSDNVPSEEVVKKMKNYWRQLLNAKLITQRKFDNLTKAERGGLSELDKAGFIKRQLVETRQITKHVAQILDSRMNTKYDENDKLIREVKVITLKSKLVSDFRKDFQFYKVREINNYHHAHDAYLNAVVGTALIKKYPKLESEFVYGDYKVYDVRKMIAKSEQEIGKATAKYFFYSNIMNFFKTEITLANGEIRKRPLIETNGETGEIVWDKGRDFATVRKVLSMPQVNIVKKTEVQTGGFSKESILPKRNSDKLIARKKDWDPKKYGGFDSPTVAYSVLVVAKVEKGKSKKLKSVKELLGITIMERSSFEKNPIDFLEAKGYKEVKKDLIIKLPKYSLFELENGRKRMLASAGELQKGNELALPSKYVNFLYLASHYEKLKGSPEDNEQKQLFVEQHKHYLDEIIEQISEFSKRVILADANLDKVLSAYNKHRDKPIREQAENIIHLFTLTNLGAPAAFKYFDTTIDRKRYTSTKEVLDATLIHQSITGLYETRIDLSQLGGDGGGGGGGSPAPGGTVSLQDEHRLFDIPVTTSLPDVWLQDFPQAWAETGGLGRAKCQAPIIIDLKPTAVPVSIKQYPMSLEAHMGIRQHIIKFLELGVLRPCRSPWNTPLLPVKKPGTQDYRPVQDLREINKRTVDIHPTVPNPYNLLSTLKPDYSWYTVLDLKDAFFCLPLAPQSQELFAFEWKDPERGISGQLTWTRLPQGFKNSPTLFNEALHRDLTDFRTQHPEVTLLQYVDDLLLAAPTKKACTQGTRHLLQELGEKGYRASAKKAQICQTKVTYLGYILSEGKRWLTPGRIETVARIPPPRNPREVREFLGTAGFCRLWIPGFAELAAPLYALTKPSTPFTWQTEHQLAFEALKKALLSAPALGLPDTSKPFTLFLDERQGIAKGVLTQKLGPWKRPVAYLSKKLDPVAAGWPPCLRIMAATAMLVKDSAKLTLGQPLTVITPHTLEAIVRQPPDRWITNARLTHYQALLLDTDRVQFGPPVTLNPATLLPVPENQPSPHDCRQVLAETHGTREDLKDQELPDADHTWYTDGSSYLDSGTRRAGAAVVDGHNTIWAQSLPPGTSAQKAELIALTKALELSKGKKANIYTDSRYAFATAHTHGSIYERRGWLTSEGKEIKNKAEIIALLKALFLPQEVAIIHCPGHQKGQDPVAVGNRQADRVARQAAMAEVLTLATEPDNTSHITAGKRTADGSEFEKRTADGSEFESPKKKAKVE

SEQ ID NO: 6994 - protein, 2171 aa, synthetic construct
MPAAKRVKLDGGDKKYSIGLDIGTNSVGWAVITDEYKVPSKKFKVLGNTDRHSIKKNLIGALLFDSGETAEATRLKRTARRRYTRRKNRICYLQEIFSNEMAKVDDSFFHRLEESFLVEEDKKHERHPIFGNIVDEVAYHEKYPTIYHLRKKLVDSTDKADLRLIYLALAHMIKFRGHFLIEGDLNPDNSDVDKLFIQLVQTYNQLFEENPINASGVDAKAILSARLSKSRRLENLIAQLPGEKKNGLFGNLIALSLGLTPNFKSNFDLAEDAKLQLSKDTYDDDLDNLLAQIGDQYADLFLAAKNLSDAILLSDILRVNTEITKAPLSASMIKRYDEHHQDLTLLKALVRQQLPEKYKEIFFDQSKNGYAGYIDGGASQEEFYKFIKPILEKMDGTEELLVKLNREDLLRKQRTFDNGSIPHQIHLGELHAILRRQEDFYPFLKDNREKIEKILTFRIPYYVGPLARGNSRFAWMTRKSEETITPWNFEEVVDKGASAQSFIERMTNFDKNLPNEKVLPKHSLLYEYFTVYNELTKVKYVTEGMRKPAFLSGEQKKAIVDLLFKTNRKVTVKQLKEDYFKKIECFDSVEISGVEDRFNASLGTYHDLLKIIKDKDFLDNEENEDILEDIVLTLTLFEDREMIEERLKTYAHLFDDKVMKQLKRRRYTGWGRLSRKLINGIRDKQSGKTILDFLKSDGFANRNFMQLIHDDSLTFKEDIQKAQVSGQGDSLHEHIANLAGSPAIKKGILQTVKVVDELVKVMGRHKPENIVIEMARENQTTQKGQKNSRERMKRIEEGIKELGSQILKEHPVENTQLQNEKLYLYYLQNGRDMYVDQELDINRLSDYDVDHIVPQSFLKDDSIDNKVLTRSDKARGKSDNVPSEEVVKKMKNYWRQLLNAKLITQRKFDNLTKAERGGLSELDKAGFIKRQLVETRQITKHVAQILDSRMNTKYDENDKLIREVKVITLKSKLVSDFRKDFQFYKVREINNYHHAHDAYLNAVVGTALIKKYPKLESEFVYGDYKVYDVRKMIAKSEQEIGKATAKYFFYSNIMNFFKTEITLANGEIRKRPLIETNGETGEIVWDKGRDFATVRKVLSMPQVNIVKKTEVQTGGFSKESILPKRNSDKLIARKKDWDPKKYGGFDSPTVAYSVLVVAKVEKGKSKKLKSVKELLGITIMERSSFEKNPIDFLEAKGYKEVKKDLIIKLPKYSLFELENGRKRMLASAGELQKGNELALPSKYVNFLYLASHYEKLKGSPEDNEQKQLFVEQHKHYLDEIIEQISEFSKRVILADANLDKVLSAYNKHRDKPIREQAENIIHLFTLTNLGAPAAFKYFDTTIDRKRYTSTKEVLDATLIHQSITGLYETRIDLSQLGGDGGGGGGGSPAPGGMDLLKPLTVERKGVKIKGYWNSQADITCVPKDLLQGEEPVRQQNVTTIHGTQEGDVYYVNLKIDGRRINTEVIGTTLDYAIITPGDVPWILKKPLELTIKLDLEEQQGTLLNNSILSKKGKEELKQLFEKYSALWQSWENQVGHRRIRPHKIATGTVKPTPQKQYHINPKAKPDIQIVINDLLKQGVLIQKESTMNTPVYPVPKPNGRWRMVLDYRAVNKVTPLIAVQNQHSYGILGSLFKGRYKTTIDLSNGFWAHPIVPEDYWITAFTWQGKQYCWTVLPQGFLNSPGLFTGDVVDLLQGIPNVEVYVDDVYISHDSEKEHLEYLDILFNRLKEAGYIISLKKSNIANSIVDFLGFQITNEGRGLTDTFKEKLENITAPTTLKQLQSILGLLNFARNFIPDFTELIAPLYALIPKSTKNYVPWQIEHSTTLETLITKLNGAEYLQGRKGDKTLIMKVNASYTTGYIRYYNEGEKKPISYVSIVFSKTELKFTELEKLLTTVHKGLLKALDLSMGQNIHVYSPIVSMQNIQKTPQTAKKALASRWLSWLSYLEDPRIRFFYDPQMPALKDLPAVDTGKDNKKHPSNFQHIFYTDGSAITSPTKEGHLNAGMGIVYFINKDGNLQKQQEWSISLGNHTAQFAEIAAFEFALKKCLPLGGNILVVTDSNYVAKAYNEELDVWASNGFVNNRKKPLKHISKWKSVADLKRLRPDVVVTHEPGHQKLDSSPHAYGNNLADQLATQASFKVHAGKRTADGSEFEKRTADGSEFESPKKKAKVE

SEQ ID NO: 6995 - protein, 2093 aa, synthetic construct
MPAAKRVKLDGGDKKYSIGLDIGTNSVGWAVITDEYKVPSKKFKVLGNTDRHSIKKNLIGALLFDSGETAEATRLKRTARRRYTRRKNRICYLQEIFSNEMAKVDDSFFHRLEESFLVEEDKKHERHPIFGNIVDEVAYHEKYPTIYHLRKKLVDSTDKADLRLIYLALAHMIKFRGHFLIEGDLNPDNSDVDKLFIQLVQTYNQLFEENPINASGVDAKAILSARLSKSRRLENLIAQLPGEKKNGLFGNLIALSLGLTPNFKSNFDLAEDAKLQLSKDTYDDDLDNLLAQIGDQYADLFLAAKNLSDAILLSDILRVNTEITKAPLSASMIKRYDEHHQDLTLLKALVRQQLPEKYKEIFFDQSKNGYAGYIDGGASQEEFYKFIKPILEKMDGTEELLVKLNREDLLRKQRTFDNGSIPHQIHLGELHAILRRQEDFYPFLKDNREKIEKILTFRIPYYVGPLARGNSRFAWMTRKSEETITPWNFEEVVDKGASAQSFIERMTNFDKNLPNEKVLPKHSLLYEYFTVYNELTKVKYVTEGMRKPAFLSGEQKKAIVDLLFKTNRKVTVKQLKEDYFKKIECFDSVEISGVEDRFNASLGTYHDLLKIIKDKDFLDNEENEDILEDIVLTLTLFEDREMIEERLKTYAHLFDDKVMKQLKRRRYTGWGRLSRKLINGIRDKQSGKTILDFLKSDGFANRNFMQLIHDDSLTFKEDIQKAQVSGQGDSLHEHIANLAGSPAIKKGILQTVKVVDELVKVMGRHKPENIVIEMARENQTTQKGQKNSRERMKRIEEGIKELGSQILKEHPVENTQLQNEKLYLYYLQNGRDMYVDQELDINRLSDYDVDHIVPQSFLKDDSIDNKVLTRSDKARGKSDNVPSEEVVKKMKNYWRQLLNAKLITQRKFDNLTKAERGGLSELDKAGFIKRQLVETRQITKHVAQILDSRMNTKYDENDKLIREVKVITLKSKLVSDFRKDFQFYKVREINNYHHAHDAYLNAVVGTALIKKYPKLESEFVYGDYKVYDVRKMIAKSEQEIGKATAKYFFYSNIMNFFKTEITLANGEIRKRPLIETNGETGEIVWDKGRDFATVRKVLSMPQVNIVKKTEVQTGGFSKESILPKRNSDKLIARKKDWDPKKYGGFDSPTVAYSVLVVAKVEKGKSKKLKSVKELLGITIMERSSFEKNPIDFLEAKGYKEVKKDLIIKLPKYSLFELENGRKRMLASAGELQKGNELALPSKYVNFLYLASHYEKLKGSPEDNEQKQLFVEQHKHYLDEIIEQISEFSKRVILADANLDKVLSAYNKHRDKPIREQAENIIHLFTLTNLGAPAAFKYFDTTIDRKRYTSTKEVLDATLIHQSITGLYETRIDLSQLGGDGGGGGGGSPAPGGTLQLEEEYRLFEPESTQKQEMDIWLKNFPQAWAETGGMGTAHCQAPVLIQLKATATPISIRQYPMPHEAYQGIKPHIRRMLDQGILKPCQSPWNTPLLPVKKPGTEDYRPVQDLREVNKRVEDIHPTVPNPYNLLSTLPPSHPWYTVLDLKDAFFCLRLHSESQLLFAFEWRDPEIGLSGQLTWTRLPQGFKNSPTLFDEALHSDLADFRVRYPALVLLQYVDDLLLAAATRTECLEGTKALLETLGNKGYRASAKKAQICLQEVTYLGYSLKDGQRWLTKARKEAILSIPVPKNSRQVREFLGTAGYCRLWIPGFAELAAPLYPLTRPGTLFQWGTEQQLAFEDIKKALLSSPALGLPDITKPFELFIDENSGFAKGVLVQKLGPWKRPVAYLSKKLDTVASGWPPCLRMVAAIAILVKDAGKLTLGQPLTILTSHPVEALVRQPPNKWLSNARMTHYQAMLLDAERVHFGPTVSLNPATLLPLPSGGNHHDCLQILAETHGTRPDLTDQPLPDADLTWYTDGSSFIRNGEREAGAAVTTESEVIWAAPLPPGTSAQRAELIALTQALKMAEGKKLTVYTDSRYAFATTHVHGEIYRRRGLLTSEGKEIKNKNEILALLEALFLPKRLSIIHCPGHQKGDSPQAKGNRLADDTAKKAATETHSSLTVLPAGKRTADGSEFEKRTADGSEFESPKKKAKVE

SEQ ID NO: 6996 - protein, 2085 aa, synthetic construct
MPAAKRVKLDGGDKKYSIGLDIGTNSVGWAVITDEYKVPSKKFKVLGNTDRHSIKKNLIGALLFDSGETAEATRLKRTARRRYTRRKNRICYLQEIFSNEMAKVDDSFFHRLEESFLVEEDKKHERHPIFGNIVDEVAYHEKYPTIYHLRKKLVDSTDKADLRLIYLALAHMIKFRGHFLIEGDLNPDNSDVDKLFIQLVQTYNQLFEENPINASGVDAKAILSARLSKSRRLENLIAQLPGEKKNGLFGNLIALSLGLTPNFKSNFDLAEDAKLQLSKDTYDDDLDNLLAQIGDQYADLFLAAKNLSDAILLSDILRVNTEITKAPLSASMIKRYDEHHQDLTLLKALVRQQLPEKYKEIFFDQSKNGYAGYIDGGASQEEFYKFIKPILEKMDGTEELLVKLNREDLLRKQRTFDNGSIPHQIHLGELHAILRRQEDFYPFLKDNREKIEKILTFRIPYYVGPLARGNSRFAWMTRKSEETITPWNFEEVVDKGASAQSFIERMTNFDKNLPNEKVLPKHSLLYEYFTVYNELTKVKYVTEGMRKPAFLSGEQKKAIVDLLFKTNRKVTVKQLKEDYFKKIECFDSVEISGVEDRFNASLGTYHDLLKIIKDKDFLDNEENEDILEDIVLTLTLFEDREMIEERLKTYAHLFDDKVMKQLKRRRYTGWGRLSRKLINGIRDKQSGKTILDFLKSDGFANRNFMQLIHDDSLTFKEDIQKAQVSGQGDSLHEHIANLAGSPAIKKGILQTVKVVDELVKVMGRHKPENIVIEMARENQTTQKGQKNSRERMKRIEEGIKELGSQILKEHPVENTQLQNEKLYLYYLQNGRDMYVDQELDINRLSDYDVDHIVPQSFLKDDSIDNKVLTRSDKARGKSDNVPSEEVVKKMKNYWRQLLNAKLITQRKFDNLTKAERGGLSELDKAGFIKRQLVETRQITKHVAQILDSRMNTKYDENDKLIREVKVITLKSKLVSDFRKDFQFYKVREINNYHHAHDAYLNAVVGTALIKKYPKLESEFVYGDYKVYDVRKMIAKSEQEIGKATAKYFFYSNIMNFFKTEITLANGEIRKRPLIETNGETGEIVWDKGRDFATVRKVLSMPQVNIVKKTEVQTGGFSKESILPKRNSDKLIARKKDWDPKKYGGFDSPTVAYSVLVVAKVEKGKSKKLKSVKELLGITIMERSSFEKNPIDFLEAKGYKEVKKDLIIKLPKYSLFELENGRKRMLASAGELQKGNELALPSKYVNFLYLASHYEKLKGSPEDNEQKQLFVEQHKHYLDEIIEQISEFSKRVILADANLDKVLSAYNKHRDKPIREQAENIIHLFTLTNLGAPAAFKYFDTTIDRKRYTSTKEVLDATLIHQSITGLYETRIDLSQLGGDGGGGGGGSPAPGGVPWLTQQPLQLTILVPLQEYQEKILSKTALPEDQKQQLKTLFVKYDNLWQHWENQVGHRKIRPHNIATGDYPPRPQKQYPINPKAKPSIQIVIDDLLKQGVLTPQNSTMNTPVYPVPKPDGRWRMVLDYREVNKTIPLTAAQNQHSAGILATIVRQKYKTTLDLANGFWAHPITPESYWLTAFTWQGKQYCWTRLPQGFLNSPALFNADVVDLLKEIPNVQVYVDDIYLSHDDPKEHVQQLEKVFQILLQAGYVVSLKKSEIGQKTVEFLGFNITKEGRGLTDTFKTKLLNITPPKDLKQLQSILGLLNFARNFIPNFAELVQPLYNLIAPAKGKYIEWSEENTKQLNMVIEALNTASNLEERLPEQRLVIKVNTSPSAGYVRYYNETGKKPIMYLNYVFSKAELKFSMLEKLLTTMHKALIKAMDLAMGQEILVYSPIVSMTKIQKTPLPERKALPIRWITWMTYLEDPRIQFHYDKTLPELKHIPDVYTSSQSPVKHPSQYEGVFYTDGSAIKSPDPTKSNNAGMGIVHATYKPEYQVLNQWSIPLGNHTAQMAEIAAVEFACKKALKIPGPVLVITDSFYVAESANKELPYWKSNGFVNNKKKPLKHISKWKSIAECLSMKPDITIQHEKGISLQIPVFILKGNALADKLATQGSYVVNAGKRTADGSEFEKRTADGSEFESPKKKAKVE

SEQ ID NO: 6997 - protein, 2085 aa, synthetic construct
MPAAKRVKLDGGDKKYSIGLDIGTNSVGWAVITDEYKVPSKKFKVLGNTDRHSIKKNLIGALLFDSGETAEATRLKRTARRRYTRRKNRICYLQEIFSNEMAKVDDSFFHRLEESFLVEEDKKHERHPIFGNIVDEVAYHEKYPTIYHLRKKLVDSTDKADLRLIYLALAHMIKFRGHFLIEGDLNPDNSDVDKLFIQLVQTYNQLFEENPINASGVDAKAILSARLSKSRRLENLIAQLPGEKKNGLFGNLIALSLGLTPNFKSNFDLAEDAKLQLSKDTYDDDLDNLLAQIGDQYADLFLAAKNLSDAILLSDILRVNTEITKAPLSASMIKRYDEHHQDLTLLKALVRQQLPEKYKEIFFDQSKNGYAGYIDGGASQEEFYKFIKPILEKMDGTEELLVKLNREDLLRKQRTFDNGSIPHQIHLGELHAILRRQEDFYPFLKDNREKIEKILTFRIPYYVGPLARGNSRFAWMTRKSEETITPWNFEEVVDKGASAQSFIERMTNFDKNLPNEKVLPKHSLLYEYFTVYNELTKVKYVTEGMRKPAFLSGEQKKAIVDLLFKTNRKVTVKQLKEDYFKKIECFDSVEISGVEDRFNASLGTYHDLLKIIKDKDFLDNEENEDILEDIVLTLTLFEDREMIEERLKTYAHLFDDKVMKQLKRRRYTGWGRLSRKLINGIRDKQSGKTILDFLKSDGFANRNFMQLIHDDSLTFKEDIQKAQVSGQGDSLHEHIANLAGSPAIKKGILQTVKVVDELVKVMGRHKPENIVIEMARENQTTQKGQKNSRERMKRIEEGIKELGSQILKEHPVENTQLQNEKLYLYYLQNGRDMYVDQELDINRLSDYDVDHIVPQSFLKDDSIDNKVLTRSDKARGKSDNVPSEEVVKKMKNYWRQLLNAKLITQRKFDNLTKAERGGLSELDKAGFIKRQLVETRQITKHVAQILDSRMNTKYDENDKLIREVKVITLKSKLVSDFRKDFQFYKVREINNYHHAHDAYLNAVVGTALIKKYPKLESEFVYGDYKVYDVRKMIAKSEQEIGKATAKYFFYSNIMNFFKTEITLANGEIRKRPLIETNGETGEIVWDKGRDFATVRKVLSMPQVNIVKKTEVQTGGFSKESILPKRNSDKLIARKKDWDPKKYGGFDSPTVAYSVLVVAKVEKGKSKKLKSVKELLGITIMERSSFEKNPIDFLEAKGYKEVKKDLIIKLPKYSLFELENGRKRMLASAGELQKGNELALPSKYVNFLYLASHYEKLKGSPEDNEQKQLFVEQHKHYLDEIIEQISEFSKRVILADANLDKVLSAYNKHRDKPIREQAENIIHLFTLTNLGAPAAFKYFDTTIDRKRYTSTKEVLDATLIHQSITGLYETRIDLSQLGGDGGGGGGGSPAPGGVPWLTQQPLQLTILVPLQEYQEKILSKTALPEDQKQQLKTLFVKYDNLWQHWENQVGHRKIRPHNIATGDYPPRPQKQYPINPKAKPSIQIVIDDLLKQGVLTPQNSTMNTPVYPVPKPDGRWRMVLDYREVNKTIPLTAAQNQHSAGILATIVRQKYKTTLDLANGFWAHPITPESYWLTAFTWQGKQYCWTRLPQGFLNSPALFNADVVDLLKEIPNVQVYVDDIYLSHDDPKEHVQQLEKVFQILLQAGYVVSLKKSEIGQKTVEFLGFNITKEGRGLTDTFKTKLLNITPPKDLKQLQSILGKLNFARNFIPNFAELVQPLYNLIAPAKGKYIEWSEENTKQLNMVIEALNTASNLEERLPEQRLVIKVNTSPSAGYVRYYNETGKKPIMYLNYVFSKAELKFSMLEKLLTTMHKALIKAMDLAMGQEILVYSPIVSMTKIQKTPLPERKALPIRWITWMTYLEDPRIQFHYDKTLPELKHIPDVYTSSQSPVKHPSQYEGVFYTDGSAIKSPDPTKSNNAGMGIVHATYKPEYQVLNQWSIPLGNHTAQMAEIAAVEFACKKALKIPGPVLVITDSFYVAESANKELPYWKSNGFVNNKKKPLKHISKWKSIAECLSMKPDITIQHEKGISLQIPVFILKGNALADKLATQGSYVVNAGKRTADGSEFEKRTADGSEFESPKKKAKVE

SEQ ID NO: 6998 - protein, 2094 aa, synthetic construct; identical to SEQ ID NO: 4520

SEQ ID NO: 6999 - protein, 2094 aa, synthetic construct
MPAAKRVKLDGGDKKYSIGLDIGTNSVGWAVITDEYKVPSKKFKVLGNTDRHSIKKNLIGALLFDSGETAEATRLKRTARRRYTRRKNRICYLQEIFSNEMAKVDDSFFHRLEESFLVEEDKKHERHPIFGNIVDEVAYHEKYPTIYHLRKKLVDSTDKADLRLIYLALAHMIKFRGHFLIEGDLNPDNSDVDKLFIQLVQTYNQLFEENPINASGVDAKAILSARLSKSRRLENLIAQLPGEKKNGLFGNLIALSLGLTPNFKSNFDLAEDAKLQLSKDTYDDDLDNLLAQIGDQYADLFLAAKNLSDAILLSDILRVNTEITKAPLSASMIKRYDEHHQDLTLLKALVRQQLPEKYKEIFFDQSKNGYAGYIDGGASQEEFYKFIKPILEKMDGTEELLVKLNREDLLRKQRTFDNGSIPHQIHLGELHAILRRQEDFYPFLKDNREKIEKILTFRIPYYVGPLARGNSRFAWMTRKSEETITPWNFEEVVDKGASAQSFIERMTNFDKNLPNEKVLPKHSLLYEYFTVYNELTKVKYVTEGMRKPAFLSGEQKKAIVDLLFKTNRKVTVKQLKEDYFKKIECFDSVEISGVEDRFNASLGTYHDLLKIIKDKDFLDNEENEDILEDIVLTLTLFEDREMIEERLKTYAHLFDDKVMKQLKRRRYTGWGRLSRKLINGIRDKQSGKTILDFLKSDGFANRNFMQLIHDDSLTFKEDIQKAQVSGQGDSLHEHIANLAGSPAIKKGILQTVKVVDELVKVMGRHKPENIVIEMARENQTTQKGQKNSRERMKRIEEGIKELGSQILKEHPVENTQLQNEKLYLYYLQNGRDMYVDQELDINRLSDYDVDHIVPQSFLKDDSIDNKVLTRSDKARGKSDNVPSEEVVKKMKNYWRQLLNAKLITQRKFDNLTKAERGGLSELDKAGFIKRQLVETRQITKHVAQILDSRMNTKYDENDKLIREVKVITLKSKLVSDFRKDFQFYKVREINNYHHAHDAYLNAVVGTALIKKYPKLESEFVYGDYKVYDVRKMIAKSEQEIGKATAKYFFYSNIMNFFKTEITLANGEIRKRPLIETNGETGEIVWDKGRDFATVRKVLSMPQVNIVKKTEVQTGGFSKESILPKRNSDKLIARKKDWDPKKYGGFDSPTVAYSVLVVAKVEKGKSKKLKSVKELLGITIMERSSFEKNPIDFLEAKGYKEVKKDLIIKLPKYSLFELENGRKRMLASAGELQKGNELALPSKYVNFLYLASHYEKLKGSPEDNEQKQLFVEQHKHYLDEIIEQISEFSKRVILADANLDKVLSAYNKHRDKPIREQAENIIHLFTLTNLGAPAAFKYFDTTIDRKRYTSTKEVLDATLIHQSITGLYETRIDLSQLGGDGGGGGGGSPAPGGTLGIEDEYRLHETSTEPDVSLGSTWLSDFPQAWAETGGMGLAVRQAPLIIPLKATSTPVSIQQYPMSHEARLGIKPHIQRLLDQGILVPCQSPWNTPLLPVKKPGTNDYRPVQDLREVNKRVEDIHPTVPNPYNLLSGLPPSHQWYTVLDLKDAFFCLRLHPTSQPLFAFEWRDPGMGISGQLTWTRLPQGFKNSPTLFNEALHRDLADFRIQHPDLILLQYVDDILLAATSELDCQQGTRALLQTLGDLGYRASAKKAQICQKQVKYLGYLLREGQRWLTEARKETVMGQPVPKTPRQLREFLGTAGFCRLWIPGFAEMAAPLYPLTKPGTLFSWGPDQQKAYQEIKQALLTAPALGLPDLTKPFELFVDEKQGYAKGVLTQKLGPWRRPVAYLSKKLDPVAAGWPPCLRMVAAIAVLTKDAGKLTMGQPLVILAPHAVEALVKQPPDRWLSNARMTHYQAMLLDTDRVQFGPVVALNPATLLPLPEEGAPHDCLEILAETHGTRPDLTDQPIPDADHTWYTDGSSFLQEGQRKAGAAVTTETEVIWAGALPAGTSAQRAELIALTQALKMAEGKRLNVYTDSRYAFATAHIHGEIYRRRGWLTSEGREIKNKSEILALLKALFLPKRLSIIHCLGHQKGDSAEARGNRLADQAAREAAIKTPPDTSTLLAGKRTADGSEFEKRTADGSEFESPKKKAKVE

SEQ ID NO: 7000 - protein, 2094 aa, synthetic construct
MPAAKRVKLDGGDKKYSIGLDIGTNSVGWAVITDEYKVPSKKFKVLGNTDRHSIKKNLIGALLFDSGETAEATRLKRTARRRYTRRKNRICYLQEIFSNEMAKVDDSFFHRLEESFLVEEDKKHERHPIFGNIVDEVAYHEKYPTIYHLRKKLVDSTDKADLRLIYLALAHMIKFRGHFLIEGDLNPDNSDVDKLFIQLVQTYNQLFEENPINASGVDAKAILSARLSKSRRLENLIAQLPGEKKNGLFGNLIALSLGLTPNFKSNFDLAEDAKLQLSKDTYDDDLDNLLAQIGDQYADLFLAAKNLSDAILLSDILRVNTEITKAPLSASMIKRYDEHHQDLTLLKALVRQQLPEKYKEIFFDQSKNGYAGYIDGGASQEEFYKFIKPILEKMDGTEELLVKLNREDLLRKQRTFDNGSIPHQIHLGELHAILRRQEDFYPFLKDNREKIEKILTFRIPYYVGPLARGNSRFAWMTRKSEETITPWNFEEVVDKGASAQSFIERMTNFDKNLPNEKVLPKHSLLYEYFTVYNELTKVKYVTEGMRKPAFLSGEQKKAIVDLLFKTNRKVTVKQLKEDYFKKIECFDSVEISGVEDRFNASLGTYHDLLKIIKDKDFLDNEENEDILEDIVLTLTLFEDREMIEERLKTYAHLFDDKVMKQLKRRRYTGWGRLSRKLINGIRDKQSGKTILDFLKSDGFANRNFMQLIHDDSLTFKEDIQKAQVSGQGDSLHEHIANLAGSPAIKKGILQTVKVVDELVKVMGRHKPENIVIEMARENQTTQKGQKNSRERMKRIEEGIKELGSQILKEHPVENTQLQNEKLYLYYLQNGRDMYVDQELDINRLSDYDVDHIVPQSFLKDDSIDNKVLTRSDKARGKSDNVPSEEVVKKMKNYWRQLLNAKLITQRKFDNLTKAERGGLSELDKAGFIKRQLVETRQITKHVAQILDSRMNTKYDENDKLIREVKVITLKSKLVSDFRKDFQFYKVREINNYHHAHDAYLNAVVGTALIKKYPKLESEFVYGDYKVYDVRKMIAKSEQEIGKATAKYFFYSNIMNFFKTEITLANGEIRKRPLIETNGETGEIVWDKGRDFATVRKVLSMPQVNIVKKTEVQTGGFSKESILPKRNSDKLIARKKDWDPKKYGGFDSPTVAYSVLVVAKVEKGKSKKLKSVKELLGITIMERSSFEKNPIDFLEAKGYKEVKKDLIIKLPKYSLFELENGRKRMLASAGELQKGNELALPSKYVNFLYLASHYEKLKGSPEDNEQKQLFVEQHKHYLDEIIEQISEFSKRVILADANLDKVLSAYNKHRDKPIREQAENIIHLFTLTNLGAPAAFKYFDTTIDRKRYTSTKEVLDATLIHQSITGLYETRIDLSQLGGDGGGGGGGSPAPGGTLNIEDEYRLHETSKEPDVSLGSTWLSDFPQAWAETGGMGLAVRQAPLIIPLKATSTPVSIKQYPMSQEARLGIKPHIQRLLDQGILVPCQSPWNTPLLPVKKPGTNDYRPVQDLREVNKRVEDIHPTVPNPYNLLSGLPPSHQWYTVLDLKDAFFCLRLHPTSQPLFAFEWRDPEMGISGQLTWTRLPQGFKNSPTLFDEALHRDLAGFRIQHPDLILLQYVDDLLLAATSELDCQQGTRALLQTLGDLGYRASAKKAQICQKQVKYLGYLLKEGQRWLTEARKETVMGQPIPKTPRQLREFLGTAGFCRLWIPGFAEMAAPLYPLTKTGTLFNWGPDQQKAFQEIKQALLTAPALGLPDLTKPFELFVDEKQGYAKGVLTQKLGPWRRPVAYLSKKLDPVAAGWPPCLRMVAAIAVLTKDAGKLTMGQPLVILAPHAVEALVKQPPDRWLSNARMTHYQALLLDTDRVQFGPVVALNPATLLPLPEEGLQHDCLDILAEAHGTRSDLMDQPLPDADHTWYTDGSSFLQEGQRKAGAAVTTETEVIWARALPAGTSAQRAELIALTQALKMAEGKKLNVYTDSRYAFATAHIHGEIYRRRGLLTSEGKEIKNKDEILALLKALFLPKRLSIIHCPGHQKGNSAEARGNRMADQAAREVATRETPETSTLLAGKRTADGSEFEKRTADGSEFESPKKKAKVE

SEQ ID NO: 7001 - protein, 2094 aa, synthetic construct
MPAAKRVKLDGGDKKYSIGLDIGTNSVGWAVITDEYKVPSKKFKVLGNTDRHSIKKNLIGALLFDSGETAEATRLKRTARRRYTRRKNRICYLQEIFSNEMAKVDDSFFHRLEESFLVEEDKKHERHPIFGNIVDEVAYHEKYPTIYHLRKKLVDSTDKADLRLIYLALAHMIKFRGHFLIEGDLNPDNSDVDKLFIQLVQTYNQLFEENPINASGVDAKAILSARLSKSRRLENLIAQLPGEKKNGLFGNLIALSLGLTPNFKSNFDLAEDAKLQLSKDTYDDDLDNLLAQIGDQYADLFLAAKNLSDAILLSDILRVNTEITKAPLSASMIKRYDEHHQDLTLLKALVRQQLPEKYKEIFFDQSKNGYAGYIDGGASQEEFYKFIKPILEKMDGTEELLVKLNREDLLRKQRTFDNGSIPHQIHLGELHAILRRQEDFYPFLKDNREKIEKILTFRIPYYVGPLARGNSRFAWMTRKSEETITPWNFEEVVDKGASAQSFIERMTNFDKNLPNEKVLPKHSLLYEYFTVYNELTKVKYVTEGMRKPAFLSGEQKKAIVDLLFKTNRKVTVKQLKEDYFKKIECFDSVEISGVEDRFNASLGTYHDLLKIIKDKDFLDNEENEDILEDIVLTLTLFEDREMIEERLKTYAHLFDDKVMKQLKRRRYTGWGRLSRKLINGIRDKQSGKTILDFLKSDGFANRNFMQLIHDDSLTFKEDIQKAQVSGQGDSLHEHIANLAGSPAIKKGILQTVKVVDELVKVMGRHKPENIVIEMARENQTTQKGQKNSRERMKRIEEGIKELGSQILKEHPVENTQLQNEKLYLYYLQNGRDMYVDQELDINRLSDYDVDHIVPQSFLKDDSIDNKVLTRSDKARGKSDNVPSEEVVKKMKNYWRQLLNAKLITQRKFDNLTKAERGGLSELDKAGFIKRQLVETRQITKHVAQILDSRMNTKYDENDKLIREVKVITLKSKLVSDFRKDFQFYKVREINNYHHAHDAYLNAVVGTALIKKYPKLESEFVYGDYKVYDVRKMIAKSEQEIGKATAKYFFYSNIMNFFKTEITLANGEIRKRPLIETNGETGEIVWDKGRDFATVRKVLSMPQVNIVKKTEVQTGGFSKESILPKRNSDKLIARKKDWDPKKYGGFDSPTVAYSVLVVAKVEKGKSKKLKSVKELLGITIMERSSFEKNPIDFLEAKGYKEVKKDLIIKLPKYSLFELENGRKRMLASAGELQKGNELALPSKYVNFLYLASHYEKLKGSPEDNEQKQLFVEQHKHYLDEIIEQISEFSKRVILADANLDKVLSAYNKHRDKPIREQAENIIHLFTLTNLGAPAAFKYFDTTIDRKRYTSTKEVLDATLIHQSITGLYETRIDLSQLGGDGGGGGGGSPAPGGTLNIEDEYRLHETSKEPDVSLGSTWLSDFPQAWAETGGMGLAVRQAPLIIPLKATSTPVSIKQYPMSQEARLGIKPHIQRLLDQGILVPCQSPWNTPLLPVKKPGTNDYRPVQDLREVNKRVEDIHPTVPNPYNLLSGLPPSHQWYTVLDLKDAFFCLRLHPTSQPLFAFEWRDPEMGISGQLTWTRLPQGFKNSPTLFNEALHRDLAGFRIQHPDLILLQYVDDLLLAATSELDCQQGTRALLQTLGDLGYRASAKKAQICQKQVKYLGYLLKEGQRWLTEARKETVMGQPIPKTPRQLREFLGTAGFCRLWIPGFAEMAAPLYPLTKPGTLFNWGPDQQKAFQEIKQALLTAPALGLPDLTKPFELFVDEKQGYAKGVLTQKLGPWRRPVAYLSKKLDPVAAGWPPCLRMVAAIAVLTKDAGKLTMGQPLVILAPHAVEALVKQPPDRWLSNARMTHYQALLLDTDRVQFGPVVALNPATLLPLPEEGLQHDCLDILAEAHGTRSDLMDQPLPDADHTWYTDGSSFLQEGQRKAGAAVTTETEVIWARALPAGTSAQRAELIALTQALKMAEGKKLNVYTDSRYAFATAHIHGEIYRRRGWLTSEGKEIKNKDEILALLKALFLPKRLSIIHCPGHQKGNSAEARGNRMADQAAREVATRETPETSTLLAGKRTADGSEFEKRTADGSEFESPKKKAKVE

SEQ ID NO: 7002 - protein, 2114 aa, synthetic construct
MPAAKRVKLDGGDKKYSIGLDIGTNSVGWAVITDEYKVPSKKFKVLGNTDRHSIKKNLIGALLFDSGETAEATRLKRTARRRYTRRKNRICYLQEIFSNEMAKVDDSFFHRLEESFLVEEDKKHERHPIFGNIVDEVAYHEKYPTIYHLRKKLVDSTDKADLRLIYLALAHMIKFRGHFLIEGDLNPDNSDVDKLFIQLVQTYNQLFEENPINASGVDAKAILSARLSKSRRLENLIAQLPGEKKNGLFGNLIALSLGLTPNFKSNFDLAEDAKLQLSKDTYDDDLDNLLAQIGDQYADLFLAAKNLSDAILLSDILRVNTEITKAPLSASMIKRYDEHHQDLTLLKALVRQQLPEKYKEIFFDQSKNGYAGYIDGGASQEEFYKFIKPILEKMDGTEELLVKLNREDLLRKQRTFDNGSIPHQIHLGELHAILRRQEDFYPFLKDNREKIEKILTFRIPYYVGPLARGNSRFAWMTRKSEETITPWNFEEVVDKGASAQSFIERMTNFDKNLPNEKVLPKHSLLYEYFTVYNELTKVKYVTEGMRKPAFLSGEQKKAIVDLLFKTNRKVTVKQLKEDYFKKIECFDSVEISGVEDRFNASLGTYHDLLKIIKDKDFLDNEENEDILEDIVLTLTLFEDREMIEERLKTYAHLFDDKVMKQLKRRRYTGWGRLSRKLINGIRDKQSGKTILDFLKSDGFANRNFMQLIHDDSLTFKEDIQKAQVSGQGDSLHEHIANLAGSPAIKKGILQTVKVVDELVKVMGRHKPENIVIEMARENQTTQKGQKNSRERMKRIEEGIKELGSQILKEHPVENTQLQNEKLYLYYLQNGRDMYVDQELDINRLSDYDVDHIVPQSFLKDDSIDNKVLTRSDKARGKSDNVPSEEVVKKMKNYWRQLLNAKLITQRKFDNLTKAERGGLSELDKAGFIKRQLVETRQITKHVAQILDSRMNTKYDENDKLIREVKVITLKSKLVSDFRKDFQFYKVREINNYHHAHDAYLNAVVGTALIKKYPKLESEFVYGDYKVYDVRKMIAKSEQEIGKATAKYFFYSNIMNFFKTEITLANGEIRKRPLIETNGETGEIVWDKGRDFATVRKVLSMPQVNIVKKTEVQTGGFSKESILPKRNSDKLIARKKDWDPKKYGGFDSPTVAYSVLVVAKVEKGKSKKLKSVKELLGITIMERSSFEKNPIDFLEAKGYKEVKKDLIIKLPKYSLFELENGRKRMLASAGELQKGNELALPSKYVNFLYLASHYEKLKGSPEDNEQKQLFVEQHKHYLDEIIEQISEFSKRVILADANLDKVLSAYNKHRDKPIREQAENIIHLFTLTNLGAPAAFKYFDTTIDRKRYTSTKEVLDATLIHQSITGLYETRIDLSQLGGDGGGGGGGSPAPGGVQEISDSRPMLHIYLNGRRFLGLLDTGADKTCIAGRDWPANWPIHQTESSLQGLGMACGVARSSQPLRWQHEDKSGIIHPFVIPTLPFTLWGRDIMKDIKVRLMTDSPDDSQDLMIGAIESNLFADQISWKSDQPVWLNQWPLKQEKLQALQQLVTEQLQLGHLEESNSPWNTPVFVIKKKSGKWRLLQDLRAVNATMHDMGALQPGLPSPVAVPKGWEIIIIDLQDCFFNIKLHPEDCKRFAFSVPSPNFKRPYQRFQWKVLPQGMKNSPTLCQKFVDKAILTVRDKYQDSYIVHYMDDILLAHPSRSIVDEILTSMIQALNKHGLVVSTEKIQKYDNLKYLGTHIQGDSVSYQKLQIRTDKLRTLNDFQKLLGNINWIRPFLKLTTGELKPLFEILNGDSNPISTRKLTPEACKALQLMNERLSTARVKRLDLSQPWSLCILKTEYTPTACLWQDGVVEWIHLPHISPKVITPYDIFCTQLIIKGRHRSKELFSKDPDYIVVPYTKVQFDLLLQEKEDWPISLLGFLGEVHFHLPKDPLLTFTLQTAIIFPHMTSTTPLEKGIVIFTDGSANGRSVTYIQGREPIIKENTQNTAQQAEIVAVITAFEEVSQPFNLYTDSKYVTGLFPEIETATLSPRTKIYTELKHLQRLIHKRQEKFYIGHIRGHTGLPGPLAQGNAYADSLTRILTAAGKRTADGSEFEKRTADGSEFESPKKKAKVE

SEQ ID NO: 7003 - protein, 2088 aa, synthetic construct
MPAAKRVKLDGGDKKYSIGLDIGTNSVGWAVITDEYKVPSKKFKVLGNTDRHSIKKNLIGALLFDSGETAEATRLKRTARRRYTRRKNRICYLQEIFSNEMAKVDDSFFHRLEESFLVEEDKKHERHPIFGNIVDEVAYHEKYPTIYHLRKKLVDSTDKADLRLIYLALAHMIKFRGHFLIEGDLNPDNSDVDKLFIQLVQTYNQLFEENPINASGVDAKAILSARLSKSRRLENLIAQLPGEKKNGLFGNLIALSLGLTPNFKSNFDLAEDAKLQLSKDTYDDDLDNLLAQIGDQYADLFLAAKNLSDAILLSDILRVNTEITKAPLSASMIKRYDEHHQDLTLLKALVRQQLPEKYKEIFFDQSKNGYAGYIDGGASQEEFYKFIKPILEKMDGTEELLVKLNREDLLRKQRTFDNGSIPHQIHLGELHAILRRQEDFYPFLKDNREKIEKILTFRIPYYVGPLARGNSRFAWMTRKSEETITPWNFEEVVDKGASAQSFIERMTNFDKNLPNEKVLPKHSLLYEYFTVYNELTKVKYVTEGMRKPAFLSGEQKKAIVDLLFKTNRKVTVKQLKEDYFKKIECFDSVEISGVEDRFNASLGTYHDLLKIIKDKDFLDNEENEDILEDIVLTLTLFEDREMIEERLKTYAHLFDDKVMKQLKRRRYTGWGRLSRKLINGIRDKQSGKTILDFLKSDGFANRNFMQLIHDDSLTFKEDIQKAQVSGQGDSLHEHIANLAGSPAIKKGILQTVKVVDELVKVMGRHKPENIVIEMARENQTTQKGQKNSRERMKRIEEGIKELGSQILKEHPVENTQLQNEKLYLYYLQNGRDMYVDQELDINRLSDYDVDHIVPQSFLKDDSIDNKVLTRSDKARGKSDNVPSEEVVKKMKNYWRQLLNAKLITQRKFDNLTKAERGGLSELDKAGFIKRQLVETRQITKHVAQILDSRMNTKYDENDKLIREVKVITLKSKLVSDFRKDFQFYKVREINNYHHAHDAYLNAVVGTALIKKYPKLESEFVYGDYKVYDVRKMIAKSEQEIGKATAKYFFYSNIMNFFKTEITLANGEIRKRPLIETNGETGEIVWDKGRDFATVRKVLSMPQVNIVKKTEVQTGGFSKESILPKRNSDKLIARKKDWDPKKYGGFDSPTVAYSVLVVAKVEKGKSKKLKSVKELLGITIMERSSFEKNPIDFLEAKGYKEVKKDLIIKLPKYSLFELENGRKRMLASAGELQKGNELALPSKYVNFLYLASHYEKLKGSPEDNEQKQLFVEQHKHYLDEIIEQISEFSKRVILADANLDKVLSAYNKHRDKPIREQAENIIHLFTLTNLGAPAAFKYFDTTIDRKRYTSTKEVLDATLIHQSITGLYETRIDLSQLGGDGGGGGGGSPAPGGTLQLDDEYRLYSPLVKPDQNIQFWLEQFPQAWAETAGMGLAKQVPPQVIQLKASATPVSVRQYPLSKEAQEGIRPHVQRLIQQGILVPVQSPWNTPLLPVRKPGTNDYRPVQDLREVNKRVQDIHPTVPNPYNLLCALPPQRSWYTVLDLKDAFFCLRLHPTSQPLFAFEWRDPGTGRTGQLTWTRLPQGFKNSPTIFDEALHRDLANFRIQHPQVTLLQYVDDLLLAGATKQDCLEGTKALLLELSDLGYRASAKKAQICRREVTYLGYSLRDGQRWLTEARKKTVVQIPAPTTAKQVREFLGTAGFCRLWIPGFATLAAPLYPLTKEKGEFSWAPEHQKAFDAIKKALLSAPALALPDVTKPFTLYVDERKGVARGVLTQTLGPWRRPVAYLSKKLDPVASGWPVCLKAIAAVAILVKDADKLTLGQNITVIAPHALENIVRQPPDRWMTNARMTHYQSLLLTERVTFAPPAALNPATLLPEETDEPVTHDCHQLLIEETGVRKDLTDIPLTGEVLTWFTDGSSYVVEGKRMAGAAVVDGTRTIWASSLPEGTSAQKAELMALTQALRLAEGKSINIYTDSRYAFATAHVHGAIYKQRGLLTSAGREIKNKEEILSLLEALHLPKRLAIIHCPGHQKAKDPISRGNQMADRVAKQAAQGVNLLAGKRTADGSEFEKRTADGSEFESPKKKAKVE

SEQ ID NO: 7004 - protein, 2174 aa, synthetic construct
MPAAKRVKLDGGDKKYSIGLDIGTNSVGWAVITDEYKVPSKKFKVLGNTDRHSIKKNLIGALLFDSGETAEATRLKRTARRRYTRRKNRICYLQEIFSNEMAKVDDSFFHRLEESFLVEEDKKHERHPIFGNIVDEVAYHEKYPTIYHLRKKLVDSTDKADLRLIYLALAHMIKFRGHFLIEGDLNPDNSDVDKLFIQLVQTYNQLFEENPINASGVDAKAILSARLSKSRRLENLIAQLPGEKKNGLFGNLIALSLGLTPNFKSNFDLAEDAKLQLSKDTYDDDLDNLLAQIGDQYADLFLAAKNLSDAILLSDILRVNTEITKAPLSASMIKRYDEHHQDLTLLKALVRQQLPEKYKEIFFDQSKNGYAGYIDGGASQEEFYKFIKPILEKMDGTEELLVKLNREDLLRKQRTFDNGSIPHQIHLGELHAILRRQEDFYPFLKDNREKIEKILTFRIPYYVGPLARGNSRFAWMTRKSEETITPWNFEEVVDKGASAQSFIERMTNFDKNLPNEKVLPKHSLLYEYFTVYNELTKVKYVTEGMRKPAFLSGEQKKAIVDLLFKTNRKVTVKQLKEDYFKKIECFDSVEISGVEDRFNASLGTYHDLLKIIKDKDFLDNEENEDILEDIVLTLTLFEDREMIEERLKTYAHLFDDKVMKQLKRRRYTGWGRLSRKLINGIRDKQSGKTILDFLKSDGFANRNFMQLIHDDSLTFKEDIQKAQVSGQGDSLHEHIANLAGSPAIKKGILQTVKVVDELVKVMGRHKPENIVIEMARENQTTQKGQKNSRERMKRIEEGIKELGSQILKEHPVENTQLQNEKLYLYYLQNGRDMYVDQELDINRLSDYDVDHIVPQSFLKDDSIDNKVLTRSDKARGKSDNVPSEEVVKKMKNYWRQLLNAKLITQRKFDNLTKAERGGLSELDKAGFIKRQLVETRQITKHVAQILDSRMNTKYDENDKLIREVKVITLKSKLVSDFRKDFQFYKVREINNYHHAHDAYLNAVVGTALIKKYPKLESEFVYGDYKVYDVRKMIAKSEQEIGKATAKYFFYSNIMNFFKTEITLANGEIRKRPLIETNGETGEIVWDKGRDFATVRKVLSMPQVNIVKKTEVQTGGFSKESILPKRNSDKLIARKKDWDPKKYGGFDSPTVAYSVLVVAKVEKGKSKKLKSVKELLGITIMERSSFEKNPIDFLEAKGYKEVKKDLIIKLPKYSLFELENGRKRMLASAGELQKGNELALPSKYVNFLYLASHYEKLKGSPEDNEQKQLFVEQHKHYLDEIIEQISEFSKRVILADANLDKVLSAYNKHRDKPIREQAENIIHLFTLTNLGAPAAFKYFDTTIDRKRYTSTKEVLDATLIHQSITGLYETRIDLSQLGGDGGGGGGGSPAPGGMDPLQLLQPLEAEIKGTKLKAHWNSGATITCVPEAFLEDERPIQTMLIKTIHGEKQQDVYYLTFKVQGRKVEAEVLASPYDYILLNPSDVPWLMKKPLQLTVLVPLHEYQERLLQQTALPKEQKELLQKLFLKYDALWQHWENQVGHRRIKPHNIATGTLAPRPQKQYPINPKAKPSIQIVIDDLLKQGVLIQQNSTMNTPVYPVPKPDGKWRMVLDYREVNKTIPLIAAQNQHSAGILSSIYRGKYKTTLDLTNGFWAHPITPESYWLTAFTWQGKQYCWTRLPQGFLNSPALFNADVVDLLKEIPNVQAYVDDIYISHDDPQEHLEQLEKIFSILLNAGYVVSLKKSEIAQREVEFLGFNITKEGRGLTDTFKQKLLNITPPKDLKQLQSILGLLNFARNFIPNYSELVKPLYTIVAPANGKFISWTEDNSNQLQHIISVLNQADNLEERNPETRLIIKVNSSPSAGYIRYYNEGSKRPIMYVNYIFSKAEAKFTQTEKLLTTMHKGLIKAMDLAMGQEILVYSPIVSMTKIQRTPLPERKALPVRWITWMTYLEDPRIQFHYDKSLPELQQIPNVTEDVIAKTKHPSEFAMVFYTDGSAIKHPDVNKSHSAGMGIAQVQFIPEYKIVHQWSIPLGDHTAQLAEIAAVEFACKKALKISGPVLIVTDSFYVAESANKELPYWKSNGFLNNKKKPLRHVSKWKSIAECLQLKPDIIIMHEKGHQQPMTTLHTEGNNLADKLATQGSYVVHAGKRTADGSEFEKRTADGSEFESPKKKAKVE

SEQ ID NO: 7005 - protein, 2085 aa, synthetic construct
MPAAKRVKLDGGDKKYSIGLDIGTNSVGWAVITDEYKVPSKKFKVLGNTDRHSIKKNLIGALLFDSGETAEATRLKRTARRRYTRRKNRICYLQEIFSNEMAKVDDSFFHRLEESFLVEEDKKHERHPIFGNIVDEVAYHEKYPTIYHLRKKLVDSTDKADLRLIYLALAHMIKFRGHFLIEGDLNPDNSDVDKLFIQLVQTYNQLFEENPINASGVDAKAILSARLSKSRRLENLIAQLPGEKKNGLFGNLIALSLGLTPNFKSNFDLAEDAKLQLSKDTYDDDLDNLLAQIGDQYADLFLAAKNLSDAILLSDILRVNTEITKAPLSASMIKRYDEHHQDLTLLKALVRQQLPEKYKEIFFDQSKNGYAGYIDGGASQEEFYKFIKPILEKMDGTEELLVKLNREDLLRKQRTFDNGSIPHQIHLGELHAILRRQEDFYPFLKDNREKIEKILTFRIPYYVGPLARGNSRFAWMTRKSEETITPWNFEEVVDKGASAQSFIERMTNFDKNLPNEKVLPKHSLLYEYFTVYNELTKVKYVTEGMRKPAFLSGEQKKAIVDLLFKTNRKVTVKQLKEDYFKKIECFDSVEISGVEDRFNASLGTYHDLLKIIKDKDFLDNEENEDILEDIVLTLTLFEDREMIEERLKTYAHLFDDKVMKQLKRRRYTGWGRLSRKLINGIRDKQSGKTILDFLKSDGFANRNFMQLIHDDSLTFKEDIQKAQVSGQGDSLHEHIANLAGSPAIKKGILQTVKVVDELVKVMGRHKPENIVIEMARENQTTQKGQKNSRERMKRIEEGIKELGSQILKEHPVENTQLQNEKLYLYYLQNGRDMYVDQELDINRLSDYDVDHIVPQSFLKDDSIDNKVLTRSDKARGKSDNVPSEEVVKKMKNYWRQLLNAKLITQRKFDNLTKAERGGLSELDKAGFIKRQLVETRQITKHVAQILDSRMNTKYDENDKLIREVKVITLKSKLVSDFRKDFQFYKVREINNYHHAHDAYLNAVVGTALIKKYPKLESEFVYGDYKVYDVRKMIAKSEQEIGKATAKYFFYSNIMNFFKTEITLANGEIRKRPLIETNGETGEIVWDKGRDFATVRKVLSMPQVNIVKKTEVQTGGFSKESILPKRNSDKLIARKKDWDPKKYGGFDSPTVAYSVLVVAKVEKGKSKKLKSVKELLGITIMERSSFEKNPIDFLEAKGYKEVKKDLIIKLPKYSLFELENGRKRMLASAGELQKGNELALPSKYVNFLYLASHYEKLKGSPEDNEQKQLFVEQHKHYLDEIIEQISEFSKRVILADANLDKVLSAYNKHRDKPIREQAENIIHLFTLTNLGAPAAFKYFDTTIDRKRYTSTKEVLDATLIHQSITGLYETRIDLSQLGGDGGGGGGGSPAPGGIPWLMKKPLQLTTLVPLQEYEERLLKQTMLTGSYKEKLQSLFLKYDALWQHWENQVGHRRIKPHHIATGTVNPRPQKQYPINPKAKASIQTVINDLLKQGVLIQQNSIMNTPVYPVPKPDGKWRMVLDYREVNKTIPLIAAQNQHSAGILSSIFRGKYKTTLDLSNGFWAHSITPESYWLTAFTWLGQQYCWTRLPQGFLNSPALFNADVVDLLKEVPNVQVYVDDIYISHDDPREHLEQLEKVFSLLLNAGYVVSLKKSEIAQHEVEFLGFNITKEGRGLTETFKQKLLNITPPRDLKQLQSILGLLNFARNFIPNFSELVKPLYNIIATAPGKYITWTTDNSQQLQNIISMLNSAENLEERNPEVRLIMKVNTSPSAGYIRFYNEFAKRPIMYLNYVYTKAEVKFTNTEKLLTTIHKGLIKALDLGMGQEILVYSPIVSMTKIQKTPLPERKALPIRWITWMSYLEDPRIQFHYDKTLPELQQVPTVTDDIIAKIKHPSEFSMVFYTDGSAIKHPNVNKSHNAGMGIAQVQFKPEFTVINTWSIPLGDHTAQLAEVAAVEFACKKALKIDGPVLIVTDSFYVAESVNKELPYWQSNGFFNNKKKPLKHVSKWKSIADCIQLKPDIIIIHEKGHQPTASTFHTEGNNLADKLATQGSYVVNAGKRTADGSEFEKRTADGSEFESPKKKAKVE

SEQ ID NO: 7006 - protein, 2085 aa, synthetic construct
MPAAKRVKLDGGDKKYSIGLDIGTNSVGWAVITDEYKVPSKKFKVLGNTDRHSIKKNLIGALLFDSGETAEATRLKRTARRRYTRRKNRICYLQEIFSNEMAKVDDSFFHRLEESFLVEEDKKHERHPIFGNIVDEVAYHEKYPTIYHLRKKLVDSTDKADLRLIYLALAHMIKFRGHFLIEGDLNPDNSDVDKLFIQLVQTYNQLFEENPINASGVDAKAILSARLSKSRRLENLIAQLPGEKKNGLFGNLIALSLGLTPNFKSNFDLAEDAKLQLSKDTYDDDLDNLLAQIGDQYADLFLAAKNLSDAILLSDILRVNTEITKAPLSASMIKRYDEHHQDLTLLKALVRQQLPEKYKEIFFDQSKNGYAGYIDGGASQEEFYKFIKPILEKMDGTEELLVKLNREDLLRKQRTFDNGSIPHQIHLGELHAILRRQEDFYPFLKDNREKIEKILTFRIPYYVGPLARGNSRFAWMTRKSEETITPWNFEEVVDKGASAQSFIERMTNFDKNLPNEKVLPKHSLLYEYFTVYNELTKVKYVTEGMRKPAFLSGEQKKAIVDLLFKTNRKVTVKQLKEDYFKKIECFDSVEISGVEDRFNASLGTYHDLLKIIKDKDFLDNEENEDILEDIVLTLTLFEDREMIEERLKTYAHLFDDKVMKQLKRRRYTGWGRLSRKLINGIRDKQSGKTILDFLKSDGFANRNFMQLIHDDSLTFKEDIQKAQVSGQGDSLHEHIANLAGSPAIKKGILQTVKVVDELVKVMGRHKPENIVIEMARENQTTQKGQKNSRERMKRIEEGIKELGSQILKEHPVENTQLQNEKLYLYYLQNGRDMYVDQELDINRLSDYDVDHIVPQSFLKDDSIDNKVLTRSDKARGKSDNVPSEEVVKKMKNYWRQLLNAKLITQRKFDNLTKAERGGLSELDKAGFIKRQLVETRQITKHVAQILDSRMNTKYDENDKLIREVKVITLKSKLVSDFRKDFQFYKVREINNYHHAHDAYLNAVVGTALIKKYPKLESEFVYGDYKVYDVRKMIAKSEQEIGKATAKYFFYSNIMNFFKTEITLANGEIRKRPLIETNGETGEIVWDKGRDFATVRKVLSMPQVNIVKKTEVQTGGFSKESILPKRNSDKLIARKKDWDPKKYGGFDSPTVAYSVLVVAKVEKGKSKKLKSVKELLGITIMERSSFEKNPIDFLEAKGYKEVKKDLIIKLPKYSLFELENGRKRMLASAGELQKGNELALPSKYVNFLYLASHYEKLKGSPEDNEQKQLFVEQHKHYLDEIIEQISEFSKRVILADANLDKVLSAYNKHRDKPIREQAENIIHLFTLTNLGAPAAFKYFDTTIDRKRYTSTKEVLDATLIHQSITGLYETRIDLSQLGGDGGGGGGGSPAPGGIPWLMKKPLQLTTLVPLQEYEERLLKQTMLTGSYKEKLQSLFLKYDALWQHWENQVGHRRIKPHHIATGTVNPRPQKQYPINPKAKASIQTVINDLLKQGVLIQQNSIMNTPVYPVPKPDGKWRMVLDYREVNKTIPLIAAQNQHSAGILSSIFRGKYKTTLDLSNGFWAHSITPESYWLTAFTWLGQQYCWTRLPQGFLNSPALFNADVVDLLKEVPNVQVYVDDIYISHDDPREHLEQLEKVFSLLLNAGYVVSLKKSEIAQHEVEFLGFNITKEGRGLTETFKQKLLNITPPRDLKQLQSILGKLNFARNFIPNFSELVKPLYNIIATAPGKYITWTTDNSQQLQNIISMLNSAENLEERNPEVRLIMKVNTSPSAGYIRFYNEFAKRPIMYLNYVYTKAEVKFTNTEKLLTTIHKGLIKALDLGMGQEILVYSPIVSMTKIQKTPLPERKALPIRWITWMSYLEDPRIQFHYDKTLPELQQVPTVTDDIIAKIKHPSEFSMVFYTDGSAIKHPNVNKSHNAGMGIAQVQFKPEFTVINTWSIPLGDHTAQLAEVAAVEFACKKALKIDGPVLIVTDSFYVAESVNKELPYWQSNGFFNNKKKPLKHVSKWKSIADCIQLKPDIIIIHEKGHQPTASTFHTEGNNLADKLATQGSYVVNAGKRTADGSEFEKRTADGSEFESPKKKAKVE

SEQ ID NO: 7007 - protein, 2174 aa, synthetic construct
MPAAKRVKLDGGDKKYSIGLDIGTNSVGWAVITDEYKVPSKKFKVLGNTDRHSIKKNLIGALLFDSGETAEATRLKRTARRRYTRRKNRICYLQEIFSNEMAKVDDSFFHRLEESFLVEEDKKHERHPIFGNIVDEVAYHEKYPTIYHLRKKLVDSTDKADLRLIYLALAHMIKFRGHFLIEGDLNPDNSDVDKLFIQLVQTYNQLFEENPINASGVDAKAILSARLSKSRRLENLIAQLPGEKKNGLFGNLIALSLGLTPNFKSNFDLAEDAKLQLSKDTYDDDLDNLLAQIGDQYADLFLAAKNLSDAILLSDILRVNTEITKAPLSASMIKRYDEHHQDLTLLKALVRQQLPEKYKEIFFDQSKNGYAGYIDGGASQEEFYKFIKPILEKMDGTEELLVKLNREDLLRKQRTFDNGSIPHQIHLGELHAILRRQEDFYPFLKDNREKIEKILTFRIPYYVGPLARGNSRFAWMTRKSEETITPWNFEEVVDKGASAQSFIERMTNFDKNLPNEKVLPKHSLLYEYFTVYNELTKVKYVTEGMRKPAFLSGEQKKAIVDLLFKTNRKVTVKQLKEDYFKKIECFDSVEISGVEDRFNASLGTYHDLLKIIKDKDFLDNEENEDILEDIVLTLTLFEDREMIEERLKTYAHLFDDKVMKQLKRRRYTGWGRLSRKLINGIRDKQSGKTILDFLKSDGFANRNFMQLIHDDSLTFKEDIQKAQVSGQGDSLHEHIANLAGSPAIKKGILQTVKVVDELVKVMGRHKPENIVIEMARENQTTQKGQKNSRERMKRIEEGIKELGSQILKEHPVENTQLQNEKLYLYYLQNGRDMYVDQELDINRLSDYDVDHIVPQSFLKDDSIDNKVLTRSDKARGKSDNVPSEEVVKKMKNYWRQLLNAKLITQRKFDNLTKAERGGLSELDKAGFIKRQLVETRQITKHVAQILDSRMNTKYDENDKLIREVKVITLKSKLVSDFRKDFQFYKVREINNYHHAHDAYLNAVVGTALIKKYPKLESEFVYGDYKVYDVRKMIAKSEQEIGKATAKYFFYSNIMNFFKTEITLANGEIRKRPLIETNGETGEIVWDKGRDFATVRKVLSMPQVNIVKKTEVQTGGFSKESILPKRNSDKLIARKKDWDPKKYGGFDSPTVAYSVLVVAKVEKGKSKKLKSVKELLGITIMERSSFEKNPIDFLEAKGYKEVKKDLIIKLPKYSLFELENGRKRMLASAGELQKGNELALPSKYVNFLYLASHYEKLKGSPEDNEQKQLFVEQHKHYLDEIIEQISEFSKRVILADANLDKVLSAYNKHRDKPIREQAENIIHLFTLTNLGAPAAFKYFDTTIDRKRYTSTKEVLDATLIHQSITGLYETRIDLSQLGGDGGGGGGGSPAPGGMDPLQLLQPLEAEIKGTKLKAHWNSGATITCVPQAFLEEEVPIKNIWIKTIHGEKEQPVYYLTFKIQGRKVEAEVISSPYDYILVSPSDIPWLMKKPLQLTTLVPLQEYEERLLKQTMLTGSYKEKLQSLFLKYDALWQHWENQVGHRRIKPHHIATGTVNPRPQKQYPINPKAKASIQTVINDLLKQGVLIQQNSIMNTPVYPVPKPDGKWRMVLDYREVNKTIPLIAAQNQHSAGILSSIFRGKYKTTLDLSNGFWAHSITPESYWLTAFTWLGQQYCWTRLPQGFLNSPALFNADVVDLLKEVPNVQVYVDDIYISHDDPREHLEQLEKVFSLLLNAGYVVSLKKSEIAQHEVEFLGFNITKEGRGLTETFKQKLLNITPPRDLKQLQSILGKLNFARNFIPNFSELVKPLYNIIATAPGKYITWTTDNSQQLQNIISMLNSAENLEERNPEVRLIMKVNTSPSAGYIRFYNEFAKRPIMYLNYVYTKAEVKFTNTEKLLTTIHKGLIKALDLGMGQEILVYSPIVSMTKIQKTPLPERKALPIRWITWMSYLEDPRIQFHYDKTLPELQQVPTVTDDIIAKIKHPSEFSMVFYTDGSAIKHPNVNKSHNAGMGIAQVQFKPEFTVINTWSIPLGDHTAQLAEVAAVEFACKKALKIDGPVLIVTDSFYVAESVNKELPYWQSNGFFNNKKKPLKHVSKWKSIADCIQLKPDIIIIHEKGHQPTASTFHTEGNNLADKLATQGSYVVNAGKRTADGSEFEKRTADGSEFESPKKKAKVE

SEQ ID NO: 7008 - protein, 2092 aa, synthetic construct
MPAAKRVKLDGGDKKYSIGLDIGTNSVGWAVITDEYKVPSKKFKVLGNTDRHSIKKNLIGALLFDSGETAEATRLKRTARRRYTRRKNRICYLQEIFSNEMAKVDDSFFHRLEESFLVEEDKKHERHPIFGNIVDEVAYHEKYPTIYHLRKKLVDSTDKADLRLIYLALAHMIKFRGHFLIEGDLNPDNSDVDKLFIQLVQTYNQLFEENPINASGVDAKAILSARLSKSRRLENLIAQLPGEKKNGLFGNLIALSLGLTPNFKSNFDLAEDAKLQLSKDTYDDDLDNLLAQIGDQYADLFLAAKNLSDAILLSDILRVNTEITKAPLSASMIKRYDEHHQDLTLLKALVRQQLPEKYKEIFFDQSKNGYAGYIDGGASQEEFYKFIKPILEKMDGTEELLVKLNREDLLRKQRTFDNGSIPHQIHLGELHAILRRQEDFYPFLKDNREKIEKILTFRIPYYVGPLARGNSRFAWMTRKSEETITPWNFEEVVDKGASAQSFIERMTNFDKNLPNEKVLPKHSLLYEYFTVYNELTKVKYVTEGMRKPAFLSGEQKKAIVDLLFKTNRKVTVKQLKEDYFKKIECFDSVEISGVEDRFNASLGTYHDLLKIIKDKDFLDNEENEDILEDIVLTLTLFEDREMIEERLKTYAHLFDDKVMKQLKRRRYTGWGRLSRKLINGIRDKQSGKTILDFLKSDGFANRNFMQLIHDDSLTFKEDIQKAQVSGQGDSLHEHIANLAGSPAIKKGILQTVKVVDELVKVMGRHKPENIVIEMARENQTTQKGQKNSRERMKRIEEGIKELGSQILKEHPVENTQLQNEKLYLYYLQNGRDMYVDQELDINRLSDYDVDHIVPQSFLKDDSIDNKVLTRSDKARGKSDNVPSEEVVKKMKNYWRQLLNAKLITQRKFDNLTKAERGGLSELDKAGFIKRQLVETRQITKHVAQILDSRMNTKYDENDKLIREVKVITLKSKLVSDFRKDFQFYKVREINNYHHAHDAYLNAVVGTALIKKYPKLESEFVYGDYKVYDVRKMIAKSEQEIGKATAKYFFYSNIMNFFKTEITLANGEIRKRPLIETNGETGEIVWDKGRDFATVRKVLSMPQVNIVKKTEVQTGGFSKESILPKRNSDKLIARKKDWDPKKYGGFDSPTVAYSVLVVAKVEKGKSKKLKSVKELLGITIMERSSFEKNPIDFLEAKGYKEVKKDLIIKLPKYSLFELENGRKRMLASAGELQKGNELALPSKYVNFLYLASHYEKLKGSPEDNEQKQLFVEQHKHYLDEIIEQISEFSKRVILADANLDKVLSAYNKHRDKPIREQAENIIHLFTLTNLGAPAAFKYFDTTIDRKRYTSTKEVLDATLIHQSITGLYETRIDLSQLGGDGGGGGGGSPAPGGVLNLEEEYRLHEKPVPSSIDPSWLQLFPTVWAERAGMGLANQVPPVVVELRSGASPVAVRQYPMSKEAREGIRPHIQRFLDLGVLVPCQSPWNTPLLPVKKPGTNDYRPVQDLREINKRVQDIHPTVPNPYNLLSSLPPSHTWYSVLDLKDAFFCLKLHPNSQPLFAFEWRDPEKGNTGQLTWTRLPQGFKNSPTLFNEALHRDLAPFRALNPQVVLLQYVDDLLVAAPTYRDCKEGTQKLLQELSKLGYRVSAKKAQLCQKEVTYLGYLLKEGKRWLTPARKATVMKIPPPTTPRQVREFLGKAGFCRLFIPGFASLAAPLYPLTKPSIPFIWTEEHQKAFDRIKEALLSAPALALPDLTKPFTLYVDERAGVARGVLTQTLGPWRRPVAYLSKKLDPVASGWPTCLKAVAAVALLLKDADKLTLGQNVTVIASHSLESIVRQPPDRWMTNARMTHYQSLLLNERVSFAPPAVLNPATLLPVESEATPVHRCSEILAEETGTRRDLKDQPLPGVPAWYTDGSSFIAEGKRRAGAAIVDGKRTVWASSLPEGTSAQKAELVALTQALRLAEGKDINIYTDSRYAFATAHIHGAIYKQRGWLTSAGKDIKNKEEILALLEAIHLPKRVAIIHCPGHQKGNDPVATGNRRADEAAKQAALSTRVLAETTKPAGKRTADGSEFEKRTADGSEFESPKKKAKVE

SEQ ID NO: 7009 - protein, 2096 aa, synthetic construct
MPAAKRVKLDGGDKKYSIGLDIGTNSVGWAVITDEYKVPSKKFKVLGNTDRHSIKKNLIGALLFDSGETAEATRLKRTARRRYTRRKNRICYLQEIFSNEMAKVDDSFFHRLEESFLVEEDKKHERHPIFGNIVDEVAYHEKYPTIYHLRKKLVDSTDKADLRLIYLALAHMIKFRGHFLIEGDLNPDNSDVDKLFIQLVQTYNQLFEENPINASGVDAKAILSARLSKSRRLENLIAQLPGEKKNGLFGNLIALSLGLTPNFKSNFDLAEDAKLQLSKDTYDDDLDNLLAQIGDQYADLFLAAKNLSDAILLSDILRVNTEITKAPLSASMIKRYDEHHQDLTLLKALVRQQLPEKYKEIFFDQSKNGYAGYIDGGASQEEFYKFIKPILEKMDGTEELLVKLNREDLLRKQRTFDNGSIPHQIHLGELHAILRRQEDFYPFLKDNREKIEKILTFRIPYYVGPLARGNSRFAWMTRKSEETITPWNFEEVVDKGASAQSFIERMTNFDKNLPNEKVLPKHSLLYEYFTVYNELTKVKYVTEGMRKPAFLSGEQKKAIVDLLFKTNRKVTVKQLKEDYFKKIECFDSVEISGVEDRFNASLGTYHDLLKIIKDKDFLDNEENEDILEDIVLTLTLFEDREMIEERLKTYAHLFDDKVMKQLKRRRYTGWGRLSRKLINGIRDKQSGKTILDFLKSDGFANRNFMQLIHDDSLTFKEDIQKAQVSGQGDSLHEHIANLAGSPAIKKGILQTVKVVDELVKVMGRHKPENIVIEMARENQTTQKGQKNSRERMKRIEEGIKELGSQILKEHPVENTQLQNEKLYLYYLQNGRDMYVDQELDINRLSDYDVDHIVPQSFLKDDSIDNKVLTRSDKARGKSDNVPSEEVVKKMKNYWRQLLNAKLITQRKFDNLTKAERGGLSELDKAGFIKRQLVETRQITKHVAQILDSRMNTKYDENDKLIREVKVITLKSKLVSDFRKDFQFYKVREINNYHHAHDAYLNAVVGTALIKKYPKLESEFVYGDYKVYDVRKMIAKSEQEIGKATAKYFFYSNIMNFFKTEITLANGEIRKRPLIETNGETGEIVWDKGRDFATVRKVLSMPQVNIVKKTEVQTGGFSKESILPKRNSDKLIARKKDWDPKKYGGFDSPTVAYSVLVVAKVEKGKSKKLKSVKELLGITIMERSSFEKNPIDFLEAKGYKEVKKDLIIKLPKYSLFELENGRKRMLASAGELQKGNELALPSKYVNFLYLASHYEKLKGSPEDNEQKQLFVEQHKHYLDEIIEQISEFSKRVILADANLDKVLSAYNKHRDKPIREQAENIIHLFTLTNLGAPAAFKYFDTTIDRKRYTSTKEVLDATLIHQSITGLYETRIDLSQLGGDGGGGGPAPGGSGGTAPLEEEYRLFLEAPIQNVTLLEQWKREIPKVWAEINPPGLASTQAPIHVQLLSTALPVRVRQYPITLEAKRSLRETIRKFRAAGILRPVHSPWNTPLLPVRKSGTSEYRMVQDLREVNKRVETIHPTVPNPYTLLSLLPPDRIWYSVLDLKDAFFCIPLAPESQLIFAFEWADAEEGESGQLTWTRLPQGFKNSPTLFNEALNRDLQGFRLDHPSVSLLQYVDDLLIAADTQAACLSATRDLLMTLAELGYRVSGKKAQLCQEEVTYLGFKIHKGSRSLSNSRTQAILQIPVPKTKRQVREFLGTIGYCRLWIPGFAELAQPLYAATRPGNDPLVWGEKEEEAFQSLKLALTQPPALALPSLDKPFQLFVEETSGAAKGVLTQALGPWKRPVAYLSKRLDPVAAGWPRCLRAIAAAALLTREASKLTFGQDIEITSSHNLESLLRSPPDKWLTNARITQYQVLLLDPPRVRFKQTAALNPATLLPETDDTLPIHHCLDTLDSLTSTRPDLTDQPLAQAEATLFTDGSSYIRDGKRYAGAAVVTLDSVIWAEPLPIGTSAQKAELIALTKALEWSKDKSVNIYTDSRYAFATLHVHGMIYRERGWLTAGGKAIKNAPEILALLTAVWLPKRVAVMHCKGHQKDDAPTSTGNRRADEVAREVAIRPLSTQATISAGKRTADGSEFEKRTADGSEFESPKKKAKVE

SEQ ID NO: 7010 - protein, 2216 aa, synthetic construct
MPAAKRVKLDGGDKKYSIGLDIGTNSVGWAVITDEYKVPSKKFKVLGNTDRHSIKKNLIGALLFDSGETAEATRLKRTARRRYTRRKNRICYLQEIFSNEMAKVDDSFFHRLEESFLVEEDKKHERHPIFGNIVDEVAYHEKYPTIYHLRKKLVDSTDKADLRLIYLALAHMIKFRGHFLIEGDLNPDNSDVDKLFIQLVQTYNQLFEENPINASGVDAKAILSARLSKSRRLENLIAQLPGEKKNGLFGNLIALSLGLTPNFKSNFDLAEDAKLQLSKDTYDDDLDNLLAQIGDQYADLFLAAKNLSDAILLSDILRVNTEITKAPLSASMIKRYDEHHQDLTLLKALVRQQLPEKYKEIFFDQSKNGYAGYIDGGASQEEFYKFIKPILEKMDGTEELLVKLNREDLLRKQRTFDNGSIPHQIHLGELHAILRRQEDFYPFLKDNREKIEKILTFRIPYYVGPLARGNSRFAWMTRKSEETITPWNFEEVVDKGASAQSFIERMTNFDKNLPNEKVLPKHSLLYEYFTVYNELTKVKYVTEGMRKPAFLSGEQKKAIVDLLFKTNRKVTVKQLKEDYFKKIECFDSVEISGVEDRFNASLGTYHDLLKIIKDKDFLDNEENEDILEDIVLTLTLFEDREMIEERLKTYAHLFDDKVMKQLKRRRYTGWGRLSRKLINGIRDKQSGKTILDFLKSDGFANRNFMQLIHDDSLTFKEDIQKAQVSGQGDSLHEHIANLAGSPAIKKGILQTVKVVDELVKVMGRHKPENIVIEMARENQTTQKGQKNSRERMKRIEEGIKELGSQILKEHPVENTQLQNEKLYLYYLQNGRDMYVDQELDINRLSDYDVDHIVPQSFLKDDSIDNKVLTRSDKARGKSDNVPSEEVVKKMKNYWRQLLNAKLITQRKFDNLTKAERGGLSELDKAGFIKRQLVETRQITKHVAQILDSRMNTKYDENDKLIREVKVITLKSKLVSDFRKDFQFYKVREINNYHHAHDAYLNAVVGTALIKKYPKLESEFVYGDYKVYDVRKMIAKSEQEIGKATAKYFFYSNIMNFFKTEITLANGEIRKRPLIETNGETGEIVWDKGRDFATVRKVLSMPQVNIVKKTEVQTGGFSKESILPKRNSDKLIARKKDWDPKKYGGFDSPTVAYSVLVVAKVEKGKSKKLKSVKELLGITIMERSSFEKNPIDFLEAKGYKEVKKDLIIKLPKYSLFELENGRKRMLASAGELQKGNELALPSKYVNFLYLASHYEKLKGSPEDNEQKQLFVEQHKHYLDEIIEQISEFSKRVILADANLDKVLSAYNKHRDKPIREQAENIIHLFTLTNLGAPAAFKYFDTTIDRKRYTSTKEVLDATLIHQSITGLYETRIDLSQLGGDGGGGGPAPGGSGGTLGDQGSRGSDPLPEPRVTLTVEGIPTEFLVNTGAEHSVLTKPMGKMGSKRTVVAGATGSKVYPWTTKRLLKIGQKQVTHSFLVIPECPAPLLGRDLLTKLKAQIQFSTEGPQVTWEDRPAMCLVLNLEEEYRLHEKPVPPSIDPSWLQLFPMVWAEKAGMGLANQVPPVVVELKSDASPVAVRQYPMSKEAREGIRPHIQRFLDLGILVPCQSPWNTPLLPVKKPGTNDYRPVQDLREVNKRVQDIHPTVPNPYNLLSSLPPSHTWYSVLDLKDAFFCLKLHPNSQPLFAFEWRDPEKGNTGQLTWTRLPQGFKNSPTLFDEALHRDLASFRALNPQVVMLQYVDDLLVAAPTYRDCKEGTRRLLQELSKLGYRVSAKKAQLCREEVTYLGYLLKGGKRWLTPARKATVMKIPTPTTPRQVREFLGTAGFCRLWIPGFASLAAPLYPLTREKVPFTWTEAHQEAFGRIKEALLSAPALALPDLTKPFALYVDEKEGVARGVLTQTLGPWRRPVAYLSKKLDPVASGWPTCLKAIAAVALLLKDADKLTLGQNVLVIAPHNLESIVRQPPDRWMTNARMTHYQSLLLNERVSFAPPAILNPATLLPVESDDTPIHICSEILAEETGTRPDLRDQPLPGVPAWYTDGSSFIMDGRRQAGAAIVDNKRTVWASNLPEGTSAQKAELIALTQALRLAEGKSINIYTDSRYAFATAHVHGAIYKQRGLLTSAGKDIKNKEEILALLEAIHLPKRVAIIHCPGHQRGTDPVATGNRKADEAAKQAAQSTRILTETTKNAGKRTADGSEFEKRTADGSEFESPKKKAKVE

SEQ ID NO: 7011 - protein, 2125 aa, synthetic construct
MPAAKRVKLDGGDKKYSIGLDIGTNSVGWAVITDEYKVPSKKFKVLGNTDRHSIKKNLIGALLFDSGETAEATRLKRTARRRYTRRKNRICYLQEIFSNEMAKVDDSFFHRLEESFLVEEDKKHERHPIFGNIVDEVAYHEKYPTIYHLRKKLVDSTDKADLRLIYLALAHMIKFRGHFLIEGDLNPDNSDVDKLFIQLVQTYNQLFEENPINASGVDAKAILSARLSKSRRLENLIAQLPGEKKNGLFGNLIALSLGLTPNFKSNFDLAEDAKLQLSKDTYDDDLDNLLAQIGDQYADLFLAAKNLSDAILLSDILRVNTEITKAPLSASMIKRYDEHHQDLTLLKALVRQQLPEKYKEIFFDQSKNGYAGYIDGGASQEEFYKFIKPILEKMDGTEELLVKLNREDLLRKQRTFDNGSIPHQIHLGELHAILRRQEDFYPFLKDNREKIEKILTFRIPYYVGPLARGNSRFAWMTRKSEETITPWNFEEVVDKGASAQSFIERMTNFDKNLPNEKVLPKHSLLYEYFTVYNELTKVKYVTEGMRKPAFLSGEQKKAIVDLLFKTNRKVTVKQLKEDYFKKIECFDSVEISGVEDRFNASLGTYHDLLKIIKDKDFLDNEENEDILEDIVLTLTLFEDREMIEERLKTYAHLFDDKVMKQLKRRRYTGWGRLSRKLINGIRDKQSGKTILDFLKSDGFANRNFMQLIHDDSLTFKEDIQKAQVSGQGDSLHEHIANLAGSPAIKKGILQTVKVVDELVKVMGRHKPENIVIEMARENQTTQKGQKNSRERMKRIEEGIKELGSQILKEHPVENTQLQNEKLYLYYLQNGRDMYVDQELDINRLSDYDVDHIVPQSFLKDDSIDNKVLTRSDKARGKSDNVPSEEVVKKMKNYWRQLLNAKLITQRKFDNLTKAERGGLSELDKAGFIKRQLVETRQITKHVAQILDSRMNTKYDENDKLIREVKVITLKSKLVSDFRKDFQFYKVREINNYHHAHDAYLNAVVGTALIKKYPKLESEFVYGDYKVYDVRKMIAKSEQEIGKATAKYFFYSNIMNFFKTEITLANGEIRKRPLIETNGETGEIVWDKGRDFATVRKVLSMPQVNIVKKTEVQTGGFSKESILPKRNSDKLIARKKDWDPKKYGGFDSPTVAYSVLVVAKVEKGKSKKLKSVKELLGITIMERSSFEKNPIDFLEAKGYKEVKKDLIIKLPKYSLFELENGRKRMLASAGELQKGNELALPSKYVNFLYLASHYEKLKGSPEDNEQKQLFVEQHKHYLDEIIEQISEFSKRVILADANLDKVLSAYNKHRDKPIREQAENIIHLFTLTNLGAPAAFKYFDTTIDRKRYTSTKEVLDATLIHQSITGLYETRIDLSQLGGDGGGGGPAPGGSGGLLGRDLLTKLKAQIQFSTEGPQVTWEDRPAMCLVLNLEEEYRLHEKPVPPSIDPSWLQLFPMVWAEKAGMGLANQVPPVVVELKSDASPVAVRQYPMSKEAREGIRPHIQRFLDLGILVPCQSPWNTPLLPVKKPGTNDYRPVQDLREVNKRVQDIHPTVPNPYNLLSSLPPSHTWYSVLDLKDAFFCLKLHPNSQPLFAFEWRDPEKGNTGQLTWTRLPQGFKNSPTLFNEALHRDLASFRALNPQVVMLQYVDDLLVAAPTYRDCKEGTRRLLQELSKLGYRVSAKKAQLCREEVTYLGYLLKGGKRWLTPARKATVMKIPTPTTPRQVREFLGTAGFCRLWIPGFASLAAPLYPLTRPKVPFTWTEAHQEAFGRIKEALLSAPALALPDLTKPFALYVDEKEGVARGVLTQTLGPWRRPVAYLSKKLDPVASGWPTCLKAIAAVALLLKDADKLTLGQNVLVIAPHNLESIVRQPPDRWMTNARMTHYQSLLLNERVSFAPPAILNPATLLPVESDDTPIHICSEILAEETGTRPDLRDQPLPGVPAWYTDGSSFIMDGRRQAGAAIVDNKRTVWASNLPEGTSAQKAELIALTQALRLAEGKSINIYTDSRYAFATAHVHGAIYKQRGWLTSAGKDIKNKEEILALLEAIHLPKRVAIIHCPGHQRGTDPVATGNRKADEAAKQAAQSTRILTETTKNAGKRTADGSEFEKRTADGSEFESPKKKAKVE

SEQ ID NO: 7012 - protein, 2094 aa, synthetic construct
MPAAKRVKLDGGDKKYSIGLDIGTNSVGWAVITDEYKVPSKKFKVLGNTDRHSIKKNLIGALLFDSGETAEATRLKRTARRRYTRRKNRICYLQEIFSNEMAKVDDSFFHRLEESFLVEEDKKHERHPIFGNIVDEVAYHEKYPTIYHLRKKLVDSTDKADLRLIYLALAHMIKFRGHFLIEGDLNPDNSDVDKLFIQLVQTYNQLFEENPINASGVDAKAILSARLSKSRRLENLIAQLPGEKKNGLFGNLIALSLGLTPNFKSNFDLAEDAKLQLSKDTYDDDLDNLLAQIGDQYADLFLAAKNLSDAILLSDILRVNTEITKAPLSASMIKRYDEHHQDLTLLKALVRQQLPEKYKEIFFDQSKNGYAGYIDGGASQEEFYKFIKPILEKMDGTEELLVKLNREDLLRKQRTFDNGSIPHQIHLGELHAILRRQEDFYPFLKDNREKIEKILTFRIPYYVGPLARGNSRFAWMTRKSEETITPWNFEEVVDKGASAQSFIERMTNFDKNLPNEKVLPKHSLLYEYFTVYNELTKVKYVTEGMRKPAFLSGEQKKAIVDLLFKTNRKVTVKQLKEDYFKKIECFDSVEISGVEDRFNASLGTYHDLLKIIKDKDFLDNEENEDILEDIVLTLTLFEDREMIEERLKTYAHLFDDKVMKQLKRRRYTGWGRLSRKLINGIRDKQSGKTILDFLKSDGFANRNFMQLIHDDSLTFKEDIQKAQVSGQGDSLHEHIANLAGSPAIKKGILQTVKVVDELVKVMGRHKPENIVIEMARENQTTQKGQKNSRERMKRIEEGIKELGSQILKEHPVENTQLQNEKLYLYYLQNGRDMYVDQELDINRLSDYDVDHIVPQSFLKDDSIDNKVLTRSDKARGKSDNVPSEEVVKKMKNYWRQLLNAKLITQRKFDNLTKAERGGLSELDKAGFIKRQLVETRQITKHVAQILDSRMNTKYDENDKLIREVKVITLKSKLVSDFRKDFQFYKVREINNYHHAHDAYLNAVVGTALIKKYPKLESEFVYGDYKVYDVRKMIAKSEQEIGKATAKYFFYSNIMNFFKTEITLANGEIRKRPLIETNGETGEIVWDKGRDFATVRKVLSMPQVNIVKKTEVQTGGFSKESILPKRNSDKLIARKKDWDPKKYGGFDSPTVAYSVLVVAKVEKGKSKKLKSVKELLGITIMERSSFEKNPIDFLEAKGYKEVKKDLIIKLPKYSLFELENGRKRMLASAGELQKGNELALPSKYVNFLYLASHYEKLKGSPEDNEQKQLFVEQHKHYLDEIIEQISEFSKRVILADANLDKVLSAYNKHRDKPIREQAENIIHLFTLTNLGAPAAFKYFDTTIDRKRYTSTKEVLDATLIHQSITGLYETRIDLSQLGGDGGGGGPAPGGSGGTLGIEDEYRLHETSTEPDVSLGSTWLSDFPQAWAETGGMGLAVRQAPLIIPLKATSTPVSIQQYPMSHEARLGIKPHIQRLLDQGILVPCQSPWNTPLLPVKKPGTNDYRPVQDLREVNKRVEDIHPTVPNPYNLLSGLPPSHQWYTVLDLKDAFFCLRLHPTSQPLFAFEWRDPGMGISGQLTWTRLPQGFKNSPTLFNEALHRDLADFRIQHPDLILLQYVDDILLAATSELDCQQGTRALLQTLGDLGYRASAKKAQICQKQVKYLGYLLREGQRWLTEARKETVMGQPVPKTPRQLREFLGTAGFCRLWIPGFAEMAAPLYPLTKPGTLFSWGPDQQKAYQEIKQALLTAPALGLPDLTKPFELFVDEKQGYAKGVLTQKLGPWRRPVAYLSKKLDPVAAGWPPCLRMVAAIAVLTKDAGKLTMGQPLVILAPHAVEALVKQPPDRWLSNARMTHYQAMLLDTDRVQFGPVVALNPATLLPLPEEGAPHDCLEILAETHGTRPDLTDQPIPDADHTWYTDGSSFLQEGQRKAGAAVTTETEVIWAGALPAGTSAQRAELIALTQALKMAEGKRLNVYTDSRYAFATAHIHGEIYRRRGWLTSEGREIKNKSEILALLKALFLPKRLSIIHCLGHQKGDSAEARGNRLADQAAREAAIKTPPDTSTLLAGKRTADGSEFEKRTADGSEFESPKKKAKVE

SEQ ID NO: 7013 - protein, 2086 aa, synthetic construct
MPAAKRVKLDGGDKKYSIGLDIGTNSVGWAVITDEYKVPSKKFKVLGNTDRHSIKKNLIGALLFDSGETAEATRLKRTARRRYTRRKNRICYLQEIFSNEMAKVDDSFFHRLEESFLVEEDKKHERHPIFGNIVDEVAYHEKYPTIYHLRKKLVDSTDKADLRLIYLALAHMIKFRGHFLIEGDLNPDNSDVDKLFIQLVQTYNQLFEENPINASGVDAKAILSARLSKSRRLENLIAQLPGEKKNGLFGNLIALSLGLTPNFKSNFDLAEDAKLQLSKDTYDDDLDNLLAQIGDQYADLFLAAKNLSDAILLSDILRVNTEITKAPLSASMIKRYDEHHQDLTLLKALVRQQLPEKYKEIFFDQSKNGYAGYIDGGASQEEFYKFIKPILEKMDGTEELLVKLNREDLLRKQRTFDNGSIPHQIHLGELHAILRRQEDFYPFLKDNREKIEKILTFRIPYYVGPLARGNSRFAWMTRKSEETITPWNFEEVVDKGASAQSFIERMTNFDKNLPNEKVLPKHSLLYEYFTVYNELTKVKYVTEGMRKPAFLSGEQKKAIVDLLFKTNRKVTVKQLKEDYFKKIECFDSVEISGVEDRFNASLGTYHDLLKIIKDKDFLDNEENEDILEDIVLTLTLFEDREMIEERLKTYAHLFDDKVMKQLKRRRYTGWGRLSRKLINGIRDKQSGKTILDFLKSDGFANRNFMQLIHDDSLTFKEDIQKAQVSGQGDSLHEHIANLAGSPAIKKGILQTVKVVDELVKVMGRHKPENIVIEMARENQTTQKGQKNSRERMKRIEEGIKELGSQILKEHPVENTQLQNEKLYLYYLQNGRDMYVDQELDINRLSDYDVDHIVPQSFLKDDSIDNKVLTRSDKARGKSDNVPSEEVVKKMKNYWRQLLNAKLITQRKFDNLTKAERGGLSELDKAGFIKRQLVETRQITKHVAQILDSRMNTKYDENDKLIREVKVITLKSKLVSDFRKDFQFYKVREINNYHHAHDAYLNAVVGTALIKKYPKLESEFVYGDYKVYDVRKMIAKSEQEIGKATAKYFFYSNIMNFFKTEITLANGEIRKRPLIETNGETGEIVWDKGRDFATVRKVLSMPQVNIVKKTEVQTGGFSKESILPKRNSDKLIARKKDWDPKKYGGFDSPTVAYSVLVVAKVEKGKSKKLKSVKELLGITIMERSSFEKNPIDFLEAKGYKEVKKDLIIKLPKYSLFELENGRKRMLASAGELQKGNELALPSKYVNFLYLASHYEKLKGSPEDNEQKQLFVEQHKHYLDEIIEQISEFSKRVILADANLDKVLSAYNKHRDKPIREQAENIIHLFTLTNLGAPAAFKYFDTTIDRKRYTSTKEVLDATLIHQSITGLYETRIDLSQLGGDGGGGGPAPGGSGGLDDEYRLYSPLVKPDQNIQFWLEQFPQAWAETAGMGLAKQVPPQVIQLKASATPVSVRQYPLSKEAQEGIRPHVQRLIQQGILVPVQSPWNTPLLPVRKPGTNDYRPVQDLREVNKRVQDIHPTVPNPYNLLCALPPQRSWYTVLDLKDAFFCLRLHPTSQPLFAFEWRDPGTGRTGQLTWTRLPQGFKNSPTIFNEALHRDLANFRIQHPQVTLLQYVDDLLLAGATKQDCLEGTKALLLELSDLGYRASAKKAQICRREVTYLGYSLRDGQRWLTEARKKTVVQIPAPTTAKQVREFLGKAGFCRLFIPGFATLAAPLYPLTKPKGEFSWAPEHQKAFDAIKKALLSAPALALPDVTKPFTLYVDERKGVARGVLTQTLGPWRRPVAYLSKKLDPVASGWPVCLKAIAAVAILVKDADKLTLGQNITVIAPHALENIVRQPPDRWMTNARMTHYQSLLLTERVTFAPPAALNPATLLPEETDEPVTHDCHQLLIEETGVRKDLTDIPLTGEVLTWFTDGSSYVVEGKRMAGAAVVDGTRTIWASSLPEGTSAQKAELMALTQALRLAEGKSINIYTDSRYAFATAHVHGAIYKQRGWLTSAGREIKNKEEILSLLEALHLPKRLAIIHCPGHQKAKDPISRGNQMADRVAKQAAQGVNLLPAGKRTADGSEFEKRTADGSEFESPKKKAKVE

SEQ ID NO: 7014 - protein, 2088 aa, synthetic construct
MPAAKRVKLDGGDKKYSIGLDIGTNSVGWAVITDEYKVPSKKFKVLGNTDRHSIKKNLIGALLFDSGETAEATRLKRTARRRYTRRKNRICYLQEIFSNEMAKVDDSFFHRLEESFLVEEDKKHERHPIFGNIVDEVAYHEKYPTIYHLRKKLVDSTDKADLRLIYLALAHMIKFRGHFLIEGDLNPDNSDVDKLFIQLVQTYNQLFEENPINASGVDAKAILSARLSKSRRLENLIAQLPGEKKNGLFGNLIALSLGLTPNFKSNFDLAEDAKLQLSKDTYDDDLDNLLAQIGDQYADLFLAAKNLSDAILLSDILRVNTEITKAPLSASMIKRYDEHHQDLTLLKALVRQQLPEKYKEIFFDQSKNGYAGYIDGGASQEEFYKFIKPILEKMDGTEELLVKLNREDLLRKQRTFDNGSIPHQIHLGELHAILRRQEDFYPFLKDNREKIEKILTFRIPYYVGPLARGNSRFAWMTRKSEETITPWNFEEVVDKGASAQSFIERMTNFDKNLPNEKVLPKHSLLYEYFTVYNELTKVKYVTEGMRKPAFLSGEQKKAIVDLLFKTNRKVTVKQLKEDYFKKIECFDSVEISGVEDRFNASLGTYHDLLKIIKDKDFLDNEENEDILEDIVLTLTLFEDREMIEERLKTYAHLFDDKVMKQLKRRRYTGWGRLSRKLINGIRDKQSGKTILDFLKSDGFANRNFMQLIHDDSLTFKEDIQKAQVSGQGDSLHEHIANLAGSPAIKKGILQTVKVVDELVKVMGRHKPENIVIEMARENQTTQKGQKNSRERMKRIEEGIKELGSQILKEHPVENTQLQNEKLYLYYLQNGRDMYVDQELDINRLSDYDVDHIVPQSFLKDDSIDNKVLTRSDKARGKSDNVPSEEVVKKMKNYWRQLLNAKLITQRKFDNLTKAERGGLSELDKAGFIKRQLVETRQITKHVAQILDSRMNTKYDENDKLIREVKVITLKSKLVSDFRKDFQFYKVREINNYHHAHDAYLNAVVGTALIKKYPKLESEFVYGDYKVYDVRKMIAKSEQEIGKATAKYFFYSNIMNFFKTEITLANGEIRKRPLIETNGETGEIVWDKGRDFATVRKVLSMPQVNIVKKTEVQTGGFSKESILPKRNSDKLIARKKDWDPKKYGGFDSPTVAYSVLVVAKVEKGKSKKLKSVKELLGITIMERSSFEKNPIDFLEAKGYKEVKKDLIIKLPKYSLFELENGRKRMLASAGELQKGNELALPSKYVNFLYLASHYEKLKGSPEDNEQKQLFVEQHKHYLDEIIEQISEFSKRVILADANLDKVLSAYNKHRDKPIREQAENIIHLFTLTNLGAPAAFKYFDTTIDRKRYTSTKEVLDATLIHQSITGLYETRIDLSQLGGDGGGGGPAPGGSGGTLQLDDEYRLYSPLVKPDQNIQFWLEQFPQAWAETAGMGLAKQVPPQVIQLKASATPVSVRQYPLSKEAQEGIRPHVQRLIQQGILVPVQSPWNTPLLPVRKPGTNDYRPVQDLREVNKRVQDIHPTVPNPYNLLCALPPQRSWYTVLDLKDAFFCLRLHPTSQPLFAFEWRDPGTGRTGQLTWTRLPQGFKNSPTIFDEALHRDLANFRIQHPQVTLLQYVDDLLLAGATKQDCLEGTKALLLELSDLGYRASAKKAQICRREVTYLGYSLRDGQRWLTEARKKTVVQIPAPTTAKQVREFLGTAGFCRLWIPGFATLAAPLYPLTKEKGEFSWAPEHQKAFDAIKKALLSAPALALPDVTKPFTLYVDERKGVARGVLTQTLGPWRRPVAYLSKKLDPVASGWPVCLKAIAAVAILVKDADKLTLGQNITVIAPHALENIVRQPPDRWMTNARMTHYQSLLLTERVTFAPPAALNPATLLPEETDEPVTHDCHQLLIEETGVRKDLTDIPLTGEVLTWFTDGSSYVVEGKRMAGAAVVDGTRTIWASSLPEGTSAQKAELMALTQALRLAEGKSINIYTDSRYAFATAHVHGAIYKQRGLLTSAGREIKNKEEILSLLEALHLPKRLAIIHCPGHQKAKDPISRGNQMADRVAKQAAQGVNLLAGKRTADGSEFEKRTADGSEFESPKKKAKVE

SEQ ID NO: 7015 - protein, 2086 aa, synthetic construct; identical to SEQ ID NO: 7013

SEQ ID NO: 7016 - protein, 2085 aa, synthetic construct
MPAAKRVKLDGGDKKYSIGLDIGTNSVGWAVITDEYKVPSKKFKVLGNTDRHSIKKNLIGALLFDSGETAEATRLKRTARRRYTRRKNRICYLQEIFSNEMAKVDDSFFHRLEESFLVEEDKKHERHPIFGNIVDEVAYHEKYPTIYHLRKKLVDSTDKADLRLIYLALAHMIKFRGHFLIEGDLNPDNSDVDKLFIQLVQTYNQLFEENPINASGVDAKAILSARLSKSRRLENLIAQLPGEKKNGLFGNLIALSLGLTPNFKSNFDLAEDAKLQLSKDTYDDDLDNLLAQIGDQYADLFLAAKNLSDAILLSDILRVNTEITKAPLSASMIKRYDEHHQDLTLLKALVRQQLPEKYKEIFFDQSKNGYAGYIDGGASQEEFYKFIKPILEKMDGTEELLVKLNREDLLRKQRTFDNGSIPHQIHLGELHAILRRQEDFYPFLKDNREKIEKILTFRIPYYVGPLARGNSRFAWMTRKSEETITPWNFEEVVDKGASAQSFIERMTNFDKNLPNEKVLPKHSLLYEYFTVYNELTKVKYVTEGMRKPAFLSGEQKKAIVDLLFKTNRKVTVKQLKEDYFKKIECFDSVEISGVEDRFNASLGTYHDLLKIIKDKDFLDNEENEDILEDIVLTLTLFEDREMIEERLKTYAHLFDDKVMKQLKRRRYTGWGRLSRKLINGIRDKQSGKTILDFLKSDGFANRNFMQLIHDDSLTFKEDIQKAQVSGQGDSLHEHIANLAGSPAIKKGILQTVKVVDELVKVMGRHKPENIVIEMARENQTTQKGQKNSRERMKRIEEGIKELGSQILKEHPVENTQLQNEKLYLYYLQNGRDMYVDQELDINRLSDYDVDHIVPQSFLKDDSIDNKVLTRSDKARGKSDNVPSEEVVKKMKNYWRQLLNAKLITQRKFDNLTKAERGGLSELDKAGFIKRQLVETRQITKHVAQILDSRMNTKYDENDKLIREVKVITLKSKLVSDFRKDFQFYKVREINNYHHAHDAYLNAVVGTALIKKYPKLESEFVYGDYKVYDVRKMIAKSEQEIGKATAKYFFYSNIMNFFKTEITLANGEIRKRPLIETNGETGEIVWDKGRDFATVRKVLSMPQVNIVKKTEVQTGGFSKESILPKRNSDKLIARKKDWDPKKYGGFDSPTVAYSVLVVAKVEKGKSKKLKSVKELLGITIMERSSFEKNPIDFLEAKGYKEVKKDLIIKLPKYSLFELENGRKRMLASAGELQKGNELALPSKYVNFLYLASHYEKLKGSPEDNEQKQLFVEQHKHYLDEIIEQISEFSKRVILADANLDKVLSAYNKHRDKPIREQAENIIHLFTLTNLGAPAAFKYFDTTIDRKRYTSTKEVLDATLIHQSITGLYETRIDLSQLGGDGGGGGPAPGGSGGIPWLMKKPLQLTTLVPLQEYEERLLKQTMLTGSYKEKLQSLFLKYDALWQHWENQVGHRRIKPHHIATGTVNPRPQKQYPINPKAKASIQTVINDLLKQGVLIQQNSIMNTPVYPVPKPDGKWRMVLDYREVNKTIPLIAAQNQHSAGILSSIFRGKYKTTLDLSNGFWAHSITPESYWLTAFTWLGQQYCWTRLPQGFLNSPALFNADVVDLLKEVPNVQVYVDDIYISHDDPREHLEQLEKVFSLLLNAGYVVSLKKSEIAQHEVEFLGFNITKEGRGLTETFKQKLLNITPPRDLKQLQSILGLLNFARNFIPNFSELVKPLYNIIATAPGKYITWTTDNSQQLQNIISMLNSAENLEERNPEVRLIMKVNTSPSAGYIRFYNEFAKRPIMYLNYVYTKAEVKFTNTEKLLTTIHKGLIKALDLGMGQEILVYSPIVSMTKIQKTPLPERKALPIRWITWMSYLEDPRIQFHYDKTLPELQQVPTVTDDIIAKIKHPSEFSMVFYTDGSAIKHPNVNKSHNAGMGIAQVQFKPEFTVINTWSIPLGDHTAQLAEVAAVEFACKKALKIDGPVLIVTDSFYVAESVNKELPYWQSNGFFNNKKKPLKHVSKWKSIADCIQLKPDIIIIHEKGHQPTASTFHTEGNNLADKLATQGSYVVNAGKRTADGSEFEKRTADGSEFESPKKKAKVE

SEQ ID NO: 7017 - protein, 2092 aa, synthetic construct
MPAAKRVKLDGGDKKYSIGLDIGTNSVGWAVITDEYKVPSKKFKVLGNTDRHSIKKNLIGALLFDSGETAEATRLKRTARRRYTRRKNRICYLQEIFSNEMAKVDDSFFHRLEESFLVEEDKKHERHPIFGNIVDEVAYHEKYPTIYHLRKKLVDSTDKADLRLIYLALAHMIKFRGHFLIEGDLNPDNSDVDKLFIQLVQTYNQLFEENPINASGVDAKAILSARLSKSRRLENLIAQLPGEKKNGLFGNLIALSLGLTPNFKSNFDLAEDAKLQLSKDTYDDDLDNLLAQIGDQYADLFLAAKNLSDAILLSDILRVNTEITKAPLSASMIKRYDEHHQDLTLLKALVRQQLPEKYKEIFFDQSKNGYAGYIDGGASQEEFYKFIKPILEKMDGTEELLVKLNREDLLRKQRTFDNGSIPHQIHLGELHAILRRQEDFYPFLKDNREKIEKILTFRIPYYVGPLARGNSRFAWMTRKSEETITPWNFEEVVDKGASAQSFIERMTNFDKNLPNEKVLPKHSLLYEYFTVYNELTKVKYVTEGMRKPAFLSGEQKKAIVDLLFKTNRKVTVKQLKEDYFKKIECFDSVEISGVEDRFNASLGTYHDLLKIIKDKDFLDNEENEDILEDIVLTLTLFEDREMIEERLKTYAHLFDDKVMKQLKRRRYTGWGRLSRKLINGIRDKQSGKTILDFLKSDGFANRNFMQLIHDDSLTFKEDIQKAQVSGQGDSLHEHIANLAGSPAIKKGILQTVKVVDELVKVMGRHKPENIVIEMARENQTTQKGQKNSRERMKRIEEGIKELGSQILKEHPVENTQLQNEKLYLYYLQNGRDMYVDQELDINRLSDYDVDHIVPQSFLKDDSIDNKVLTRSDKARGKSDNVPSEEVVKKMKNYWRQLLNAKLITQRKFDNLTKAERGGLSELDKAGFIKRQLVETRQITKHVAQILDSRMNTKYDENDKLIREVKVITLKSKLVSDFRKDFQFYKVREINNYHHAHDAYLNAVVGTALIKKYPKLESEFVYGDYKVYDVRKMIAKSEQEIGKATAKYFFYSNIMNFFKTEITLANGEIRKRPLIETNGETGEIVWDKGRDFATVRKVLSMPQVNIVKKTEVQTGGFSKESILPKRNSDKLIARKKDWDPKKYGGFDSPTVAYSVLVVAKVEKGKSKKLKSVKELLGITIMERSSFEKNPIDFLEAKGYKEVKKDLIIKLPKYSLFELENGRKRMLASAGELQKGNELALPSKYVNFLYLASHYEKLKGSPEDNEQKQLFVEQHKHYLDEIIEQISEFSKRVILADANLDKVLSAYNKHRDKPIREQAENIIHLFTLTNLGAPAAFKYFDTTIDRKRYTSTKEVLDATLIHQSITGLYETRIDLSQLGGDGGGGGPAPGGSGGVLNLEEEYRLHEKPVPSSIDPSWLQLFPTVWAERAGMGLANQVPPVVVELRSGASPVAVRQYPMSKEAREGIRPHIQRFLDLGVLVPCQSPWNTPLLPVKKPGTNDYRPVQDLREINKRVQDIHPTVPNPYNLLSSLPPSHTWYSVLDLKDAFFCLKLHPNSQPLFAFEWRDPEKGNTGQLTWTRLPQGFKNSPTLFNEALHRDLAPFRALNPQVVLLQYVDDLLVAAPTYRDCKEGTQKLLQELSKLGYRVSAKKAQLCQKEVTYLGYLLKEGKRWLTPARKATVMKIPPPTTPRQVREFLGTAGFCRLWIPGFASLAAPLYPLTKPSIPFIWTEEHQKAFDRIKEALLSAPALALPDLTKPFTLYVDERAGVARGVLTQTLGPWRRPVAYLSKKLDPVASGWPTCLKAVAAVALLLKDADKLTLGQNVTVIASHSLESIVRQPPDRWMTNARMTHYQSLLLNERVSFAPPAVLNPATLLPVESEATPVHRCSEILAEETGTRRDLKDQPLPGVPAWYTDGSSFIAEGKRRAGAAIVDGKRTVWASSLPEGTSAQKAELVALTQALRLAEGKDINIYTDSRYAFATAHIHGAIYKQRGWLTSAGKDIKNKEEILALLEAIHLPKRVAIIHCPGHQKGNDPVATGNRRADEAAKQAALSTRVLAETTKPAGKRTADGSEFEKRTADGSEFESPKKKAKVE

SEQ ID NO: 7018 - protein, 2096 aa, synthetic construct
MPAAKRVKLDGGDKKYSIGLDIGTNSVGWAVITDEYKVPSKKFKVLGNTDRHSIKKNLIGALLFDSGETAEATRLKRTARRRYTRRKNRICYLQEIFSNEMAKVDDSFFHRLEESFLVEEDKKHERHPIFGNIVDEVAYHEKYPTIYHLRKKLVDSTDKADLRLIYLALAHMIKFRGHFLIEGDLNPDNSDVDKLFIQLVQTYNQLFEENPINASGVDAKAILSARLSKSRRLENLIAQLPGEKKNGLFGNLIALSLGLTPNFKSNFDLAEDAKLQLSKDTYDDDLDNLLAQIGDQYADLFLAAKNLSDAILLSDILRVNTEITKAPLSASMIKRYDEHHQDLTLLKALVRQQLPEKYKEIFFDQSKNGYAGYIDGGASQEEFYKFIKPILEKMDGTEELLVKLNREDLLRKQRTFDNGSIPHQIHLGELHAILRRQEDFYPFLKDNREKIEKILTFRIPYYVGPLARGNSRFAWMTRKSEETITPWNFEEVVDKGASAQSFIERMTNFDKNLPNEKVLPKHSLLYEYFTVYNELTKVKYVTEGMRKPAFLSGEQKKAIVDLLFKTNRKVTVKQLKEDYFKKIECFDSVEISGVEDRFNASLGTYHDLLKIIKDKDFLDNEENEDILEDIVLTLTLFEDREMIEERLKTYAHLFDDKVMKQLKRRRYTGWGRLSRKLINGIRDKQSGKTILDFLKSDGFANRNFMQLIHDDSLTFKEDIQKAQVSGQGDSLHEHIANLAGSPAIKKGILQTVKVVDELVKVMGRHKPENIVIEMARENQTTQKGQKNSRERMKRIEEGIKELGSQILKEHPVENTQLQNEKLYLYYLQNGRDMYVDQELDINRLSDYDVDHIVPQSFLKDDSIDNKVLTRSDKARGKSDNVPSEEVVKKMKNYWRQLLNAKLITQRKFDNLTKAERGGLSELDKAGFIKRQLVETRQITKHVAQILDSRMNTKYDENDKLIREVKVITLKSKLVSDFRKDFQFYKVREINNYHHAHDAYLNAVVGTALIKKYPKLESEFVYGDYKVYDVRKMIAKSEQEIGKATAKYFFYSNIMNFFKTEITLANGEIRKRPLIETNGETGEIVWDKGRDFATVRKVLSMPQVNIVKKTEVQTGGFSKESILPKRNSDKLIARKKDWDPKKYGGFDSPTVAYSVLVVAKVEKGKSKKLKSVKELLGITIMERSSFEKNPIDFLEAKGYKEVKKDLIIKLPKYSLFELENGRKRMLASAGELQKGNELALPSKYVNFLYLASHYEKLKGSPEDNEQKQLFVEQHKHYLDEIIEQISEFSKRVILADANLDKVLSAYNKHRDKPIREQAENIIHLFTLTNLGAPAAFKYFDTTIDRKRYTSTKEVLDATLIHQSITGLYETRIDLSQLGGDGGPAPGGSGGGGGTAPLEEEYRLFLEAPIQNVTLLEQWKREIPKVWAEINPPGLASTQAPIHVQLLSTALPVRVRQYPITLEAKRSLRETIRKFRAAGILRPVHSPWNTPLLPVRKSGTSEYRMVQDLREVNKRVETIHPTVPNPYTLLSLLPPDRIWYSVLDLKDAFFCIPLAPESQLIFAFEWADAEEGESGQLTWTRLPQGFKNSPTLFNEALNRDLQGFRLDHPSVSLLQYVDDLLIAADTQAACLSATRDLLMTLAELGYRVSGKKAQLCQEEVTYLGFKIHKGSRSLSNSRTQAILQIPVPKTKRQVREFLGTIGYCRLWIPGFAELAQPLYAATRPGNDPLVWGEKEEEAFQSLKLALTQPPALALPSLDKPFQLFVEETSGAAKGVLTQALGPWKRPVAYLSKRLDPVAAGWPRCLRAIAAAALLTREASKLTFGQDIEITSSHNLESLLRSPPDKWLTNARITQYQVLLLDPPRVRFKQTAALNPATLLPETDDTLPIHHCLDTLDSLTSTRPDLTDQPLAQAEATLFTDGSSYIRDGKRYAGAAVVTLDSVIWAEPLPIGTSAQKAELIALTKALEWSKDKSVNIYTDSRYAFATLHVHGMIYRERGWLTAGGKAIKNAPEILALLTAVWLPKRVAVMHCKGHQKDDAPTSTGNRRADEVAREVAIRPLSTQATISAGKRTADGSEFEKRTADGSEFESPKKKAKVE

SEQ ID NO: 7019 - protein, 2092 aa, synthetic construct
MPAAKRVKLDGGDKKYSIGLDIGTNSVGWAVITDEYKVPSKKFKVLGNTDRHSIKKNLIGALLFDSGETAEATRLKRTARRRYTRRKNRICYLQEIFSNEMAKVDDSFFHRLEESFLVEEDKKHERHPIFGNIVDEVAYHEKYPTIYHLRKKLVDSTDKADLRLIYLALAHMIKFRGHFLIEGDLNPDNSDVDKLFIQLVQTYNQLFEENPINASGVDAKAILSARLSKSRRLENLIAQLPGEKKNGLFGNLIALSLGLTPNFKSNFDLAEDAKLQLSKDTYDDDLDNLLAQIGDQYADLFLAAKNLSDAILLSDILRVNTEITKAPLSASMIKRYDEHHQDLTLLKALVRQQLPEKYKEIFFDQSKNGYAGYIDGGASQEEFYKFIKPILEKMDGTEELLVKLNREDLLRKQRTFDNGSIPHQIHLGELHAILRRQEDFYPFLKDNREKIEKILTFRIPYYVGPLARGNSRFAWMTRKSEETITPWNFEEVVDKGASAQSFIERMTNFDKNLPNEKVLPKHSLLYEYFTVYNELTKVKYVTEGMRKPAFLSGEQKKAIVDLLFKTNRKVTVKQLKEDYFKKIECFDSVEISGVEDRFNASLGTYHDLLKIIKDKDFLDNEENEDILEDIVLTLTLFEDREMIEERLKTYAHLFDDKVMKQLKRRRYTGWGRLSRKLINGIRDKQSGKTILDFLKSDGFANRNFMQLIHDDSLTFKEDIQKAQVSGQGDSLHEHIANLAGSPAIKKGILQTVKVVDELVKVMGRHKPENIVIEMARENQTTQKGQKNSRERMKRIEEGIKELGSQILKEHPVENTQLQNEKLYLYYLQNGRDMYVDQELDINRLSDYDVDHIVPQSFLKDDSIDNKVLTRSDKARGKSDNVPSEEVVKKMKNYWRQLLNAKLITQRKFDNLTKAERGGLSELDKAGFIKRQLVETRQITKHVAQILDSRMNTKYDENDKLIREVKVITLKSKLVSDFRKDFQFYKVREINNYHHAHDAYLNAVVGTALIKKYPKLESEFVYGDYKVYDVRKMIAKSEQEIGKATAKYFFYSNIMNFFKTEITLANGEIRKRPLIETNGETGEIVWDKGRDFATVRKVLSMPQVNIVKKTEVQTGGFSKESILPKRNSDKLIARKKDWDPKKYGGFDSPTVAYSVLVVAKVEKGKSKKLKSVKELLGITIMERSSFEKNPIDFLEAKGYKEVKKDLIIKLPKYSLFELENGRKRMLASAGELQKGNELALPSKYVNFLYLASHYEKLKGSPEDNEQKQLFVEQHKHYLDEIIEQISEFSKRVILADANLDKVLSAYNKHRDKPIREQAENIIHLFTLTNLGAPAAFKYFDTTIDRKRYTSTKEVLDATLIHQSITGLYETRIDLSQLGGDGGPAPGGSGGGGGVLNLEEEYRLHEKPVPSSIDPSWLQLFPTVWAERAGMGLANQVPPVVVELRSGASPVAVRQYPMSKEAREGIRPHIQKFLDLGVLVPCRSPWNTPLLPVKKPGTNDYRPVQDLREINKRVQDIHPTVPNPYNLLSSLPPSYTWYSVLDLKDAFFCLRLHPNSQPLFAFEWKDPEKGNTGQLTWTRLPQGFKNSPTLFNEALHRDLAPFRALNPQVVLLQYVDDLLVAAPTYEDCKKGTQKLLQELSKLGYRVSAKKAQLCQREVTYLGYLLKEGKRWLTPARKATVMKIPVPTTPRQVREFLGKAGFCRLFIPGFASLAAPLYPLTKPSIPFIWTEEHQQAFDHIKKALLSAPALALPDLTKPFTLYIDERAGVARGVLTQTLGPWRRPVAYLSKKLDPVASGWPTCLKAVAAVALLLKDADKLTLGQNVTVIASHSLESIVRQPPDRWMTNARMTHYQSLLLNERVSFAPPAVLNPATLLPVESEATPVHRCSEILAEETGTRRDLEDQPLPGVPTWYTDGSSFITEGKRRAGAPIVDGKRTVWASSLPEGTSAQKAELVALTQALRLAEGKNINIYTDSRYAFATAHIHGAIYKQRGWLTSAGKDIKNKEEILALLEAIHLPRRVAIIHCPGHQRGSNPVATGNRRADEAAKQAALSTRVLAGTTKPAGKRTADGSEFEKRTADGSEFESPKKKAKVE

SEQ ID NO: 7020 - protein, 2094 aa, synthetic construct
MPAAKRVKLDGGDKKYSIGLDIGTNSVGWAVITDEYKVPSKKFKVLGNTDRHSIKKNLIGALLFDSGETAEATRLKRTARRRYTRRKNRICYLQEIFSNEMAKVDDSFFHRLEESFLVEEDKKHERHPIFGNIVDEVAYHEKYPTIYHLRKKLVDSTDKADLRLIYLALAHMIKFRGHFLIEGDLNPDNSDVDKLFIQLVQTYNQLFEENPINASGVDAKAILSARLSKSRRLENLIAQLPGEKKNGLFGNLIALSLGLTPNFKSNFDLAEDAKLQLSKDTYDDDLDNLLAQIGDQYADLFLAAKNLSDAILLSDILRVNTEITKAPLSASMIKRYDEHHQDLTLLKALVRQQLPEKYKEIFFDQSKNGYAGYIDGGASQEEFYKFIKPILEKMDGTEELLVKLNREDLLRKQRTFDNGSIPHQIHLGELHAILRRQEDFYPFLKDNREKIEKILTFRIPYYVGPLARGNSRFAWMTRKSEETITPWNFEEVVDKGASAQSFIERMTNFDKNLPNEKVLPKHSLLYEYFTVYNELTKVKYVTEGMRKPAFLSGEQKKAIVDLLFKTNRKVTVKQLKEDYFKKIECFDSVEISGVEDRFNASLGTYHDLLKIIKDKDFLDNEENEDILEDIVLTLTLFEDREMIEERLKTYAHLFDDKVMKQLKRRRYTGWGRLSRKLINGIRDKQSGKTILDFLKSDGFANRNFMQLIHDDSLTFKEDIQKAQVSGQGDSLHEHIANLAGSPAIKKGILQTVKVVDELVKVMGRHKPENIVIEMARENQTTQKGQKNSRERMKRIEEGIKELGSQILKEHPVENTQLQNEKLYLYYLQNGRDMYVDQELDINRLSDYDVDHIVPQSFLKDDSIDNKVLTRSDKARGKSDNVPSEEVVKKMKNYWRQLLNAKLITQRKFDNLTKAERGGLSELDKAGFIKRQLVETRQITKHVAQILDSRMNTKYDENDKLIREVKVITLKSKLVSDFRKDFQFYKVREINNYHHAHDAYLNAVVGTALIKKYPKLESEFVYGDYKVYDVRKMIAKSEQEIGKATAKYFFYSNIMNFFKTEITLANGEIRKRPLIETNGETGEIVWDKGRDFATVRKVLSMPQVNIVKKTEVQTGGFSKESILPKRNSDKLIARKKDWDPKKYGGFDSPTVAYSVLVVAKVEKGKSKKLKSVKELLGITIMERSSFEKNPIDFLEAKGYKEVKKDLIIKLPKYSLFELENGRKRMLASAGELQKGNELALPSKYVNFLYLASHYEKLKGSPEDNEQKQLFVEQHKHYLDEIIEQISEFSKRVILADANLDKVLSAYNKHRDKPIREQAENIIHLFTLTNLGAPAAFKYFDTTIDRKRYTSTKEVLDATLIHQSITGLYETRIDLSQLGGDGGPAPGGSGGGGGTLNLEDEYRLYETSAEPEVSPGSTWLSDFPQAWAETGGMGLAVRQAPLIIPLKATSTPVSIKQYPMSQEAKLGIKPHIQRLLDQGILVPCQSPWNTPLLPVKKPGTNDYRPVQDLREVNKRVEDIHPTVPNPYNLLSGLPPSHRWYTVLDLKDAFFCLRLHPTSQPLFAFEWRDPGMGISGQLTWTRLPQGFKNSPTLFNEALHRDLADFRIQHPDLILLQYVDDILLAATSELDCQQGTRALLLTLGNLGYRASAKKAQLCQKQVKYLGYLLKEGQRWLTEARKETVMGQPTPKTPRQLREFLGKAGFCRLFIPGFAEMAAPLYPLTKPGTLFNWGPDQQKAYQEIKQALLTAPALGLPDLTKPFELFVDEKQGYAKGVLTQKLGPWRRPVAYLSKKLDPVAAGWPPCLRMVAAIAVLRKDAGKLTMGQPLVILAPHAVEALVKQPPDRWLSNARMTHYQAMLLDTDRVQFGPVVALNPATLLPLPEEGAPHDCLEILAETHGTRPDLTDQPIPDADHTWYTDGSSFLQEGQRKAGAAVTTETEVIWARALPAGTSAQRAELIALTQALKMAEGKRLNVYTDSRYAFATAHIHGEIYRRRGWLTSEGREIKNKSEILALLKALFLPKRLSIIHCLGHQKGDSAEARGNRLADQAAREAAIKTPPDTSTLLAGKRTADGSEFEKRTADGSEFESPKKKAKVE

SEQ ID NO: 7021 - protein, 2094 aa, synthetic construct
MPAAKRVKLDGGDKKYSIGLDIGTNSVGWAVITDEYKVPSKKFKVLGNTDRHSIKKNLIGALLFDSGETAEATRLKRTARRRYTRRKNRICYLQEIFSNEMAKVDDSFFHRLEESFLVEEDKKHERHPIFGNIVDEVAYHEKYPTIYHLRKKLVDSTDKADLRLIYLALAHMIKFRGHFLIEGDLNPDNSDVDKLFIQLVQTYNQLFEENPINASGVDAKAILSARLSKSRRLENLIAQLPGEKKNGLFGNLIALSLGLTPNFKSNFDLAEDAKLQLSKDTYDDDLDNLLAQIGDQYADLFLAAKNLSDAILLSDILRVNTEITKAPLSASMIKRYDEHHQDLTLLKALVRQQLPEKYKEIFFDQSKNGYAGYIDGGASQEEFYKFIKPILEKMDGTEELLVKLNREDLLRKQRTFDNGSIPHQIHLGELHAILRRQEDFYPFLKDNREKIEKILTFRIPYYVGPLARGNSRFAWMTRKSEETITPWNFEEVVDKGASAQSFIERMTNFDKNLPNEKVLPKHSLLYEYFTVYNELTKVKYVTEGMRKPAFLSGEQKKAIVDLLFKTNRKVTVKQLKEDYFKKIECFDSVEISGVEDRFNASLGTYHDLLKIIKDKDFLDNEENEDILEDIVLTLTLFEDREMIEERLKTYAHLFDDKVMKQLKRRRYTGWGRLSRKLINGIRDKQSGKTILDFLKSDGFANRNFMQLIHDDSLTFKEDIQKAQVSGQGDSLHEHIANLAGSPAIKKGILQTVKVVDELVKVMGRHKPENIVIEMARENQTTQKGQKNSRERMKRIEEGIKELGSQILKEHPVENTQLQNEKLYLYYLQNGRDMYVDQELDINRLSDYDVDHIVPQSFLKDDSIDNKVLTRSDKARGKSDNVPSEEVVKKMKNYWRQLLNAKLITQRKFDNLTKAERGGLSELDKAGFIKRQLVETRQITKHVAQILDSRMNTKYDENDKLIREVKVITLKSKLVSDFRKDFQFYKVREINNYHHAHDAYLNAVVGTALIKKYPKLESEFVYGDYKVYDVRKMIAKSEQEIGKATAKYFFYSNIMNFFKTEITLANGEIRKRPLIETNGETGEIVWDKGRDFATVRKVLSMPQVNIVKKTEVQTGGFSKESILPKRNSDKLIARKKDWDPKKYGGFDSPTVAYSVLVVAKVEKGKSKKLKSVKELLGITIMERSSFEKNPIDFLEAKGYKEVKKDLIIKLPKYSLFELENGRKRMLASAGELQKGNELALPSKYVNFLYLASHYEKLKGSPEDNEQKQLFVEQHKHYLDEIIEQISEFSKRVILADANLDKVLSAYNKHRDKPIREQAENIIHLFTLTNLGAPAAFKYFDTTIDRKRYTSTKEVLDATLIHQSITGLYETRIDLSQLGGDGGPAPGGSGGGGGTLGIEDEYRLHETSTEPDVSLGSTWLSDFPQAWAETGGMGLAVRQAPLIIPLKATSTPVSIQQYPMSHEARLGIKPHIQRLLDQGILVPCQSPWNTPLLPVKKPGTNDYRPVQDLREVNKRVEDIHPTVPNPYNLLSGLPPSHQWYTVLDLKDAFFCLRLHPTSQPLFAFEWRDPGMGISGQLTWTRLPQGFKNSPTLFDEALHRDLADFRIQHPDLILLQYVDDILLAATSELDCQQGTRALLQTLGDLGYRASAKKAQICQKQVKYLGYLLREGQRWLTEARKETVMGQPVPKTPRQLREFLGTAGFCRLWIPGFAEMAAPLYPLTKTGTLFSWGPDQQKAYQEIKQALLTAPALGLPDLTKPFELFVDEKQGYAKGVLTQKLGPWRRPVAYLSKKLDPVAAGWPPCLRMVAAIAVLTKDAGKLTMGQPLVILAPHAVEALVKQPPDRWLSNARMTHYQAMLLDTDRVQFGPVVALNPATLLPLPEEGAPHDCLEILAETHGTRPDLTDQPIPDADHTWYTDGSSFLQEGQRKAGAAVTTETEVIWAGALPAGTSAQRAELIALTQALKMAEGKRLNVYTDSRYAFATAHIHGEIYRRRGLLTSEGREIKNKSEILALLKALFLPKRLSIIHCLGHQKGDSAEARGNRLADQAAREAAIKTPPDTSTLLAGKRTADGSEFEKRTADGSEFESPKKKAKVE

SEQ ID NO: 7022 - protein, 2094 aa, synthetic construct
MPAAKRVKLDGGDKKYSIGLDIGTNSVGWAVITDEYKVPSKKFKVLGNTDRHSIKKNLIGALLFDSGETAEATRLKRTARRRYTRRKNRICYLQEIFSNEMAKVDDSFFHRLEESFLVEEDKKHERHPIFGNIVDEVAYHEKYPTIYHLRKKLVDSTDKADLRLIYLALAHMIKFRGHFLIEGDLNPDNSDVDKLFIQLVQTYNQLFEENPINASGVDAKAILSARLSKSRRLENLIAQLPGEKKNGLFGNLIALSLGLTPNFKSNFDLAEDAKLQLSKDTYDDDLDNLLAQIGDQYADLFLAAKNLSDAILLSDILRVNTEITKAPLSASMIKRYDEHHQDLTLLKALVRQQLPEKYKEIFFDQSKNGYAGYIDGGASQEEFYKFIKPILEKMDGTEELLVKLNREDLLRKQRTFDNGSIPHQIHLGELHAILRRQEDFYPFLKDNREKIEKILTFRIPYYVGPLARGNSRFAWMTRKSEETITPWNFEEVVDKGASAQSFIERMTNFDKNLPNEKVLPKHSLLYEYFTVYNELTKVKYVTEGMRKPAFLSGEQKKAIVDLLFKTNRKVTVKQLKEDYFKKIECFDSVEISGVEDRFNASLGTYHDLLKIIKDKDFLDNEENEDILEDIVLTLTLFEDREMIEERLKTYAHLFDDKVMKQLKRRRYTGWGRLSRKLINGIRDKQSGKTILDFLKSDGFANRNFMQLIHDDSLTFKEDIQKAQVSGQGDSLHEHIANLAGSPAIKKGILQTVKVVDELVKVMGRHKPENIVIEMARENQTTQKGQKNSRERMKRIEEGIKELGSQILKEHPVENTQLQNEKLYLYYLQNGRDMYVDQELDINRLSDYDVDHIVPQSFLKDDSIDNKVLTRSDKARGKSDNVPSEEVVKKMKNYWRQLLNAKLITQRKFDNLTKAERGGLSELDKAGFIKRQLVETRQITKHVAQILDSRMNTKYDENDKLIREVKVITLKSKLVSDFRKDFQFYKVREINNYHHAHDAYLNAVVGTALIKKYPKLESEFVYGDYKVYDVRKMIAKSEQEIGKATAKYFFYSNIMNFFKTEITLANGEIRKRPLIETNGETGEIVWDKGRDFATVRKVLSMPQVNIVKKTEVQTGGFSKESILPKRNSDKLIARKKDWDPKKYGGFDSPTVAYSVLVVAKVEKGKSKKLKSVKELLGITIMERSSFEKNPIDFLEAKGYKEVKKDLIIKLPKYSLFELENGRKRMLASAGELQKGNELALPSKYVNFLYLASHYEKLKGSPEDNEQKQLFVEQHKHYLDEIIEQISEFSKRVILADANLDKVLSAYNKHRDKPIREQAENIIHLFTLTNLGAPAAFKYFDTTIDRKRYTSTKEVLDATLIHQSITGLYETRIDLSQLGGDGGPAPGGSGGGGGTLNIEDEHRLHETSKEPDVSLGSTWLSDFPQAWAETGGMGLAVRQAPLIIPLKATSTPVSIKQYPMSQEARLGIKPHIQRLLDQGILVPCQSPWNTPLLPVKKPGTNDYRPVQDLREVNKRVEDIHPTVPNPYNLLSGLPPSHQWYTVLDLKDAFFCLRLHPTSQPLFAFEWRDPEMGISGQLTWTRLPQGFKNSPTLFDEALHRDLADFRIQHPDLILLQYVDDLLLAATSELDCQQGTRALLQTLGNLGYRASAKKAQICQKQVKYLGYLLKEGQRWLTEARKETVMGQPTPKTPRQLREFLGTAGFCRLWIPGFAEMAAPLYPLTKTGTLFNWGPDQQKAYQEIKQALLTAPALGLPDLTKPFELFVDEKQGYAKGVLTQKLGPWRRPVAYLSKKLDPVAAGWPPCLRMVAAIAVLTKDAGKLTMGQPLVILAPHAVEALVKQPPDRWLSNARMTHYQALLLDTDRVQFGPVVALNPATLLPLPEEGLQHNCLDILAEAHGTRPDLTDQPLPDADHTWYTDGSSLLQEGQRKAGAAVTTETEVIWAKALPAGTSAQRAELIALTQALKMAEGKKLNVYTDSRYAFATAHIHGEIYRRRGLLTSEGKEIKNKDEILALLKALFLPKRLSIIHCPGHQKGHSAEARGNRMADQAARKAAITETPDTSTLLAGKRTADGSEFEKRTADGSEFESPKKKAKVE

SEQ ID NO: 7023 - protein, 2088 aa, synthetic construct
MPAAKRVKLDGGDKKYSIGLDIGTNSVGWAVITDEYKVPSKKFKVLGNTDRHSIKKNLIGALLFDSGETAEATRLKRTARRRYTRRKNRICYLQEIFSNEMAKVDDSFFHRLEESFLVEEDKKHERHPIFGNIVDEVAYHEKYPTIYHLRKKLVDSTDKADLRLIYLALAHMIKFRGHFLIEGDLNPDNSDVDKLFIQLVQTYNQLFEENPINASGVDAKAILSARLSKSRRLENLIAQLPGEKKNGLFGNLIALSLGLTPNFKSNFDLAEDAKLQLSKDTYDDDLDNLLAQIGDQYADLFLAAKNLSDAILLSDILRVNTEITKAPLSASMIKRYDEHHQDLTLLKALVRQQLPEKYKEIFFDQSKNGYAGYIDGGASQEEFYKFIKPILEKMDGTEELLVKLNREDLLRKQRTFDNGSIPHQIHLGELHAILRRQEDFYPFLKDNREKIEKILTFRIPYYVGPLARGNSRFAWMTRKSEETITPWNFEEVVDKGASAQSFIERMTNFDKNLPNEKVLPKHSLLYEYFTVYNELTKVKYVTEGMRKPAFLSGEQKKAIVDLLFKTNRKVTVKQLKEDYFKKIECFDSVEISGVEDRFNASLGTYHDLLKIIKDKDFLDNEENEDILEDIVLTLTLFEDREMIEERLKTYAHLFDDKVMKQLKRRRYTGWGRLSRKLINGIRDKQSGKTILDFLKSDGFANRNFMQLIHDDSLTFKEDIQKAQVSGQGDSLHEHIANLAGSPAIKKGILQTVKVVDELVKVMGRHKPENIVIEMARENQTTQKGQKNSRERMKRIEEGIKELGSQILKEHPVENTQLQNEKLYLYYLQNGRDMYVDQELDINRLSDYDVDHIVPQSFLKDDSIDNKVLTRSDKARGKSDNVPSEEVVKKMKNYWRQLLNAKLITQRKFDNLTKAERGGLSELDKAGFIKRQLVETRQITKHVAQILDSRMNTKYDENDKLIREVKVITLKSKLVSDFRKDFQFYKVREINNYHHAHDAYLNAVVGTALIKKYPKLESEFVYGDYKVYDVRKMIAKSEQEIGKATAKYFFYSNIMNFFKTEITLANGEIRKRPLIETNGETGEIVWDKGRDFATVRKVLSMPQVNIVKKTEVQTGGFSKESILPKRNSDKLIARKKDWDPKKYGGFDSPTVAYSVLVVAKVEKGKSKKLKSVKELLGITIMERSSFEKNPIDFLEAKGYKEVKKDLIIKLPKYSLFELENGRKRMLASAGELQKGNELALPSKYVNFLYLASHYEKLKGSPEDNEQKQLFVEQHKHYLDEIIEQISEFSKRVILADANLDKVLSAYNKHRDKPIREQAENIIHLFTLTNLGAPAAFKYFDTTIDRKRYTSTKEVLDATLIHQSITGLYETRIDLSQLGGDGGPAPGGSGGGGGTLQLDDEYRLYSPLVKPDQNIQFWLEQFPQAWAETAGMGLAKQVPPQVIQLKASATPVSVRQYPLSKEAQEGIRPHVQRLIQQGILVPVQSPWNTPLLPVRKPGTNDYRPVQDLREVNKRVQDIHPTVPNPYNLLCALPPQRSWYTVLDLKDAFFCLRLHPTSQPLFAFEWRDPGTGRTGQLTWTRLPQGFKNSPTIFDEALHRDLANFRIQHPQVTLLQYVDDLLLAGATKQDCLEGTKALLLELSDLGYRASAKKAQICRREVTYLGYSLRDGQRWLTEARKKTVVQIPAPTTAKQVREFLGTAGFCRLWIPGFATLAAPLYPLTKEKGEFSWAPEHQKAFDAIKKALLSAPALALPDVTKPFTLYVDERKGVARGVLTQTLGPWRRPVAYLSKKLDPVASGWPVCLKAIAAVAILVKDADKLTLGQNITVIAPHALENIVRQPPDRWMTNARMTHYQSLLLTERVTFAPPAALNPATLLPEETDEPVTHDCHQLLIEETGVRKDLTDIPLTGEVLTWFTDGSSYVVEGKRMAGAAVVDGTRTIWASSLPEGTSAQKAELMALTQALRLAEGKSINIYTDSRYAFATAHVHGAIYKQRGLLTSAGREIKNKEEILSLLEALHLPKRLAIIHCPGHQKAKDPISRGNQMADRVAKQAAQGVNLLAGKRTADGSEFEKRTADGSEFESPKKKAKVE

SEQ ID NO: 7024 - protein, 2085 aa, synthetic construct
MPAAKRVKLDGGDKKYSIGLDIGTNSVGWAVITDEYKVPSKKFKVLGNTDRHSIKKNLIGALLFDSGETAEATRLKRTARRRYTRRKNRICYLQEIFSNEMAKVDDSFFHRLEESFLVEEDKKHERHPIFGNIVDEVAYHEKYPTIYHLRKKLVDSTDKADLRLIYLALAHMIKFRGHFLIEGDLNPDNSDVDKLFIQLVQTYNQLFEENPINASGVDAKAILSARLSKSRRLENLIAQLPGEKKNGLFGNLIALSLGLTPNFKSNFDLAEDAKLQLSKDTYDDDLDNLLAQIGDQYADLFLAAKNLSDAILLSDILRVNTEITKAPLSASMIKRYDEHHQDLTLLKALVRQQLPEKYKEIFFDQSKNGYAGYIDGGASQEEFYKFIKPILEKMDGTEELLVKLNREDLLRKQRTFDNGSIPHQIHLGELHAILRRQEDFYPFLKDNREKIEKILTFRIPYYVGPLARGNSRFAWMTRKSEETITPWNFEEVVDKGASAQSFIERMTNFDKNLPNEKVLPKHSLLYEYFTVYNELTKVKYVTEGMRKPAFLSGEQKKAIVDLLFKTNRKVTVKQLKEDYFKKIECFDSVEISGVEDRFNASLGTYHDLLKIIKDKDFLDNEENEDILEDIVLTLTLFEDREMIEERLKTYAHLFDDKVMKQLKRRRYTGWGRLSRKLINGIRDKQSGKTILDFLKSDGFANRNFMQLIHDDSLTFKEDIQKAQVSGQGDSLHEHIANLAGSPAIKKGILQTVKVVDELVKVMGRHKPENIVIEMARENQTTQKGQKNSRERMKRIEEGIKELGSQILKEHPVENTQLQNEKLYLYYLQNGRDMYVDQELDINRLSDYDVDHIVPQSFLKDDSIDNKVLTRSDKARGKSDNVPSEEVVKKMKNYWRQLLNAKLITQRKFDNLTKAERGGLSELDKAGFIKRQLVETRQITKHVAQILDSRMNTKYDENDKLIREVKVITLKSKLVSDFRKDFQFYKVREINNYHHAHDAYLNAVVGTALIKKYPKLESEFVYGDYKVYDVRKMIAKSEQEIGKATAKYFFYSNIMNFFKTEITLANGEIRKRPLIETNGETGEIVWDKGRDFATVRKVLSMPQVNIVKKTEVQTGGFSKESILPKRNSDKLIARKKDWDPKKYGGFDSPTVAYSVLVVAKVEKGKSKKLKSVKELLGITIMERSSFEKNPIDFLEAKGYKEVKKDLIIKLPKYSLFELENGRKRMLASAGELQKGNELALPSKYVNFLYLASHYEKLKGSPEDNEQKQLFVEQHKHYLDEIIEQISEFSKRVILADANLDKVLSAYNKHRDKPIREQAENIIHLFTLTNLGAPAAFKYFDTTIDRKRYTSTKEVLDATLIHQSITGLYETRIDLSQLGGDGGPAPGGSGGGGGIPWLMKKPLQLTTLVPLQEYEERLLKQTMLTGSYKEKLQSLFLKYDALWQHWENQVGHRRIKPHHIATGTVNPRPQKQYPINPKAKASIQTVINDLLKQGVLIQQNSIMNTPVYPVPKPDGKWRMVLDYREVNKTIPLIAAQNQHSAGILSSIFRGKYKTTLDLSNGFWAHSITPESYWLTAFTWLGQQYCWTRLPQGFLNSPALFNADVVDLLKEVPNVQVYVDDIYISHDDPREHLEQLEKVFSLLLNAGYVVSLKKSEIAQHEVEFLGFNITKEGRGLTETFKQKLLNITPPRDLKQLQSILGKLNFARNFIPNFSELVKPLYNIIATAPGKYITWTTDNSQQLQNIISMLNSAENLEERNPEVRLIMKVNTSPSAGYIRFYNEFAKRPIMYLNYVYTKAEVKFTNTEKLLTTIHKGLIKALDLGMGQEILVYSPIVSMTKIQKTPLPERKALPIRWITWMSYLEDPRIQFHYDKTLPELQQVPTVTDDIIAKIKHPSEFSMVFYTDGSAIKHPNVNKSHNAGMGIAQVQFKPEFTVINTWSIPLGDHTAQLAEVAAVEFACKKALKIDGPVLIVTDSFYVAESVNKELPYWQSNGFFNNKKKPLKHVSKWKSIADCIQLKPDIIIIHEKGHQPTASTFHTEGNNLADKLATQGSYVVNAGKRTADGSEFEKRTADGSEFESPKKKAKVE

SEQ ID NO: 7025 - protein, 2096 aa, synthetic construct
MPAAKRVKLDGGDKKYSIGLDIGTNSVGWAVITDEYKVPSKKFKVLGNTDRHSIKKNLIGALLFDSGETAEATRLKRTARRRYTRRKNRICYLQEIFSNEMAKVDDSFFHRLEESFLVEEDKKHERHPIFGNIVDEVAYHEKYPTIYHLRKKLVDSTDKADLRLIYLALAHMIKFRGHFLIEGDLNPDNSDVDKLFIQLVQTYNQLFEENPINASGVDAKAILSARLSKSRRLENLIAQLPGEKKNGLFGNLIALSLGLTPNFKSNFDLAEDAKLQLSKDTYDDDLDNLLAQIGDQYADLFLAAKNLSDAILLSDILRVNTEITKAPLSASMIKRYDEHHQDLTLLKALVRQQLPEKYKEIFFDQSKNGYAGYIDGGASQEEFYKFIKPILEKMDGTEELLVKLNREDLLRKQRTFDNGSIPHQIHLGELHAILRRQEDFYPFLKDNREKIEKILTFRIPYYVGPLARGNSRFAWMTRKSEETITPWNFEEVVDKGASAQSFIERMTNFDKNLPNEKVLPKHSLLYEYFTVYNELTKVKYVTEGMRKPAFLSGEQKKAIVDLLFKTNRKVTVKQLKEDYFKKIECFDSVEISGVEDRFNASLGTYHDLLKIIKDKDFLDNEENEDILEDIVLTLTLFEDREMIEERLKTYAHLFDDKVMKQLKRRRYTGWGRLSRKLINGIRDKQSGKTILDFLKSDGFANRNFMQLIHDDSLTFKEDIQKAQVSGQGDSLHEHIANLAGSPAIKKGILQTVKVVDELVKVMGRHKPENIVIEMARENQTTQKGQKNSRERMKRIEEGIKELGSQILKEHPVENTQLQNEKLYLYYLQNGRDMYVDQELDINRLSDYDVDHIVPQSFLKDDSIDNKVLTRSDKARGKSDNVPSEEVVKKMKNYWRQLLNAKLITQRKFDNLTKAERGGLSELDKAGFIKRQLVETRQITKHVAQILDSRMNTKYDENDKLIREVKVITLKSKLVSDFRKDFQFYKVREINNYHHAHDAYLNAVVGTALIKKYPKLESEFVYGDYKVYDVRKMIAKSEQEIGKATAKYFFYSNIMNFFKTEITLANGEIRKRPLIETNGETGEIVWDKGRDFATVRKVLSMPQVNIVKKTEVQTGGFSKESILPKRNSDKLIARKKDWDPKKYGGFDSPTVAYSVLVVAKVEKGKSKKLKSVKELLGITIMERSSFEKNPIDFLEAKGYKEVKKDLIIKLPKYSLFELENGRKRMLASAGELQKGNELALPSKYVNFLYLASHYEKLKGSPEDNEQKQLFVEQHKHYLDEIIEQISEFSKRVILADANLDKVLSAYNKHRDKPIREQAENIIHLFTLTNLGAPAAFKYFDTTIDRKRYTSTKEVLDATLIHQSITGLYETRIDLSQLGGDGGPAPGGGGGSGGTAPLEEEYRLFLEAPIQNVTLLEQWKREIPKVWAEINPPGLASTQAPIHVQLLSTALPVRVRQYPITLEAKRSLRETIRKFRAAGILRPVHSPWNTPLLPVRKSGTSEYRMVQDLREVNKRVETIHPTVPNPYTLLSLLPPDRIWYSVLDLKDAFFCIPLAPESQLIFAFEWADAEEGESGQLTWTRLPQGFKNSPTLFDEALNRDLQGFRLDHPSVSLLQYVDDLLIAADTQAACLSATRDLLMTLAELGYRVSGKKAQLCQEEVTYLGFKIHKGSRSLSNSRTQAILQIPVPKTKRQVREFLGTIGYCRLWIPGFAELAQPLYAATRGGNDPLVWGEKEEEAFQSLKLALTQPPALALPSLDKPFQLFVEETSGAAKGVLTQALGPWKRPVAYLSKRLDPVAAGWPRCLRAIAAAALLTREASKLTFGQDIEITSSHNLESLLRSPPDKWLTNARITQYQVLLLDPPRVRFKQTAALNPATLLPETDDTLPIHHCLDTLDSLTSTRPDLTDQPLAQAEATLFTDGSSYIRDGKRYAGAAVVTLDSVIWAEPLPIGTSAQKAELIALTKALEWSKDKSVNIYTDSRYAFATLHVHGMIYRERGLLTAGGKAIKNAPEILALLTAVWLPKRVAVMHCKGHQKDDAPTSTGNRRADEVAREVAIRPLSTQATISAGKRTADGSEFEKRTADGSEFESPKKKAKVE

SEQ ID NO: 7026 - protein, 2100 aa, synthetic construct
MPAAKRVKLDGGDKKYSIGLDIGTNSVGWAVITDEYKVPSKKFKVLGNTDRHSIKKNLIGALLFDSGETAEATRLKRTARRRYTRRKNRICYLQEIFSNEMAKVDDSFFHRLEESFLVEEDKKHERHPIFGNIVDEVAYHEKYPTIYHLRKKLVDSTDKADLRLIYLALAHMIKFRGHFLIEGDLNPDNSDVDKLFIQLVQTYNQLFEENPINASGVDAKAILSARLSKSRRLENLIAQLPGEKKNGLFGNLIALSLGLTPNFKSNFDLAEDAKLQLSKDTYDDDLDNLLAQIGDQYADLFLAAKNLSDAILLSDILRVNTEITKAPLSASMIKRYDEHHQDLTLLKALVRQQLPEKYKEIFFDQSKNGYAGYIDGGASQEEFYKFIKPILEKMDGTEELLVKLNREDLLRKQRTFDNGSIPHQIHLGELHAILRRQEDFYPFLKDNREKIEKILTFRIPYYVGPLARGNSRFAWMTRKSEETITPWNFEEVVDKGASAQSFIERMTNFDKNLPNEKVLPKHSLLYEYFTVYNELTKVKYVTEGMRKPAFLSGEQKKAIVDLLFKTNRKVTVKQLKEDYFKKIECFDSVEISGVEDRFNASLGTYHDLLKIIKDKDFLDNEENEDILEDIVLTLTLFEDREMIEERLKTYAHLFDDKVMKQLKRRRYTGWGRLSRKLINGIRDKQSGKTILDFLKSDGFANRNFMQLIHDDSLTFKEDIQKAQVSGQGDSLHEHIANLAGSPAIKKGILQTVKVVDELVKVMGRHKPENIVIEMARENQTTQKGQKNSRERMKRIEEGIKELGSQILKEHPVENTQLQNEKLYLYYLQNGRDMYVDQELDINRLSDYDVDHIVPQSFLKDDSIDNKVLTRSDKARGKSDNVPSEEVVKKMKNYWRQLLNAKLITQRKFDNLTKAERGGLSELDKAGFIKRQLVETRQITKHVAQILDSRMNTKYDENDKLIREVKVITLKSKLVSDFRKDFQFYKVREINNYHHAHDAYLNAVVGTALIKKYPKLESEFVYGDYKVYDVRKMIAKSEQEIGKATAKYFFYSNIMNFFKTEITLANGEIRKRPLIETNGETGEIVWDKGRDFATVRKVLSMPQVNIVKKTEVQTGGFSKESILPKRNSDKLIARKKDWDPKKYGGFDSPTVAYSVLVVAKVEKGKSKKLKSVKELLGITIMERSSFEKNPIDFLEAKGYKEVKKDLIIKLPKYSLFELENGRKRMLASAGELQKGNELALPSKYVNFLYLASHYEKLKGSPEDNEQKQLFVEQHKHYLDEIIEQISEFSKRVILADANLDKVLSAYNKHRDKPIREQAENIIHLFTLTNLGAPAAFKYFDTTIDRKRYTSTKEVLDATLIHQSITGLYETRIDLSQLGGDGGPAPGGGGGSGGTVSLQDEHRLFDIPVTTSLPDVWLQDFPQAWAETGGLGRAKCQAPIIIDLKPTAVPVSIKQYPMSLEAHMGIRQHIIKFLELGVLRPCRSPWNTPLLPVKKPGTQDYRPVQDLREINKRTVDIHPTVPNPYNLLSTLKPDYSWYTVLDLKDAFFCLPLAPQSQELFAFEWKDPERGISGQLTWTRLPQGFKNSPTLFNEALHRDLTDFRTQHPEVTLLQYVDDLLLAAPTKKACTQGTRHLLQELGEKGYRASAKKAQICQTKVTYLGYILSEGKRWLTPGRIETVARIPPPRNPREVREFLGTAGFCRLWIPGFAELAAPLYALTKPSTPFTWQTEHQLAFEALKKALLSAPALGLPDTSKPFTLFLDERQGIAKGVLTQKLGPWKRPVAYLSKKLDPVAAGWPPCLRIMAATAMLVKDSAKLTLGQPLTVITPHTLEAIVRQPPDRWITNARLTHYQALLLDTDRVQFGPPVTLNPATLLPVPENQPSPHDCRQVLAETHGTREDLKDQELPDADHTWYTDGSSYLDSGTRRAGAAVVDGHNTIWAQSLPPGTSAQKAELIALTKALELSKGKKANIYTDSRYAFATAHTHGSIYERRGWLTSEGKEIKNKAEIIALLKALFLPQEVAIIHCPGHQKGQDPVAVGNRQADRVARQAAMAEVLTLATEPDNTSHITAGKRTADGSEFEKRTADGSEFESPKKKAKVE

SEQ ID NO: 7027 - protein, 2171 aa, synthetic construct
MPAAKRVKLDGGDKKYSIGLDIGTNSVGWAVITDEYKVPSKKFKVLGNTDRHSIKKNLIGALLFDSGETAEATRLKRTARRRYTRRKNRICYLQEIFSNEMAKVDDSFFHRLEESFLVEEDKKHERHPIFGNIVDEVAYHEKYPTIYHLRKKLVDSTDKADLRLIYLALAHMIKFRGHFLIEGDLNPDNSDVDKLFIQLVQTYNQLFEENPINASGVDAKAILSARLSKSRRLENLIAQLPGEKKNGLFGNLIALSLGLTPNFKSNFDLAEDAKLQLSKDTYDDDLDNLLAQIGDQYADLFLAAKNLSDAILLSDILRVNTEITKAPLSASMIKRYDEHHQDLTLLKALVRQQLPEKYKEIFFDQSKNGYAGYIDGGASQEEFYKFIKPILEKMDGTEELLVKLNREDLLRKQRTFDNGSIPHQIHLGELHAILRRQEDFYPFLKDNREKIEKILTFRIPYYVGPLARGNSRFAWMTRKSEETITPWNFEEVVDKGASAQSFIERMTNFDKNLPNEKVLPKHSLLYEYFTVYNELTKVKYVTEGMRKPAFLSGEQKKAIVDLLFKTNRKVTVKQLKEDYFKKIECFDSVEISGVEDRFNASLGTYHDLLKIIKDKDFLDNEENEDILEDIVLTLTLFEDREMIEERLKTYAHLFDDKVMKQLKRRRYTGWGRLSRKLINGIRDKQSGKTILDFLKSDGFANRNFMQLIHDDSLTFKEDIQKAQVSGQGDSLHEHIANLAGSPAIKKGILQTVKVVDELVKVMGRHKPENIVIEMARENQTTQKGQKNSRERMKRIEEGIKELGSQILKEHPVENTQLQNEKLYLYYLQNGRDMYVDQELDINRLSDYDVDHIVPQSFLKDDSIDNKVLTRSDKARGKSDNVPSEEVVKKMKNYWRQLLNAKLITQRKFDNLTKAERGGLSELDKAGFIKRQLVETRQITKHVAQILDSRMNTKYDENDKLIREVKVITLKSKLVSDFRKDFQFYKVREINNYHHAHDAYLNAVVGTALIKKYPKLESEFVYGDYKVYDVRKMIAKSEQEIGKATAKYFFYSNIMNFFKTEITLANGEIRKRPLIETNGETGEIVWDKGRDFATVRKVLSMPQVNIVKKTEVQTGGFSKESILPKRNSDKLIARKKDWDPKKYGGFDSPTVAYSVLVVAKVEKGKSKKLKSVKELLGITIMERSSFEKNPIDFLEAKGYKEVKKDLIIKLPKYSLFELENGRKRMLASAGELQKGNELALPSKYVNFLYLASHYEKLKGSPEDNEQKQLFVEQHKHYLDEIIEQISEFSKRVILADANLDKVLSAYNKHRDKPIREQAENIIHLFTLTNLGAPAAFKYFDTTIDRKRYTSTKEVLDATLIHQSITGLYETRIDLSQLGGDGGPAPGGGGGSGGMDLLKPLTVERKGVKIKGYWNSQADITCVPKDLLQGEEPVRQQNVTTIHGTQEGDVYYVNLKIDGRRINTEVIGTTLDYAIITPGDVPWILKKPLELTIKLDLEEQQGTLLNNSILSKKGKEELKQLFEKYSALWQSWENQVGHRRIRPHKIATGTVKPTPQKQYHINPKAKPDIQIVINDLLKQGVLIQKESTMNTPVYPVPKPNGRWRMVLDYRAVNKVTPLIAVQNQHSYGILGSLFKGRYKTTIDLSNGFWAHPIVPEDYWITAFTWQGKQYCWTVLPQGFLNSPGLFTGDVVDLLQGIPNVEVYVDDVYISHDSEKEHLEYLDILFNRLKEAGYIISLKKSNIANSIVDFLGFQITNEGRGLTDTFKEKLENITAPTTLKQLQSILGLLNFARNFIPDFTELIAPLYALIPKSTKNYVPWQIEHSTTLETLITKLNGAEYLQGRKGDKTLIMKVNASYTTGYIRYYNEGEKKPISYVSIVFSKTELKFTELEKLLTTVHKGLLKALDLSMGQNIHVYSPIVSMQNIQKTPQTAKKALASRWLSWLSYLEDPRIRFFYDPQMPALKDLPAVDTGKDNKKHPSNFQHIFYTDGSAITSPTKEGHLNAGMGIVYFINKDGNLQKQQEWSISLGNHTAQFAEIAAFEFALKKCLPLGGNILVVTDSNYVAKAYNEELDVWASNGFVNNRKKPLKHISKWKSVADLKRLRPDVVVTHEPGHQKLDSSPHAYGNNLADQLATQASFKVHAGKRTADGSEFEKRTADGSEFESPKKKAKVE

SEQ ID NO: 7028 - protein, 2085 aa, synthetic construct
MPAAKRVKLDGGDKKYSIGLDIGTNSVGWAVITDEYKVPSKKFKVLGNTDRHSIKKNLIGALLFDSGETAEATRLKRTARRRYTRRKNRICYLQEIFSNEMAKVDDSFFHRLEESFLVEEDKKHERHPIFGNIVDEVAYHEKYPTIYHLRKKLVDSTDKADLRLIYLALAHMIKFRGHFLIEGDLNPDNSDVDKLFIQLVQTYNQLFEENPINASGVDAKAILSARLSKSRRLENLIAQLPGEKKNGLFGNLIALSLGLTPNFKSNFDLAEDAKLQLSKDTYDDDLDNLLAQIGDQYADLFLAAKNLSDAILLSDILRVNTEITKAPLSASMIKRYDEHHQDLTLLKALVRQQLPEKYKEIFFDQSKNGYAGYIDGGASQEEFYKFIKPILEKMDGTEELLVKLNREDLLRKQRTFDNGSIPHQIHLGELHAILRRQEDFYPFLKDNREKIEKILTFRIPYYVGPLARGNSRFAWMTRKSEETITPWNFEEVVDKGASAQSFIERMTNFDKNLPNEKVLPKHSLLYEYFTVYNELTKVKYVTEGMRKPAFLSGEQKKAIVDLLFKTNRKVTVKQLKEDYFKKIECFDSVEISGVEDRFNASLGTYHDLLKIIKDKDFLDNEENEDILEDIVLTLTLFEDREMIEERLKTYAHLFDDKVMKQLKRRRYTGWGRLSRKLINGIRDKQSGKTILDFLKSDGFANRNFMQLIHDDSLTFKEDIQKAQVSGQGDSLHEHIANLAGSPAIKKGILQTVKVVDELVKVMGRHKPENIVIEMARENQTTQKGQKNSRERMKRIEEGIKELGSQILKEHPVENTQLQNEKLYLYYLQNGRDMYVDQELDINRLSDYDVDHIVPQSFLKDDSIDNKVLTRSDKARGKSDNVPSEEVVKKMKNYWRQLLNAKLITQRKFDNLTKAERGGLSELDKAGFIKRQLVETRQITKHVAQILDSRMNTKYDENDKLIREVKVITLKSKLVSDFRKDFQFYKVREINNYHHAHDAYLNAVVGTALIKKYPKLESEFVYGDYKVYDVRKMIAKSEQEIGKATAKYFFYSNIMNFFKTEITLANGEIRKRPLIETNGETGEIVWDKGRDFATVRKVLSMPQVNIVKKTEVQTGGFSKESILPKRNSDKLIARKKDWDPKKYGGFDSPTVAYSVLVVAKVEKGKSKKLKSVKELLGITIMERSSFEKNPIDFLEAKGYKEVKKDLIIKLPKYSLFELENGRKRMLASAGELQKGNELALPSKYVNFLYLASHYEKLKGSPEDNEQKQLFVEQHKHYLDEIIEQISEFSKRVILADANLDKVLSAYNKHRDKPIREQAENIIHLFTLTNLGAPAAFKYFDTTIDRKRYTSTKEVLDATLIHQSITGLYETRIDLSQLGGDGGPAPGGGGGSGGVPWILKKPLELTIKLDLEEQQGTLLNNSILSKKGKEELKQLFEKYSALWQSWENQVGHRRIRPHKIATGTVKPTPQKQYHINPKAKPDIQIVINDLLKQGVLIQKESTMNTPVYPVPKPNGRWRMVLDYRAVNKVTPLIAVQNQHSYGILGSLFKGRYKTTIDLSNGFWAHPIVPEDYWITAFTWQGKQYCWTVLPQGFLNSPGLFTGDVVDLLQGIPNVEVYVDDVYISHDSEKEHLEYLDILFNRLKEAGYIISLKKSNIANSIVDFLGFQITNEGRGLTDTFKEKLENITAPTTLKQLQSILGLLNFARNFIPDFTELIAPLYALIPKSTKNYVPWQIEHSTTLETLITKLNGAEYLQGRKGDKTLIMKVNASYTTGYIRYYNEGEKKPISYVSIVFSKTELKFTELEKLLTTVHKGLLKALDLSMGQNIHVYSPIVSMQNIQKTPQTAKKALASRWLSWLSYLEDPRIRFFYDPQMPALKDLPAVDTGKDNKKHPSNFQHIFYTDGSAITSPTKEGHLNAGMGIVYFINKDGNLQKQQEWSISLGNHTAQFAEIAAFEFALKKCLPLGGNILVVTDSNYVAKAYNEELDVWASNGFVNNRKKPLKHISKWKSVADLKRLRPDVVVTHEPGHQKLDSSPHAYGNNLADQLATQASFKVHAGKRTADGSEFEKRTADGSEFESPKKKAKVE

SEQ ID NO: 7029 - protein, 2093 aa, synthetic construct
MPAAKRVKLDGGDKKYSIGLDIGTNSVGWAVITDEYKVPSKKFKVLGNTDRHSIKKNLIGALLFDSGETAEATRLKRTARRRYTRRKNRICYLQEIFSNEMAKVDDSFFHRLEESFLVEEDKKHERHPIFGNIVDEVAYHEKYPTIYHLRKKLVDSTDKADLRLIYLALAHMIKFRGHFLIEGDLNPDNSDVDKLFIQLVQTYNQLFEENPINASGVDAKAILSARLSKSRRLENLIAQLPGEKKNGLFGNLIALSLGLTPNFKSNFDLAEDAKLQLSKDTYDDDLDNLLAQIGDQYADLFLAAKNLSDAILLSDILRVNTEITKAPLSASMIKRYDEHHQDLTLLKALVRQQLPEKYKEIFFDQSKNGYAGYIDGGASQEEFYKFIKPILEKMDGTEELLVKLNREDLLRKQRTFDNGSIPHQIHLGELHAILRRQEDFYPFLKDNREKIEKILTFRIPYYVGPLARGNSRFAWMTRKSEETITPWNFEEVVDKGASAQSFIERMTNFDKNLPNEKVLPKHSLLYEYFTVYNELTKVKYVTEGMRKPAFLSGEQKKAIVDLLFKTNRKVTVKQLKEDYFKKIECFDSVEISGVEDRFNASLGTYHDLLKIIKDKDFLDNEENEDILEDIVLTLTLFEDREMIEERLKTYAHLFDDKVMKQLKRRRYTGWGRLSRKLINGIRDKQSGKTILDFLKSDGFANRNFMQLIHDDSLTFKEDIQKAQVSGQGDSLHEHIANLAGSPAIKKGILQTVKVVDELVKVMGRHKPENIVIEMARENQTTQKGQKNSRERMKRIEEGIKELGSQILKEHPVENTQLQNEKLYLYYLQNGRDMYVDQELDINRLSDYDVDHIVPQSFLKDDSIDNKVLTRSDKARGKSDNVPSEEVVKKMKNYWRQLLNAKLITQRKFDNLTKAERGGLSELDKAGFIKRQLVETRQITKHVAQILDSRMNTKYDENDKLIREVKVITLKSKLVSDFRKDFQFYKVREINNYHHAHDAYLNAVVGTALIKKYPKLESEFVYGDYKVYDVRKMIAKSEQEIGKATAKYFFYSNIMNFFKTEITLANGEIRKRPLIETNGETGEIVWDKGRDFATVRKVLSMPQVNIVKKTEVQTGGFSKESILPKRNSDKLIARKKDWDPKKYGGFDSPTVAYSVLVVAKVEKGKSKKLKSVKELLGITIMERSSFEKNPIDFLEAKGYKEVKKDLIIKLPKYSLFELENGRKRMLASAGELQKGNELALPSKYVNFLYLASHYEKLKGSPEDNEQKQLFVEQHKHYLDEIIEQISEFSKRVILADANLDKVLSAYNKHRDKPIREQAENIIHLFTLTNLGAPAAFKYFDTTIDRKRYTSTKEVLDATLIHQSITGLYETRIDLSQLGGDGGPAPGGGGGSGGTLQLEEEYRLFEPESTQKQEMDIWLKNFPQAWAETGGMGTAHCQAPVLIQLKATATPISIRQYPMPHEAYQGIKPHIRRMLDQGILKPCQSPWNTPLLPVKKPGTEDYRPVQDLREVNKRVEDIHPTVPNPYNLLSTLPPSHPWYTVLDLKDAFFCLRLHSESQLLFAFEWRDPEIGLSGQLTWTRLPQGFKNSPTLFNEALHSDLADFRVRYPALVLLQYVDDLLLAAATRTECLEGTKALLETLGNKGYRASAKKAQICLQEVTYLGYSLKDGQRWLTKARKEAILSIPVPKNSRQVREFLGTAGYCRLWIPGFAELAAPLYPLTRPGTLFQWGTEQQLAFEDIKKALLSSPALGLPDITKPFELFIDENSGFAKGVLVQKLGPWKRPVAYLSKKLDTVASGWPPCLRMVAAIAILVKDAGKLTLGQPLTILTSHPVEALVRQPPNKWLSNARMTHYQAMLLDAERVHFGPTVSLNPATLLPLPSGGNHHDCLQILAETHGTRPDLTDQPLPDADLTWYTDGSSFIRNGEREAGAAVTTESEVIWAAPLPPGTSAQRAELIALTQALKMAEGKKLTVYTDSRYAFATTHVHGEIYRRRGWLTSEGKEIKNKNEILALLEALFLPKRLSIIHCPGHQKGDSPQAKGNRLADDTAKKAATETHSSLTVLPAGKRTADGSEFEKRTADGSEFESPKKKAKVE

SEQ ID NO: 7030 - protein, 2125 aa, synthetic construct
MPAAKRVKLDGGDKKYSIGLDIGTNSVGWAVITDEYKVPSKKFKVLGNTDRHSIKKNLIGALLFDSGETAEATRLKRTARRRYTRRKNRICYLQEIFSNEMAKVDDSFFHRLEESFLVEEDKKHERHPIFGNIVDEVAYHEKYPTIYHLRKKLVDSTDKADLRLIYLALAHMIKFRGHFLIEGDLNPDNSDVDKLFIQLVQTYNQLFEENPINASGVDAKAILSARLSKSRRLENLIAQLPGEKKNGLFGNLIALSLGLTPNFKSNFDLAEDAKLQLSKDTYDDDLDNLLAQIGDQYADLFLAAKNLSDAILLSDILRVNTEITKAPLSASMIKRYDEHHQDLTLLKALVRQQLPEKYKEIFFDQSKNGYAGYIDGGASQEEFYKFIKPILEKMDGTEELLVKLNREDLLRKQRTFDNGSIPHQIHLGELHAILRRQEDFYPFLKDNREKIEKILTFRIPYYVGPLARGNSRFAWMTRKSEETITPWNFEEVVDKGASAQSFIERMTNFDKNLPNEKVLPKHSLLYEYFTVYNELTKVKYVTEGMRKPAFLSGEQKKAIVDLLFKTNRKVTVKQLKEDYFKKIECFDSVEISGVEDRFNASLGTYHDLLKIIKDKDFLDNEENEDILEDIVLTLTLFEDREMIEERLKTYAHLFDDKVMKQLKRRRYTGWGRLSRKLINGIRDKQSGKTILDFLKSDGFANRNFMQLIHDDSLTFKEDIQKAQVSGQGDSLHEHIANLAGSPAIKKGILQTVKVVDELVKVMGRHKPENIVIEMARENQTTQKGQKNSRERMKRIEEGIKELGSQILKEHPVENTQLQNEKLYLYYLQNGRDMYVDQELDINRLSDYDVDHIVPQSFLKDDSIDNKVLTRSDKARGKSDNVPSEEVVKKMKNYWRQLLNAKLITQRKFDNLTKAERGGLSELDKAGFIKRQLVETRQITKHVAQILDSRMNTKYDENDKLIREVKVITLKSKLVSDFRKDFQFYKVREINNYHHAHDAYLNAVVGTALIKKYPKLESEFVYGDYKVYDVRKMIAKSEQEIGKATAKYFFYSNIMNFFKTEITLANGEIRKRPLIETNGETGEIVWDKGRDFATVRKVLSMPQVNIVKKTEVQTGGFSKESILPKRNSDKLIARKKDWDPKKYGGFDSPTVAYSVLVVAKVEKGKSKKLKSVKELLGITIMERSSFEKNPIDFLEAKGYKEVKKDLIIKLPKYSLFELENGRKRMLASAGELQKGNELALPSKYVNFLYLASHYEKLKGSPEDNEQKQLFVEQHKHYLDEIIEQISEFSKRVILADANLDKVLSAYNKHRDKPIREQAENIIHLFTLTNLGAPAAFKYFDTTIDRKRYTSTKEVLDATLIHQSITGLYETRIDLSQLGGDGGPAPGGGGGSGGLLGRDLLTKLKAQIQFSTEGPQVTWEDRPAMCLVLNLEEEYRLHEKPVPPSIDPSWLQLFPMVWAEKAGMGLANQVPPVVVELKSDASPVAVRQYPMSKEAREGIRPHIQRFLDLGILVPCQSPWNTPLLPVKKPGTNDYRPVQDLREVNKRVQDIHPTVPNPYNLLSSLPPSHTWYSVLDLKDAFFCLKLHPNSQPLFAFEWRDPEKGNTGQLTWTRLPQGFKNSPTLFNEALHRDLASFRALNPQVVMLQYVDDLLVAAPTYRDCKEGTRRLLQELSKLGYRVSAKKAQLCREEVTYLGYLLKGGKRWLTPARKATVMKIPTPTTPRQVREFLGTAGFCRLWIPGFASLAAPLYPLTRPKVPFTWTEAHQEAFGRIKEALLSAPALALPDLTKPFALYVDEKEGVARGVLTQTLGPWRRPVAYLSKKLDPVASGWPTCLKAIAAVALLLKDADKLTLGQNVLVIAPHNLESIVRQPPDRWMTNARMTHYQSLLLNERVSFAPPAILNPATLLPVESDDTPIHICSEILAEETGTRPDLRDQPLPGVPAWYTDGSSFIMDGRRQAGAAIVDNKRTVWASNLPEGTSAQKAELIALTQALRLAEGKSINIYTDSRYAFATAHVHGAIYKQRGWLTSAGKDIKNKEEILALLEAIHLPKRVAIIHCPGHQRGTDPVATGNRKADEAAKQAAQSTRILTETTKNAGKRTADGSEFEKRTADGSEFESPKKKAKVE

SEQ ID NO: 7031 - protein, 2125 aa, synthetic construct
MPAAKRVKLDGGDKKYSIGLDIGTNSVGWAVITDEYKVPSKKFKVLGNTDRHSIKKNLIGALLFDSGETAEATRLKRTARRRYTRRKNRICYLQEIFSNEMAKVDDSFFHRLEESFLVEEDKKHERHPIFGNIVDEVAYHEKYPTIYHLRKKLVDSTDKADLRLIYLALAHMIKFRGHFLIEGDLNPDNSDVDKLFIQLVQTYNQLFEENPINASGVDAKAILSARLSKSRRLENLIAQLPGEKKNGLFGNLIALSLGLTPNFKSNFDLAEDAKLQLSKDTYDDDLDNLLAQIGDQYADLFLAAKNLSDAILLSDILRVNTEITKAPLSASMIKRYDEHHQDLTLLKALVRQQLPEKYKEIFFDQSKNGYAGYIDGGASQEEFYKFIKPILEKMDGTEELLVKLNREDLLRKQRTFDNGSIPHQIHLGELHAILRRQEDFYPFLKDNREKIEKILTFRIPYYVGPLARGNSRFAWMTRKSEETITPWNFEEVVDKGASAQSFIERMTNFDKNLPNEKVLPKHSLLYEYFTVYNELTKVKYVTEGMRKPAFLSGEQKKAIVDLLFKTNRKVTVKQLKEDYFKKIECFDSVEISGVEDRFNASLGTYHDLLKIIKDKDFLDNEENEDILEDIVLTLTLFEDREMIEERLKTYAHLFDDKVMKQLKRRRYTGWGRLSRKLINGIRDKQSGKTILDFLKSDGFANRNFMQLIHDDSLTFKEDIQKAQVSGQGDSLHEHIANLAGSPAIKKGILQTVKVVDELVKVMGRHKPENIVIEMARENQTTQKGQKNSRERMKRIEEGIKELGSQILKEHPVENTQLQNEKLYLYYLQNGRDMYVDQELDINRLSDYDVDHIVPQSFLKDDSIDNKVLTRSDKARGKSDNVPSEEVVKKMKNYWRQLLNAKLITQRKFDNLTKAERGGLSELDKAGFIKRQLVETRQITKHVAQILDSRMNTKYDENDKLIREVKVITLKSKLVSDFRKDFQFYKVREINNYHHAHDAYLNAVVGTALIKKYPKLESEFVYGDYKVYDVRKMIAKSEQEIGKATAKYFFYSNIMNFFKTEITLANGEIRKRPLIETNGETGEIVWDKGRDFATVRKVLSMPQVNIVKKTEVQTGGFSKESILPKRNSDKLIARKKDWDPKKYGGFDSPTVAYSVLVVAKVEKGKSKKLKSVKELLGITIMERSSFEKNPIDFLEAKGYKEVKKDLIIKLPKYSLFELENGRKRMLASAGELQKGNELALPSKYVNFLYLASHYEKLKGSPEDNEQKQLFVEQHKHYLDEIIEQISEFSKRVILADANLDKVLSAYNKHRDKPIREQAENIIHLFTLTNLGAPAAFKYFDTTIDRKRYTSTKEVLDATLIHQSITGLYETRIDLSQLGGDGGPAPGGGGGSGGLLGRDLLTKLKAQIQFSTEGPQVTWEDRPAMCLVLNLEEEYRLHEKPVPPSIDPSWLQLFPMVWAEKAGMGLANQVPPVVVELKSDASPVAVRQYPMSKEAREGIRPHIQRFLDLGILVPCQSPWNTPLLPVKKPGTNDYRPVQDLREVNKRVQDIHPTVPNPYNLLSSLPPSHTWYSVLDLKDAFFCLKLHPNSQPLFAFEWRDPEKGNTGQLTWTRLPQGFKNSPTLFNEALHRDLASFRALNPQVVMLQYVDDLLVAAPTYRDCKEGTRRLLQELSKLGYRVSAKKAQLCREEVTYLGYLLKGGKRWLTPARKATVMKIPTPTTPRQVREFLGKAGFCRLFIPGFASLAAPLYPLTRPKVPFTWTEAHQEAFGRIKEALLSAPALALPDLTKPFALYVDEKEGVARGVLTQTLGPWRRPVAYLSKKLDPVASGWPTCLKAIAAVALLLKDADKLTLGQNVLVIAPHNLESIVRQPPDRWMTNARMTHYQSLLLNERVSFAPPAILNPATLLPVESDDTPIHICSEILAEETGTRPDLRDQPLPGVPAWYTDGSSFIMDGRRQAGAAIVDNKRTVWASNLPEGTSAQKAELIALTQALRLAEGKSINIYTDSRYAFATAHVHGAIYKQRGWLTSAGKDIKNKEEILALLEAIHLPKRVAIIHCPGHQRGTDPVATGNRKADEAAKQAAQSTRILTETTKNAGKRTADGSEFEKRTADGSEFESPKKKAKVE

SEQ ID NO: 7032 - protein, 2094 aa, synthetic construct
MPAAKRVKLDGGDKKYSIGLDIGTNSVGWAVITDEYKVPSKKFKVLGNTDRHSIKKNLIGALLFDSGETAEATRLKRTARRRYTRRKNRICYLQEIFSNEMAKVDDSFFHRLEESFLVEEDKKHERHPIFGNIVDEVAYHEKYPTIYHLRKKLVDSTDKADLRLIYLALAHMIKFRGHFLIEGDLNPDNSDVDKLFIQLVQTYNQLFEENPINASGVDAKAILSARLSKSRRLENLIAQLPGEKKNGLFGNLIALSLGLTPNFKSNFDLAEDAKLQLSKDTYDDDLDNLLAQIGDQYADLFLAAKNLSDAILLSDILRVNTEITKAPLSASMIKRYDEHHQDLTLLKALVRQQLPEKYKEIFFDQSKNGYAGYIDGGASQEEFYKFIKPILEKMDGTEELLVKLNREDLLRKQRTFDNGSIPHQIHLGELHAILRRQEDFYPFLKDNREKIEKILTFRIPYYVGPLARGNSRFAWMTRKSEETITPWNFEEVVDKGASAQSFIERMTNFDKNLPNEKVLPKHSLLYEYFTVYNELTKVKYVTEGMRKPAFLSGEQKKAIVDLLFKTNRKVTVKQLKEDYFKKIECFDSVEISGVEDRFNASLGTYHDLLKIIKDKDFLDNEENEDILEDIVLTLTLFEDREMIEERLKTYAHLFDDKVMKQLKRRRYTGWGRLSRKLINGIRDKQSGKTILDFLKSDGFANRNFMQLIHDDSLTFKEDIQKAQVSGQGDSLHEHIANLAGSPAIKKGILQTVKVVDELVKVMGRHKPENIVIEMARENQTTQKGQKNSRERMKRIEEGIKELGSQILKEHPVENTQLQNEKLYLYYLQNGRDMYVDQELDINRLSDYDVDHIVPQSFLKDDSIDNKVLTRSDKARGKSDNVPSEEVVKKMKNYWRQLLNAKLITQRKFDNLTKAERGGLSELDKAGFIKRQLVETRQITKHVAQILDSRMNTKYDENDKLIREVKVITLKSKLVSDFRKDFQFYKVREINNYHHAHDAYLNAVVGTALIKKYPKLESEFVYGDYKVYDVRKMIAKSEQEIGKATAKYFFYSNIMNFFKTEITLANGEIRKRPLIETNGETGEIVWDKGRDFATVRKVLSMPQVNIVKKTEVQTGGFSKESILPKRNSDKLIARKKDWDPKKYGGFDSPTVAYSVLVVAKVEKGKSKKLKSVKELLGITIMERSSFEKNPIDFLEAKGYKEVKKDLIIKLPKYSLFELENGRKRMLASAGELQKGNELALPSKYVNFLYLASHYEKLKGSPEDNEQKQLFVEQHKHYLDEIIEQISEFSKRVILADANLDKVLSAYNKHRDKPIREQAENIIHLFTLTNLGAPAAFKYFDTTIDRKRYTSTKEVLDATLIHQSITGLYETRIDLSQLGGDGGPAPGGGGGSGGTLNLEDEYRLYETSAEPEVSPGSTWLSDFPQAWAETGGMGLAVRQAPLIIPLKATSTPVSIKQYPMSQEAKLGIKPHIQRLLDQGILVPCQSPWNTPLLPVKKPGTNDYRPVQDLREVNKRVEDIHPTVPNPYNLLSGLPPSHRWYTVLDLKDAFFCLRLHPTSQPLFAFEWRDPGMGISGQLTWTRLPQGFKNSPTLFNEALHRDLADFRIQHPDLILLQYVDDILLAATSELDCQQGTRALLLTLGNLGYRASAKKAQLCQKQVKYLGYLLKEGQRWLTEARKETVMGQPTPKTPRQLREFLGKAGFCRLFIPGFAEMAAPLYPLTKPGTLFNWGPDQQKAYQEIKQALLTAPALGLPDLTKPFELFVDEKQGYAKGVLTQKLGPWRRPVAYLSKKLDPVAAGWPPCLRMVAAIAVLRKDAGKLTMGQPLVILAPHAVEALVKQPPDRWLSNARMTHYQAMLLDTDRVQFGPVVALNPATLLPLPEEGAPHDCLEILAETHGTRPDLTDQPIPDADHTWYTDGSSFLQEGQRKAGAAVTTETEVIWARALPAGTSAQRAELIALTQALKMAEGKRLNVYTDSRYAFATAHIHGEIYRRRGWLTSEGREIKNKSEILALLKALFLPKRLSIIHCLGHQKGDSAEARGNRLADQAAREAAIKTPPDTSTLLAGKRTADGSEFEKRTADGSEFESPKKKAKVE

SEQ ID NO: 7033 - protein, 2094 aa, synthetic construct
MPAAKRVKLDGGDKKYSIGLDIGTNSVGWAVITDEYKVPSKKFKVLGNTDRHSIKKNLIGALLFDSGETAEATRLKRTARRRYTRRKNRICYLQEIFSNEMAKVDDSFFHRLEESFLVEEDKKHERHPIFGNIVDEVAYHEKYPTIYHLRKKLVDSTDKADLRLIYLALAHMIKFRGHFLIEGDLNPDNSDVDKLFIQLVQTYNQLFEENPINASGVDAKAILSARLSKSRRLENLIAQLPGEKKNGLFGNLIALSLGLTPNFKSNFDLAEDAKLQLSKDTYDDDLDNLLAQIGDQYADLFLAAKNLSDAILLSDILRVNTEITKAPLSASMIKRYDEHHQDLTLLKALVRQQLPEKYKEIFFDQSKNGYAGYIDGGASQEEFYKFIKPILEKMDGTEELLVKLNREDLLRKQRTFDNGSIPHQIHLGELHAILRRQEDFYPFLKDNREKIEKILTFRIPYYVGPLARGNSRFAWMTRKSEETITPWNFEEVVDKGASAQSFIERMTNFDKNLPNEKVLPKHSLLYEYFTVYNELTKVKYVTEGMRKPAFLSGEQKKAIVDLLFKTNRKVTVKQLKEDYFKKIECFDSVEISGVEDRFNASLGTYHDLLKIIKDKDFLDNEENEDILEDIVLTLTLFEDREMIEERLKTYAHLFDDKVMKQLKRRRYTGWGRLSRKLINGIRDKQSGKTILDFLKSDGFANRNFMQLIHDDSLTFKEDIQKAQVSGQGDSLHEHIANLAGSPAIKKGILQTVKVVDELVKVMGRHKPENIVIEMARENQTTQKGQKNSRERMKRIEEGIKELGSQILKEHPVENTQLQNEKLYLYYLQNGRDMYVDQELDINRLSDYDVDHIVPQSFLKDDSIDNKVLTRSDKARGKSDNVPSEEVVKKMKNYWRQLLNAKLITQRKFDNLTKAERGGLSELDKAGFIKRQLVETRQITKHVAQILDSRMNTKYDENDKLIREVKVITLKSKLVSDFRKDFQFYKVREINNYHHAHDAYLNAVVGTALIKKYPKLESEFVYGDYKVYDVRKMIAKSEQEIGKATAKYFFYSNIMNFFKTEITLANGEIRKRPLIETNGETGEIVWDKGRDFATVRKVLSMPQVNIVKKTEVQTGGFSKESILPKRNSDKLIARKKDWDPKKYGGFDSPTVAYSVLVVAKVEKGKSKKLKSVKELLGITIMERSSFEKNPIDFLEAKGYKEVKKDLIIKLPKYSLFELENGRKRMLASAGELQKGNELALPSKYVNFLYLASHYEKLKGSPEDNEQKQLFVEQHKHYLDEIIEQISEFSKRVILADANLDKVLSAYNKHRDKPIREQAENIIHLFTLTNLGAPAAFKYFDTTIDRKRYTSTKEVLDATLIHQSITGLYETRIDLSQLGGDGGPAPGGGGGSGGTLGIEDEYRLHETSTEPDVSLGSTWLSDFPQAWAETGGMGLAVRQAPLIIPLKATSTPVSIQQYPMSHEARLGIKPHIQRLLDQGILVPCQSPWNTPLLPVKKPGTNDYRPVQDLREVNKRVEDIHPTVPNPYNLLSGLPPSHQWYTVLDLKDAFFCLRLHPTSQPLFAFEWRDPGMGISGQLTWTRLPQGFKNSPTLFNEALHRDLADFRIQHPDLILLQYVDDILLAATSELDCQQGTRALLQTLGDLGYRASAKKAQICQKQVKYLGYLLREGQRWLTEARKETVMGQPVPKTPRQLREFLGTAGFCRLWIPGFAEMAAPLYPLTKPGTLFSWGPDQQKAYQEIKQALLTAPALGLPDLTKPFELFVDEKQGYAKGVLTQKLGPWRRPVAYLSKKLDPVAAGWPPCLRMVAAIAVLTKDAGKLTMGQPLVILAPHAVEALVKQPPDRWLSNARMTHYQAMLLDTDRVQFGPVVALNPATLLPLPEEGAPHDCLEILAETHGTRPDLTDQPIPDADHTWYTDGSSFLQEGQRKAGAAVTTETEVIWAGALPAGTSAQRAELIALTQALKMAEGKRLNVYTDSRYAFATAHIHGEIYRRRGWLTSEGREIKNKSEILALLKALFLPKRLSIIHCLGHQKGDSAEARGNRLADQAAREAAIKTPPDTSTLLAGKRTADGSEFEKRTADGSEFESPKKKAKVE

SEQ ID NO: 7034 - protein, 2094 aa, synthetic construct
MPAAKRVKLDGGDKKYSIGLDIGTNSVGWAVITDEYKVPSKKFKVLGNTDRHSIKKNLIGALLFDSGETAEATRLKRTARRRYTRRKNRICYLQEIFSNEMAKVDDSFFHRLEESFLVEEDKKHERHPIFGNIVDEVAYHEKYPTIYHLRKKLVDSTDKADLRLIYLALAHMIKFRGHFLIEGDLNPDNSDVDKLFIQLVQTYNQLFEENPINASGVDAKAILSARLSKSRRLENLIAQLPGEKKNGLFGNLIALSLGLTPNFKSNFDLAEDAKLQLSKDTYDDDLDNLLAQIGDQYADLFLAAKNLSDAILLSDILRVNTEITKAPLSASMIKRYDEHHQDLTLLKALVRQQLPEKYKEIFFDQSKNGYAGYIDGGASQEEFYKFIKPILEKMDGTEELLVKLNREDLLRKQRTFDNGSIPHQIHLGELHAILRRQEDFYPFLKDNREKIEKILTFRIPYYVGPLARGNSRFAWMTRKSEETITPWNFEEVVDKGASAQSFIERMTNFDKNLPNEKVLPKHSLLYEYFTVYNELTKVKYVTEGMRKPAFLSGEQKKAIVDLLFKTNRKVTVKQLKEDYFKKIECFDSVEISGVEDRFNASLGTYHDLLKIIKDKDFLDNEENEDILEDIVLTLTLFEDREMIEERLKTYAHLFDDKVMKQLKRRRYTGWGRLSRKLINGIRDKQSGKTILDFLKSDGFANRNFMQLIHDDSLTFKEDIQKAQVSGQGDSLHEHIANLAGSPAIKKGILQTVKVVDELVKVMGRHKPENIVIEMARENQTTQKGQKNSRERMKRIEEGIKELGSQILKEHPVENTQLQNEKLYLYYLQNGRDMYVDQELDINRLSDYDVDHIVPQSFLKDDSIDNKVLTRSDKARGKSDNVPSEEVVKKMKNYWRQLLNAKLITQRKFDNLTKAERGGLSELDKAGFIKRQLVETRQITKHVAQILDSRMNTKYDENDKLIREVKVITLKSKLVSDFRKDFQFYKVREINNYHHAHDAYLNAVVGTALIKKYPKLESEFVYGDYKVYDVRKMIAKSEQEIGKATAKYFFYSNIMNFFKTEITLANGEIRKRPLIETNGETGEIVWDKGRDFATVRKVLSMPQVNIVKKTEVQTGGFSKESILPKRNSDKLIARKKDWDPKKYGGFDSPTVAYSVLVVAKVEKGKSKKLKSVKELLGITIMERSSFEKNPIDFLEAKGYKEVKKDLIIKLPKYSLFELENGRKRMLASAGELQKGNELALPSKYVNFLYLASHYEKLKGSPEDNEQKQLFVEQHKHYLDEIIEQISEFSKRVILADANLDKVLSAYNKHRDKPIREQAENIIHLFTLTNLGAPAAFKYFDTTIDRKRYTSTKEVLDATLIHQSITGLYETRIDLSQLGGDGGPAPGGGGGSGGTLNIEDEYRLHETSKEPDVSLGSTWLSDFPQAWAETGGMGLAVRQAPLIIPLKATSTPVSIKQYPMSQEARLGIKPHIQRLLDQGILVPCQSPWNTPLLPVKKPGTNDYRPVQDLREVNKRVEDIHPTVPNPYNLLSGLPPSHQWYTVLDLKDAFFCLRLHPTSQPLFAFEWRDPEMGISGQLTWTRLPQGFKNSPTLFNEALHRDLAGFRIQHPDLILLQYVDDLLLAATSELDCQQGTRALLQTLGDLGYRASAKKAQICQKQVKYLGYLLKEGQRWLTEARKETVMGQPIPKTPRQLREFLGTAGFCRLWIPGFAEMAAPLYPLTKPGTLFNWGPDQQKAFQEIKQALLTAPALGLPDLTKPFELFVDEKQGYAKGVLTQKLGPWRRPVAYLSKKLDPVAAGWPPCLRMVAAIAVLTKDAGKLTMGQPLVILAPHAVEALVKQPPDRWLSNARMTHYQALLLDTDRVQFGPVVALNPATLLPLPEEGLQHDCLDILAEAHGTRSDLMDQPLPDADHTWYTDGSSFLQEGQRKAGAAVTTETEVIWARALPAGTSAQRAELIALTQALKMAEGKKLNVYTDSRYAFATAHIHGEIYRRRGWLTSEGKEIKNKDEILALLKALFLPKRLSIIHCPGHQKGNSAEARGNRMADQAAREVATRETPETSTLLAGKRTADGSEFEKRTADGSEFESPKKKAKVE

SEQ ID NO: 7035 - protein, 2094 aa, synthetic construct
MPAAKRVKLDGGDKKYSIGLDIGTNSVGWAVITDEYKVPSKKFKVLGNTDRHSIKKNLIGALLFDSGETAEATRLKRTARRRYTRRKNRICYLQEIFSNEMAKVDDSFFHRLEESFLVEEDKKHERHPIFGNIVDEVAYHEKYPTIYHLRKKLVDSTDKADLRLIYLALAHMIKFRGHFLIEGDLNPDNSDVDKLFIQLVQTYNQLFEENPINASGVDAKAILSARLSKSRRLENLIAQLPGEKKNGLFGNLIALSLGLTPNFKSNFDLAEDAKLQLSKDTYDDDLDNLLAQIGDQYADLFLAAKNLSDAILLSDILRVNTEITKAPLSASMIKRYDEHHQDLTLLKALVRQQLPEKYKEIFFDQSKNGYAGYIDGGASQEEFYKFIKPILEKMDGTEELLVKLNREDLLRKQRTFDNGSIPHQIHLGELHAILRRQEDFYPFLKDNREKIEKILTFRIPYYVGPLARGNSRFAWMTRKSEETITPWNFEEVVDKGASAQSFIERMTNFDKNLPNEKVLPKHSLLYEYFTVYNELTKVKYVTEGMRKPAFLSGEQKKAIVDLLFKTNRKVTVKQLKEDYFKKIECFDSVEISGVEDRFNASLGTYHDLLKIIKDKDFLDNEENEDILEDIVLTLTLFEDREMIEERLKTYAHLFDDKVMKQLKRRRYTGWGRLSRKLINGIRDKQSGKTILDFLKSDGFANRNFMQLIHDDSLTFKEDIQKAQVSGQGDSLHEHIANLAGSPAIKKGILQTVKVVDELVKVMGRHKPENIVIEMARENQTTQKGQKNSRERMKRIEEGIKELGSQILKEHPVENTQLQNEKLYLYYLQNGRDMYVDQELDINRLSDYDVDHIVPQSFLKDDSIDNKVLTRSDKARGKSDNVPSEEVVKKMKNYWRQLLNAKLITQRKFDNLTKAERGGLSELDKAGFIKRQLVETRQITKHVAQILDSRMNTKYDENDKLIREVKVITLKSKLVSDFRKDFQFYKVREINNYHHAHDAYLNAVVGTALIKKYPKLESEFVYGDYKVYDVRKMIAKSEQEIGKATAKYFFYSNIMNFFKTEITLANGEIRKRPLIETNGETGEIVWDKGRDFATVRKVLSMPQVNIVKKTEVQTGGFSKESILPKRNSDKLIARKKDWDPKKYGGFDSPTVAYSVLVVAKVEKGKSKKLKSVKELLGITIMERSSFEKNPIDFLEAKGYKEVKKDLIIKLPKYSLFELENGRKRMLASAGELQKGNELALPSKYVNFLYLASHYEKLKGSPEDNEQKQLFVEQHKHYLDEIIEQISEFSKRVILADANLDKVLSAYNKHRDKPIREQAENIIHLFTLTNLGAPAAFKYFDTTIDRKRYTSTKEVLDATLIHQSITGLYETRIDLSQLGGDGGPAPGGGGGSGGTLNIEDEYRLHETSKGPDVPLGSTWLSDFPQAWAETGGMGLAVRQAPLIIPLKATSTPVSIKQYPMSQEARLGIKPHIQRLLDQGILVPCQSPWNTPLLPVKKPGTNDYRPVQDLREVNKRVEDIHPTVPNPYNLLSGLPPSHQWYTVLDLKDAFFCLRLHPTSQSLFAFEWRDPEMGISGQLTWTRLPQGFKNSPTLFNEALHRDLADFRIQHPDLILLQYVDDLLLAATSELDCQQGTRALLQTLGDLGYRASAKKAQICQKQVKYLGYLLKEGQRWLTEARKETVMGQPTPKTPRQLREFLGKAGFCRLFIPGFAEMAAPLYPLTKPGTLFEWGPDQQKAYQEIKQALLTAPALGLPDLTKPFELFVDEKQGYAKGVLTQKLGPWRRPVAYLSKKLDPVAAGWPPCLRMVAAIAVLTKDAGKLTMGQPLVILAPHAVEALVKQPPDRWLSNARMTHYQALLLDTDRVQFGPIVALNPATLLPLPEEGLQHDCLDILAEAHGTRPDLTDQPLPDADHTWYTDGSSFLQEGQRKAGAAVTTETEVVWAKALPAGTSAQRAELIALTQALKMAEGKKLNVYTDSRYAFATAHIHGEIYRRRGWLTSEGKEIKNKDEILALLKALFLPKRLSIIHCPGHQKGNRAEARGNRMADQAAREVATRETPETSTLLAGKRTADGSEFEKRTADGSEFESPKKKAKVE

SEQ ID NO: 7036 - protein, 2094 aa, synthetic construct; identical to SEQ ID NO: 4521

SEQ ID NO: 7037 - protein, 2094 aa, synthetic construct
MPAAKRVKLDGGDKKYSIGLDIGTNSVGWAVITDEYKVPSKKFKVLGNTDRHSIKKNLIGALLFDSGETAEATRLKRTARRRYTRRKNRICYLQEIFSNEMAKVDDSFFHRLEESFLVEEDKKHERHPIFGNIVDEVAYHEKYPTIYHLRKKLVDSTDKADLRLIYLALAHMIKFRGHFLIEGDLNPDNSDVDKLFIQLVQTYNQLFEENPINASGVDAKAILSARLSKSRRLENLIAQLPGEKKNGLFGNLIALSLGLTPNFKSNFDLAEDAKLQLSKDTYDDDLDNLLAQIGDQYADLFLAAKNLSDAILLSDILRVNTEITKAPLSASMIKRYDEHHQDLTLLKALVRQQLPEKYKEIFFDQSKNGYAGYIDGGASQEEFYKFIKPILEKMDGTEELLVKLNREDLLRKQRTFDNGSIPHQIHLGELHAILRRQEDFYPFLKDNREKIEKILTFRIPYYVGPLARGNSRFAWMTRKSEETITPWNFEEVVDKGASAQSFIERMTNFDKNLPNEKVLPKHSLLYEYFTVYNELTKVKYVTEGMRKPAFLSGEQKKAIVDLLFKTNRKVTVKQLKEDYFKKIECFDSVEISGVEDRFNASLGTYHDLLKIIKDKDFLDNEENEDILEDIVLTLTLFEDREMIEERLKTYAHLFDDKVMKQLKRRRYTGWGRLSRKLINGIRDKQSGKTILDFLKSDGFANRNFMQLIHDDSLTFKEDIQKAQVSGQGDSLHEHIANLAGSPAIKKGILQTVKVVDELVKVMGRHKPENIVIEMARENQTTQKGQKNSRERMKRIEEGIKELGSQILKEHPVENTQLQNEKLYLYYLQNGRDMYVDQELDINRLSDYDVDHIVPQSFLKDDSIDNKVLTRSDKARGKSDNVPSEEVVKKMKNYWRQLLNAKLITQRKFDNLTKAERGGLSELDKAGFIKRQLVETRQITKHVAQILDSRMNTKYDENDKLIREVKVITLKSKLVSDFRKDFQFYKVREINNYHHAHDAYLNAVVGTALIKKYPKLESEFVYGDYKVYDVRKMIAKSEQEIGKATAKYFFYSNIMNFFKTEITLANGEIRKRPLIETNGETGEIVWDKGRDFATVRKVLSMPQVNIVKKTEVQTGGFSKESILPKRNSDKLIARKKDWDPKKYGGFDSPTVAYSVLVVAKVEKGKSKKLKSVKELLGITIMERSSFEKNPIDFLEAKGYKEVKKDLIIKLPKYSLFELENGRKRMLASAGELQKGNELALPSKYVNFLYLASHYEKLKGSPEDNEQKQLFVEQHKHYLDEIIEQISEFSKRVILADANLDKVLSAYNKHRDKPIREQAENIIHLFTLTNLGAPAAFKYFDTTIDRKRYTSTKEVLDATLIHQSITGLYETRIDLSQLGGDGGPAPGGGGGSGGTLNIEDEHRLHETSKEPDVSLGSTWLSDFPQAWAETGGMGLAVRQAPLIIPLKATSTPVSIKQYPMSQEARLGIKPHIQRLLDQGILVPCQSPWNTPLLPVKKPGTNDYRPVQDLREVNKRVEDIHPTVPNPYNLLSGLPPSHQWYTVLDLKDAFFCLRLHPTSQPLFAFEWRDPEMGISGQLTWTRLPQGFKNSPTLFDEALHRDLADFRIQHPDLILLQYVDDLLLAATSELDCQQGTRALLQTLGNLGYRASAKKAQICQKQVKYLGYLLKEGQRWLTEARKETVMGQPTPKTPRQLREFLGTAGFCRLWIPGFAEMAAPLYPLTKTGTLFNWGPDQQKAYQEIKQALLTAPALGLPDLTKPFELFVDEKQGYAKGVLTQKLGPWRRPVAYLSKKLDPVAAGWPPCLRMVAAIAVLTKDAGKLTMGQPLVILAPHAVEALVKQPPDRWLSNARMTHYQALLLDTDRVQFGPVVALNPATLLPLPEEGLQHNCLDILAEAHGTRPDLTDQPLPDADHTWYTDGSSLLQEGQRKAGAAVTTETEVIWAKALPAGTSAQRAELIALTQALKMAEGKKLNVYTDSRYAFATAHIHGEIYRRRGLLTSEGKEIKNKDEILALLKALFLPKRLSIIHCPGHQKGHSAEARGNRMADQAARKAAITETPDTSTLLAGKRTADGSEFEKRTADGSEFESPKKKAKVE

SEQ ID NO: 7038 - protein, 2094 aa, synthetic construct; identical to SEQ ID NO: 4521

SEQ ID NO: 7039 - protein, 2022 aa, synthetic construct
MPAAKRVKLDGGDKKYSIGLDIGTNSVGWAVITDEYKVPSKKFKVLGNTDRHSIKKNLIGALLFDSGETAEATRLKRTARRRYTRRKNRICYLQEIFSNEMAKVDDSFFHRLEESFLVEEDKKHERHPIFGNIVDEVAYHEKYPTIYHLRKKLVDSTDKADLRLIYLALAHMIKFRGHFLIEGDLNPDNSDVDKLFIQLVQTYNQLFEENPINASGVDAKAILSARLSKSRRLENLIAQLPGEKKNGLFGNLIALSLGLTPNFKSNFDLAEDAKLQLSKDTYDDDLDNLLAQIGDQYADLFLAAKNLSDAILLSDILRVNTEITKAPLSASMIKRYDEHHQDLTLLKALVRQQLPEKYKEIFFDQSKNGYAGYIDGGASQEEFYKFIKPILEKMDGTEELLVKLNREDLLRKQRTFDNGSIPHQIHLGELHAILRRQEDFYPFLKDNREKIEKILTFRIPYYVGPLARGNSRFAWMTRKSEETITPWNFEEVVDKGASAQSFIERMTNFDKNLPNEKVLPKHSLLYEYFTVYNELTKVKYVTEGMRKPAFLSGEQKKAIVDLLFKTNRKVTVKQLKEDYFKKIECFDSVEISGVEDRFNASLGTYHDLLKIIKDKDFLDNEENEDILEDIVLTLTLFEDREMIEERLKTYAHLFDDKVMKQLKRRRYTGWGRLSRKLINGIRDKQSGKTILDFLKSDGFANRNFMQLIHDDSLTFKEDIQKAQVSGQGDSLHEHIANLAGSPAIKKGILQTVKVVDELVKVMGRHKPENIVIEMARENQTTQKGQKNSRERMKRIEEGIKELGSQILKEHPVENTQLQNEKLYLYYLQNGRDMYVDQELDINRLSDYDVDHIVPQSFLKDDSIDNKVLTRSDKARGKSDNVPSEEVVKKMKNYWRQLLNAKLITQRKFDNLTKAERGGLSELDKAGFIKRQLVETRQITKHVAQILDSRMNTKYDENDKLIREVKVITLKSKLVSDFRKDFQFYKVREINNYHHAHDAYLNAVVGTALIKKYPKLESEFVYGDYKVYDVRKMIAKSEQEIGKATAKYFFYSNIMNFFKTEITLANGEIRKRPLIETNGETGEIVWDKGRDFATVRKVLSMPQVNIVKKTEVQTGGFSKESILPKRNSDKLIARKKDWDPKKYGGFDSPTVAYSVLVVAKVEKGKSKKLKSVKELLGITIMERSSFEKNPIDFLEAKGYKEVKKDLIIKLPKYSLFELENGRKRMLASAGELQKGNELALPSKYVNFLYLASHYEKLKGSPEDNEQKQLFVEQHKHYLDEIIEQISEFSKRVILADANLDKVLSAYNKHRDKPIREQAENIIHLFTLTNLGAPAAFKYFDTTIDRKRYTSTKEVLDATLIHQSITGLYETRIDLSQLGGDGGPAPGGGGGSGGGRDIMKDIKVRLMTDSPDDSQDLMIGAIESNLFADQISWKSDQPVWLNQWPLKQEKLQALQQLVTEQLQLGHLEESNSPWNTPVFVIKKKSGKWRLLQDLRAVNATMHDMGALQPGLPSPVAPPKGWEIIIIDLQDCFFNIKLHPEDCKRFAFSVPSPNFKRPYQRFQWKVLPQGMKNSPTLCQKFVDKAILTVRDKYQDSYIVHYMDDILLAHPSRSIVDEILTSMIQALNKHGLVVSTEKIQKYDNLKYLGTHIQGDSVSYQKLQIRTDKLRTLNDFQKLLGNINWIRPFLKLTTGELKPLFEILNPDSNPISTRKLTPEACKALQLMNERLSTARVKRLDLSQPWSLCILKTEYTPTACLWQDGVVEWIHLPHISPKVITPYDIFCTQLIIKGRHRSKELFSKDPDYIVVPYTKVQFDLLLQEKEDWPISLLGFLGEVHFHLPKDPLLTFTLQTAIIFPHMTSTTPLEKGIVIFTDGSANGRSVTYIQGREPIIKENTQNTAQQAEIVAVITAFEEVSQPFNLYTDSKYVTGLFPEIETATLSPRTKIYTELKHLQRLIHKRQEKFYIGHIRGHTGLPGPLAQGNAYADSLTRILTAGKRTADGSEFEKRTADGSEFESPKKKAKVE

SEQ ID NO: 7040 - protein, 2086 aa, synthetic construct
MPAAKRVKLDGGDKKYSIGLDIGTNSVGWAVITDEYKVPSKKFKVLGNTDRHSIKKNLIGALLFDSGETAEATRLKRTARRRYTRRKNRICYLQEIFSNEMAKVDDSFFHRLEESFLVEEDKKHERHPIFGNIVDEVAYHEKYPTIYHLRKKLVDSTDKADLRLIYLALAHMIKFRGHFLIEGDLNPDNSDVDKLFIQLVQTYNQLFEENPINASGVDAKAILSARLSKSRRLENLIAQLPGEKKNGLFGNLIALSLGLTPNFKSNFDLAEDAKLQLSKDTYDDDLDNLLAQIGDQYADLFLAAKNLSDAILLSDILRVNTEITKAPLSASMIKRYDEHHQDLTLLKALVRQQLPEKYKEIFFDQSKNGYAGYIDGGASQEEFYKFIKPILEKMDGTEELLVKLNREDLLRKQRTFDNGSIPHQIHLGELHAILRRQEDFYPFLKDNREKIEKILTFRIPYYVGPLARGNSRFAWMTRKSEETITPWNFEEVVDKGASAQSFIERMTNFDKNLPNEKVLPKHSLLYEYFTVYNELTKVKYVTEGMRKPAFLSGEQKKAIVDLLFKTNRKVTVKQLKEDYFKKIECFDSVEISGVEDRFNASLGTYHDLLKIIKDKDFLDNEENEDILEDIVLTLTLFEDREMIEERLKTYAHLFDDKVMKQLKRRRYTGWGRLSRKLINGIRDKQSGKTILDFLKSDGFANRNFMQLIHDDSLTFKEDIQKAQVSGQGDSLHEHIANLAGSPAIKKGILQTVKVVDELVKVMGRHKPENIVIEMARENQTTQKGQKNSRERMKRIEEGIKELGSQILKEHPVENTQLQNEKLYLYYLQNGRDMYVDQELDINRLSDYDVDHIVPQSFLKDDSIDNKVLTRSDKARGKSDNVPSEEVVKKMKNYWRQLLNAKLITQRKFDNLTKAERGGLSELDKAGFIKRQLVETRQITKHVAQILDSRMNTKYDENDKLIREVKVITLKSKLVSDFRKDFQFYKVREINNYHHAHDAYLNAVVGTALIKKYPKLESEFVYGDYKVYDVRKMIAKSEQEIGKATAKYFFYSNIMNFFKTEITLANGEIRKRPLIETNGETGEIVWDKGRDFATVRKVLSMPQVNIVKKTEVQTGGFSKESILPKRNSDKLIARKKDWDPKKYGGFDSPTVAYSVLVVAKVEKGKSKKLKSVKELLGITIMERSSFEKNPIDFLEAKGYKEVKKDLIIKLPKYSLFELENGRKRMLASAGELQKGNELALPSKYVNFLYLASHYEKLKGSPEDNEQKQLFVEQHKHYLDEIIEQISEFSKRVILADANLDKVLSAYNKHRDKPIREQAENIIHLFTLTNLGAPAAFKYFDTTIDRKRYTSTKEVLDATLIHQSITGLYETRIDLSQLGGDGGPAPGGGGGSGGLDDEYRLYSPLVKPDQNIQFWLEQFPQAWAETAGMGLAKQVPPQVIQLKASATPVSVRQYPLSKEAQEGIRPHVQRLIQQGILVPVQSPWNTPLLPVRKPGTNDYRPVQDLREVNKRVQDIHPTVPNPYNLLCALPPQRSWYTVLDLKDAFFCLRLHPTSQPLFAFEWRDPGTGRTGQLTWTRLPQGFKNSPTIFNEALHRDLANFRIQHPQVTLLQYVDDLLLAGATKQDCLEGTKALLLELSDLGYRASAKKAQICRREVTYLGYSLRDGQRWLTEARKKTVVQIPAPTTAKQVREFLGKAGFCRLFIPGFATLAAPLYPLTKPKGEFSWAPEHQKAFDAIKKALLSAPALALPDVTKPFTLYVDERKGVARGVLTQTLGPWRRPVAYLSKKLDPVASGWPVCLKAIAAVAILVKDADKLTLGQNITVIAPHALENIVRQPPDRWMTNARMTHYQSLLLTERVTFAPPAALNPATLLPEETDEPVTHDCHQLLIEETGVRKDLTDIPLTGEVLTWFTDGSSYVVEGKRMAGAAVVDGTRTIWASSLPEGTSAQKAELMALTQALRLAEGKSINIYTDSRYAFATAHVHGAIYKQRGWLTSAGREIKNKEEILSLLEALHLPKRLAIIHCPGHQKAKDPISRGNQMADRVAKQAAQGVNLLPAGKRTADGSEFEKRTADGSEFESPKKKAKVE

SEQ ID NO: 7041 - protein, 2174 aa, synthetic construct
MPAAKRVKLDGGDKKYSIGLDIGTNSVGWAVITDEYKVPSKKFKVLGNTDRHSIKKNLIGALLFDSGETAEATRLKRTARRRYTRRKNRICYLQEIFSNEMAKVDDSFFHRLEESFLVEEDKKHERHPIFGNIVDEVAYHEKYPTIYHLRKKLVDSTDKADLRLIYLALAHMIKFRGHFLIEGDLNPDNSDVDKLFIQLVQTYNQLFEENPINASGVDAKAILSARLSKSRRLENLIAQLPGEKKNGLFGNLIALSLGLTPNFKSNFDLAEDAKLQLSKDTYDDDLDNLLAQIGDQYADLFLAAKNLSDAILLSDILRVNTEITKAPLSASMIKRYDEHHQDLTLLKALVRQQLPEKYKEIFFDQSKNGYAGYIDGGASQEEFYKFIKPILEKMDGTEELLVKLNREDLLRKQRTFDNGSIPHQIHLGELHAILRRQEDFYPFLKDNREKIEKILTFRIPYYVGPLARGNSRFAWMTRKSEETITPWNFEEVVDKGASAQSFIERMTNFDKNLPNEKVLPKHSLLYEYFTVYNELTKVKYVTEGMRKPAFLSGEQKKAIVDLLFKTNRKVTVKQLKEDYFKKIECFDSVEISGVEDRFNASLGTYHDLLKIIKDKDFLDNEENEDILEDIVLTLTLFEDREMIEERLKTYAHLFDDKVMKQLKRRRYTGWGRLSRKLINGIRDKQSGKTILDFLKSDGFANRNFMQLIHDDSLTFKEDIQKAQVSGQGDSLHEHIANLAGSPAIKKGILQTVKVVDELVKVMGRHKPENIVIEMARENQTTQKGQKNSRERMKRIEEGIKELGSQILKEHPVENTQLQNEKLYLYYLQNGRDMYVDQELDINRLSDYDVDHIVPQSFLKDDSIDNKVLTRSDKARGKSDNVPSEEVVKKMKNYWRQLLNAKLITQRKFDNLTKAERGGLSELDKAGFIKRQLVETRQITKHVAQILDSRMNTKYDENDKLIREVKVITLKSKLVSDFRKDFQFYKVREINNYHHAHDAYLNAVVGTALIKKYPKLESEFVYGDYKVYDVRKMIAKSEQEIGKATAKYFFYSNIMNFFKTEITLANGEIRKRPLIETNGETGEIVWDKGRDFATVRKVLSMPQVNIVKKTEVQTGGFSKESILPKRNSDKLIARKKDWDPKKYGGFDSPTVAYSVLVVAKVEKGKSKKLKSVKELLGITIMERSSFEKNPIDFLEAKGYKEVKKDLIIKLPKYSLFELENGRKRMLASAGELQKGNELALPSKYVNFLYLASHYEKLKGSPEDNEQKQLFVEQHKHYLDEIIEQISEFSKRVILADANLDKVLSAYNKHRDKPIREQAENIIHLFTLTNLGAPAAFKYFDTTIDRKRYTSTKEVLDATLIHQSITGLYETRIDLSQLGGDGGPAPGGGGGSGGMDPLQLLQPLEAEIKGTKLKAHWNSGATITCVPEAFLEDERPIQTMLIKTIHGEKQQDVYYLTFKVQGRKVEAEVLASPYDYILLNPSDVPWLMKKPLQLTVLVPLHEYQERLLQQTALPKEQKELLQKLFLKYDALWQHWENQVGHRRIKPHNIATGTLAPRPQKQYPINPKAKPSIQIVIDDLLKQGVLIQQNSTMNTPVYPVPKPDGKWRMVLDYREVNKTIPLIAAQNQHSAGILSSIYRGKYKTTLDLTNGFWAHPITPESYWLTAFTWQGKQYCWTRLPQGFLNSPALFTADVVDLLKEIPNVQAYVDDIYISHDDPQEHLEQLEKIFSILLNAGYVVSLKKSEIAQREVEFLGFNITKEGRGLTDTFKQKLLNITPPKDLKQLQSILGLLNFARNFIPNYSELVKPLYTIVANANGKFISWTEDNSNQLQHIISVLNQADNLEERNPETRLIIKVNSSPSAGYIRYYNEGSKRPIMYVNYIFSKAEAKFTQTEKLLTTMHKGLIKAMDLAMGQEILVYSPIVSMTKIQRTPLPERKALPVRWITWMTYLEDPRIQFHYDKSLPELQQIPNVTEDVIAKTKHPSEFAMVFYTDGSAIKHPDVNKSHSAGMGIAQVQFIPEYKIVHQWSIPLGDHTAQLAEIAAVEFACKKALKISGPVLIVTDSFYVAESANKELPYWKSNGFLNNKKKPLRHVSKWKSIAECLQLKPDIIIMHEKGHQQPMTTLHTEGNNLADKLATQGSYVVHAGKRTADGSEFEKRTADGSEFESPKKKAKVE

SEQ ID NO: 7042 - protein, 2092 aa, synthetic construct
MPAAKRVKLDGGDKKYSIGLDIGTNSVGWAVITDEYKVPSKKFKVLGNTDRHSIKKNLIGALLFDSGETAEATRLKRTARRRYTRRKNRICYLQEIFSNEMAKVDDSFFHRLEESFLVEEDKKHERHPIFGNIVDEVAYHEKYPTIYHLRKKLVDSTDKADLRLIYLALAHMIKFRGHFLIEGDLNPDNSDVDKLFIQLVQTYNQLFEENPINASGVDAKAILSARLSKSRRLENLIAQLPGEKKNGLFGNLIALSLGLTPNFKSNFDLAEDAKLQLSKDTYDDDLDNLLAQIGDQYADLFLAAKNLSDAILLSDILRVNTEITKAPLSASMIKRYDEHHQDLTLLKALVRQQLPEKYKEIFFDQSKNGYAGYIDGGASQEEFYKFIKPILEKMDGTEELLVKLNREDLLRKQRTFDNGSIPHQIHLGELHAILRRQEDFYPFLKDNREKIEKILTFRIPYYVGPLARGNSRFAWMTRKSEETITPWNFEEVVDKGASAQSFIERMTNFDKNLPNEKVLPKHSLLYEYFTVYNELTKVKYVTEGMRKPAFLSGEQKKAIVDLLFKTNRKVTVKQLKEDYFKKIECFDSVEISGVEDRFNASLGTYHDLLKIIKDKDFLDNEENEDILEDIVLTLTLFEDREMIEERLKTYAHLFDDKVMKQLKRRRYTGWGRLSRKLINGIRDKQSGKTILDFLKSDGFANRNFMQLIHDDSLTFKEDIQKAQVSGQGDSLHEHIANLAGSPAIKKGILQTVKVVDELVKVMGRHKPENIVIEMARENQTTQKGQKNSRERMKRIEEGIKELGSQILKEHPVENTQLQNEKLYLYYLQNGRDMYVDQELDINRLSDYDVDHIVPQSFLKDDSIDNKVLTRSDKARGKSDNVPSEEVVKKMKNYWRQLLNAKLITQRKFDNLTKAERGGLSELDKAGFIKRQLVETRQITKHVAQILDSRMNTKYDENDKLIREVKVITLKSKLVSDFRKDFQFYKVREINNYHHAHDAYLNAVVGTALIKKYPKLESEFVYGDYKVYDVRKMIAKSEQEIGKATAKYFFYSNIMNFFKTEITLANGEIRKRPLIETNGETGEIVWDKGRDFATVRKVLSMPQVNIVKKTEVQTGGFSKESILPKRNSDKLIARKKDWDPKKYGGFDSPTVAYSVLVVAKVEKGKSKKLKSVKELLGITIMERSSFEKNPIDFLEAKGYKEVKKDLIIKLPKYSLFELENGRKRMLASAGELQKGNELALPSKYVNFLYLASHYEKLKGSPEDNEQKQLFVEQHKHYLDEIIEQISEFSKRVILADANLDKVLSAYNKHRDKPIREQAENIIHLFTLTNLGAPAAFKYFDTTIDRKRYTSTKEVLDATLIHQSITGLYETRIDLSQLGGDGGPAPGGGGGSGGVLNLEEEYRLHEKPVPSSIDPSWLQLFPTVWAERAGMGLANQVPPVVVELRSGASPVAVRQYPMSKEAREGIRPHIQRFLDLGVLVPCQSPWNTPLLPVKKPGTNDYRPVQDLREINKRVQDIHPTVPNPYNLLSSLPPSHTWYSVLDLKDAFFCLKLHPNSQPLFAFEWRDPEKGNTGQLTWTRLPQGFKNSPTLFDEALHRDLAPFRALNPQVVLLQYVDDLLVAAPTYRDCKEGTQKLLQELSKLGYRVSAKKAQLCQKEVTYLGYLLKEGKRWLTPARKATVMKIPPPTTPRQVREFLGTAGFCRLWIPGFASLAAPLYPLTKESIPFIWTEEHQKAFDRIKEALLSAPALALPDLTKPFTLYVDERAGVARGVLTQTLGPWRRPVAYLSKKLDPVASGWPTCLKAVAAVALLLKDADKLTLGQNVTVIASHSLESIVRQPPDRWMTNARMTHYQSLLLNERVSFAPPAVLNPATLLPVESEATPVHRCSEILAEETGTRRDLKDQPLPGVPAWYTDGSSFIAEGKRRAGAAIVDGKRTVWASSLPEGTSAQKAELVALTQALRLAEGKDINIYTDSRYAFATAHIHGAIYKQRGLLTSAGKDIKNKEEILALLEAIHLPKRVAIIHCPGHQKGNDPVATGNRRADEAAKQAALSTRVLAETTKPAGKRTADGSEFEKRTADGSEFESPKKKAKVE

SEQ ID NO: 7043 - protein, 2092 aa, synthetic construct
MPAAKRVKLDGGDKKYSIGLDIGTNSVGWAVITDEYKVPSKKFKVLGNTDRHSIKKNLIGALLFDSGETAEATRLKRTARRRYTRRKNRICYLQEIFSNEMAKVDDSFFHRLEESFLVEEDKKHERHPIFGNIVDEVAYHEKYPTIYHLRKKLVDSTDKADLRLIYLALAHMIKFRGHFLIEGDLNPDNSDVDKLFIQLVQTYNQLFEENPINASGVDAKAILSARLSKSRRLENLIAQLPGEKKNGLFGNLIALSLGLTPNFKSNFDLAEDAKLQLSKDTYDDDLDNLLAQIGDQYADLFLAAKNLSDAILLSDILRVNTEITKAPLSASMIKRYDEHHQDLTLLKALVRQQLPEKYKEIFFDQSKNGYAGYIDGGASQEEFYKFIKPILEKMDGTEELLVKLNREDLLRKQRTFDNGSIPHQIHLGELHAILRRQEDFYPFLKDNREKIEKILTFRIPYYVGPLARGNSRFAWMTRKSEETITPWNFEEVVDKGASAQSFIERMTNFDKNLPNEKVLPKHSLLYEYFTVYNELTKVKYVTEGMRKPAFLSGEQKKAIVDLLFKTNRKVTVKQLKEDYFKKIECFDSVEISGVEDRFNASLGTYHDLLKIIKDKDFLDNEENEDILEDIVLTLTLFEDREMIEERLKTYAHLFDDKVMKQLKRRRYTGWGRLSRKLINGIRDKQSGKTILDFLKSDGFANRNFMQLIHDDSLTFKEDIQKAQVSGQGDSLHEHIANLAGSPAIKKGILQTVKVVDELVKVMGRHKPENIVIEMARENQTTQKGQKNSRERMKRIEEGIKELGSQILKEHPVENTQLQNEKLYLYYLQNGRDMYVDQELDINRLSDYDVDHIVPQSFLKDDSIDNKVLTRSDKARGKSDNVPSEEVVKKMKNYWRQLLNAKLITQRKFDNLTKAERGGLSELDKAGFIKRQLVETRQITKHVAQILDSRMNTKYDENDKLIREVKVITLKSKLVSDFRKDFQFYKVREINNYHHAHDAYLNAVVGTALIKKYPKLESEFVYGDYKVYDVRKMIAKSEQEIGKATAKYFFYSNIMNFFKTEITLANGEIRKRPLIETNGETGEIVWDKGRDFATVRKVLSMPQVNIVKKTEVQTGGFSKESILPKRNSDKLIARKKDWDPKKYGGFDSPTVAYSVLVVAKVEKGKSKKLKSVKELLGITIMERSSFEKNPIDFLEAKGYKEVKKDLIIKLPKYSLFELENGRKRMLASAGELQKGNELALPSKYVNFLYLASHYEKLKGSPEDNEQKQLFVEQHKHYLDEIIEQISEFSKRVILADANLDKVLSAYNKHRDKPIREQAENIIHLFTLTNLGAPAAFKYFDTTIDRKRYTSTKEVLDATLIHQSITGLYETRIDLSQLGGDGGPAPGGGGGSGGVLNLEEEYRLHEKPVPSSIDPSWLQLFPTVWAERAGMGLANQVPPVVVELRSGASPVAVRQYPMSKEAREGIRPHIQRFLDLGVLVPCQSPWNTPLLPVKKPGTNDYRPVQDLREINKRVQDIHPTVPNPYNLLSSLPPSHTWYSVLDLKDAFFCLKLHPNSQPLFAFEWRDPEKGNTGQLTWTRLPQGFKNSPTLFNEALHRDLAPFRALNPQVVLLQYVDDLLVAAPTYRDCKEGTQKLLQELSKLGYRVSAKKAQLCQKEVTYLGYLLKEGKRWLTPARKATVMKIPPPTTPRQVREFLGKAGFCRLFIPGFASLAAPLYPLTKPSIPFIWTEEHQKAFDRIKEALLSAPALALPDLTKPFTLYVDERAGVARGVLTQTLGPWRRPVAYLSKKLDPVASGWPTCLKAVAAVALLLKDADKLTLGQNVTVIASHSLESIVRQPPDRWMTNARMTHYQSLLLNERVSFAPPAVLNPATLLPVESEATPVHRCSEILAEETGTRRDLKDQPLPGVPAWYTDGSSFIAEGKRRAGAAIVDGKRTVWASSLPEGTSAQKAELVALTQALRLAEGKDINIYTDSRYAFATAHIHGAIYKQRGWLTSAGKDIKNKEEILALLEAIHLPKRVAIIHCPGHQKGNDPVATGNRRADEAAKQAALSTRVLAETTKPAGKRTADGSEFEKRTADGSEFESPKKKAKVE

SEQ ID NO: 7044 - protein, 2094 aa, synthetic construct
MPAAKRVKLDGGDKKYSIGLDIGTNSVGWAVITDEYKVPSKKFKVLGNTDRHSIKKNLIGALLFDSGETAEATRLKRTARRRYTRRKNRICYLQEIFSNEMAKVDDSFFHRLEESFLVEEDKKHERHPIFGNIVDEVAYHEKYPTIYHLRKKLVDSTDKADLRLIYLALAHMIKFRGHFLIEGDLNPDNSDVDKLFIQLVQTYNQLFEENPINASGVDAKAILSARLSKSRRLENLIAQLPGEKKNGLFGNLIALSLGLTPNFKSNFDLAEDAKLQLSKDTYDDDLDNLLAQIGDQYADLFLAAKNLSDAILLSDILRVNTEITKAPLSASMIKRYDEHHQDLTLLKALVRQQLPEKYKEIFFDQSKNGYAGYIDGGASQEEFYKFIKPILEKMDGTEELLVKLNREDLLRKQRTFDNGSIPHQIHLGELHAILRRQEDFYPFLKDNREKIEKILTFRIPYYVGPLARGNSRFAWMTRKSEETITPWNFEEVVDKGASAQSFIERMTNFDKNLPNEKVLPKHSLLYEYFTVYNELTKVKYVTEGMRKPAFLSGEQKKAIVDLLFKTNRKVTVKQLKEDYFKKIECFDSVEISGVEDRFNASLGTYHDLLKIIKDKDFLDNEENEDILEDIVLTLTLFEDREMIEERLKTYAHLFDDKVMKQLKRRRYTGWGRLSRKLINGIRDKQSGKTILDFLKSDGFANRNFMQLIHDDSLTFKEDIQKAQVSGQGDSLHEHIANLAGSPAIKKGILQTVKVVDELVKVMGRHKPENIVIEMARENQTTQKGQKNSRERMKRIEEGIKELGSQILKEHPVENTQLQNEKLYLYYLQNGRDMYVDQELDINRLSDYDVDHIVPQSFLKDDSIDNKVLTRSDKARGKSDNVPSEEVVKKMKNYWRQLLNAKLITQRKFDNLTKAERGGLSELDKAGFIKRQLVETRQITKHVAQILDSRMNTKYDENDKLIREVKVITLKSKLVSDFRKDFQFYKVREINNYHHAHDAYLNAVVGTALIKKYPKLESEFVYGDYKVYDVRKMIAKSEQEIGKATAKYFFYSNIMNFFKTEITLANGEIRKRPLIETNGETGEIVWDKGRDFATVRKVLSMPQVNIVKKTEVQTGGFSKESILPKRNSDKLIARKKDWDPKKYGGFDSPTVAYSVLVVAKVEKGKSKKLKSVKELLGITIMERSSFEKNPIDFLEAKGYKEVKKDLIIKLPKYSLFELENGRKRMLASAGELQKGNELALPSKYVNFLYLASHYEKLKGSPEDNEQKQLFVEQHKHYLDEIIEQISEFSKRVILADANLDKVLSAYNKHRDKPIREQAENIIHLFTLTNLGAPAAFKYFDTTIDRKRYTSTKEVLDATLIHQSITGLYETRIDLSQLGGDGGPAPGGGGGSGGTLNIEDEYRLHETSKEPDVPLGSTWLSDFPQAWAETGGMGLAVRQAPLIIPLKATSTPVSIKQYPMSQEARLGIKPHIQRLLDQGILVPCQSPWNTPLLPVKKPGTNDYRPVQDLREVNKRVEDIHPTVPNPYNLLSGLPPSHQWYTVLDLKDAFFCLRLHPTSQPLFAFEWRDPEMGISGQLTWTRLPQGFKNSPTLFNEALHRDLADFRIQHPDLILLQYVDDLLLAATSEQDCQRGTRALLQTLGNLGYRASAKKAQICQKQVKYLGYLLKEGQRWLTEARKETVMGQPTPKTPRQLREFLGTAGFCRLWIPGFAEMAAPLYPLTKPGTLFNWGPDQQKAYQEIKQALLTAPALGLPDLTKPFELFVDEKQGYAKGVLTQKLGPWRRPVAYLSKKLDPVAAGWPPCLRMVAAIAVLTKDAGKLTMGQPLVILAPHAVEALVKQPPDRWLSNARMTHYQAMLLDTDRVQFGPVVALNPATLLPLPEKEAPHDCLEILAETHGTRPDLTDQPIPDADYTWYTDGSSFLQEGQRRAGAAVTTETEVIWARALPAGTSAQRAELIALTQALKMAEGKKLNVYTDSRYAFATAHVHGEIYRRRGWLTSEGREIKNKNEILALLKALFLPKRLSIIHCPGHQKGNSAEARGNRMADQAAREAAMKAVLETSTLLAGKRTADGSEFEKRTADGSEFESPKKKAKVE

SEQ ID NO: 7045 - protein, 2098 aa, synthetic construct
MPAAKRVKLDGGDKKYSIGLDIGTNSVGWAVITDEYKVPSKKFKVLGNTDRHSIKKNLIGALLFDSGETAEATRLKRTARRRYTRRKNRICYLQEIFSNEMAKVDDSFFHRLEESFLVEEDKKHERHPIFGNIVDEVAYHEKYPTIYHLRKKLVDSTDKADLRLIYLALAHMIKFRGHFLIEGDLNPDNSDVDKLFIQLVQTYNQLFEENPINASGVDAKAILSARLSKSRRLENLIAQLPGEKKNGLFGNLIALSLGLTPNFKSNFDLAEDAKLQLSKDTYDDDLDNLLAQIGDQYADLFLAAKNLSDAILLSDILRVNTEITKAPLSASMIKRYDEHHQDLTLLKALVRQQLPEKYKEIFFDQSKNGYAGYIDGGASQEEFYKFIKPILEKMDGTEELLVKLNREDLLRKQRTFDNGSIPHQIHLGELHAILRRQEDFYPFLKDNREKIEKILTFRIPYYVGPLARGNSRFAWMTRKSEETITPWNFEEVVDKGASAQSFIERMTNFDKNLPNEKVLPKHSLLYEYFTVYNELTKVKYVTEGMRKPAFLSGEQKKAIVDLLFKTNRKVTVKQLKEDYFKKIECFDSVEISGVEDRFNASLGTYHDLLKIIKDKDFLDNEENEDILEDIVLTLTLFEDREMIEERLKTYAHLFDDKVMKQLKRRRYTGWGRLSRKLINGIRDKQSGKTILDFLKSDGFANRNFMQLIHDDSLTFKEDIQKAQVSGQGDSLHEHIANLAGSPAIKKGILQTVKVVDELVKVMGRHKPENIVIEMARENQTTQKGQKNSRERMKRIEEGIKELGSQILKEHPVENTQLQNEKLYLYYLQNGRDMYVDQELDINRLSDYDVDHIVPQSFLKDDSIDNKVLTRSDKARGKSDNVPSEEVVKKMKNYWRQLLNAKLITQRKFDNLTKAERGGLSELDKAGFIKRQLVETRQITKHVAQILDSRMNTKYDENDKLIREVKVITLKSKLVSDFRKDFQFYKVREINNYHHAHDAYLNAVVGTALIKKYPKLESEFVYGDYKVYDVRKMIAKSEQEIGKATAKYFFYSNIMNFFKTEITLANGEIRKRPLIETNGETGEIVWDKGRDFATVRKVLSMPQVNIVKKTEVQTGGFSKESILPKRNSDKLIARKKDWDPKKYGGFDSPTVAYSVLVVAKVEKGKSKKLKSVKELLGITIMERSSFEKNPIDFLEAKGYKEVKKDLIIKLPKYSLFELENGRKRMLASAGELQKGNELALPSKYVNFLYLASHYEKLKGSPEDNEQKQLFVEQHKHYLDEIIEQISEFSKRVILADANLDKVLSAYNKHRDKPIREQAENIIHLFTLTNLGAPAAFKYFDTTIDRKRYTSTKEVLDATLIHQSITGLYETRIDLSQLGGDGGGGSGSSEAAAKGGTAPLEEEYRLFLEAPIQNVTLLEQWKREIPKVWAEINPPGLASTQAPIHVQLLSTALPVRVRQYPITLEAKRSLRETIRKFRAAGILRPVHSPWNTPLLPVRKSGTSEYRMVQDLREVNKRVETIHPTVPNPYTLLSLLPPDRIWYSVLDLKDAFFCIPLAPESQLIFAFEWADAEEGESGQLTWTRLPQGFKNSPTLFNEALNRDLQGFRLDHPSVSLLQYVDDLLIAADTQAACLSATRDLLMTLAELGYRVSGKKAQLCQEEVTYLGFKIHKGSRSLSNSRTQAILQIPVPKTKRQVREFLGTIGYCRLWIPGFAELAQPLYAATRPGNDPLVWGEKEEEAFQSLKLALTQPPALALPSLDKPFQLFVEETSGAAKGVLTQALGPWKRPVAYLSKRLDPVAAGWPRCLRAIAAAALLTREASKLTFGQDIEITSSHNLESLLRSPPDKWLTNARITQYQVLLLDPPRVRFKQTAALNPATLLPETDDTLPIHHCLDTLDSLTSTRPDLTDQPLAQAEATLFTDGSSYIRDGKRYAGAAVVTLDSVIWAEPLPIGTSAQKAELIALTKALEWSKDKSVNIYTDSRYAFATLHVHGMIYRERGWLTAGGKAIKNAPEILALLTAVWLPKRVAVMHCKGHQKDDAPTSTGNRRADEVAREVAIRPLSTQATISAGKRTADGSEFEKRTADGSEFESPKKKAKVE

SEQ ID NO: 7046 - protein, 2098 aa, synthetic construct
MPAAKRVKLDGGDKKYSIGLDIGTNSVGWAVITDEYKVPSKKFKVLGNTDRHSIKKNLIGALLFDSGETAEATRLKRTARRRYTRRKNRICYLQEIFSNEMAKVDDSFFHRLEESFLVEEDKKHERHPIFGNIVDEVAYHEKYPTIYHLRKKLVDSTDKADLRLIYLALAHMIKFRGHFLIEGDLNPDNSDVDKLFIQLVQTYNQLFEENPINASGVDAKAILSARLSKSRRLENLIAQLPGEKKNGLFGNLIALSLGLTPNFKSNFDLAEDAKLQLSKDTYDDDLDNLLAQIGDQYADLFLAAKNLSDAILLSDILRVNTEITKAPLSASMIKRYDEHHQDLTLLKALVRQQLPEKYKEIFFDQSKNGYAGYIDGGASQEEFYKFIKPILEKMDGTEELLVKLNREDLLRKQRTFDNGSIPHQIHLGELHAILRRQEDFYPFLKDNREKIEKILTFRIPYYVGPLARGNSRFAWMTRKSEETITPWNFEEVVDKGASAQSFIERMTNFDKNLPNEKVLPKHSLLYEYFTVYNELTKVKYVTEGMRKPAFLSGEQKKAIVDLLFKTNRKVTVKQLKEDYFKKIECFDSVEISGVEDRFNASLGTYHDLLKIIKDKDFLDNEENEDILEDIVLTLTLFEDREMIEERLKTYAHLFDDKVMKQLKRRRYTGWGRLSRKLINGIRDKQSGKTILDFLKSDGFANRNFMQLIHDDSLTFKEDIQKAQVSGQGDSLHEHIANLAGSPAIKKGILQTVKVVDELVKVMGRHKPENIVIEMARENQTTQKGQKNSRERMKRIEEGIKELGSQILKEHPVENTQLQNEKLYLYYLQNGRDMYVDQELDINRLSDYDVDHIVPQSFLKDDSIDNKVLTRSDKARGKSDNVPSEEVVKKMKNYWRQLLNAKLITQRKFDNLTKAERGGLSELDKAGFIKRQLVETRQITKHVAQILDSRMNTKYDENDKLIREVKVITLKSKLVSDFRKDFQFYKVREINNYHHAHDAYLNAVVGTALIKKYPKLESEFVYGDYKVYDVRKMIAKSEQEIGKATAKYFFYSNIMNFFKTEITLANGEIRKRPLIETNGETGEIVWDKGRDFATVRKVLSMPQVNIVKKTEVQTGGFSKESILPKRNSDKLIARKKDWDPKKYGGFDSPTVAYSVLVVAKVEKGKSKKLKSVKELLGITIMERSSFEKNPIDFLEAKGYKEVKKDLIIKLPKYSLFELENGRKRMLASAGELQKGNELALPSKYVNFLYLASHYEKLKGSPEDNEQKQLFVEQHKHYLDEIIEQISEFSKRVILADANLDKVLSAYNKHRDKPIREQAENIIHLFTLTNLGAPAAFKYFDTTIDRKRYTSTKEVLDATLIHQSITGLYETRIDLSQLGGDGGGGSGSSEAAAKGGTAPLEEEYRLFLEAPIQNVTLLEQWKREIPKVWAEINPPGLASTQAPIHVQLLSTALPVRVRQYPITLEAKRSLRETIRKFRAAGILRPVHSPWNTPLLPVRKSGTSEYRMVQDLREVNKRVETIHPTVPNPYTLLSLLPPDRIWYSVLDLKDAFFCIPLAPESQLIFAFEWADAEEGESGQLTWTRLPQGFKNSPTLFNEALNRDLQGFRLDHPSVSLLQYVDDLLIAADTQAACLSATRDLLMTLAELGYRVSGKKAQLCQEEVTYLGFKIHKGSRSLSNSRTQAILQIPVPKTKRQVREFLGKIGYCRLFIPGFAELAQPLYAATRPGNDPLVWGEKEEEAFQSLKLALTQPPALALPSLDKPFQLFVEETSGAAKGVLTQALGPWKRPVAYLSKRLDPVAAGWPRCLRAIAAAALLTREASKLTFGQDIEITSSHNLESLLRSPPDKWLTNARITQYQVLLLDPPRVRFKQTAALNPATLLPETDDTLPIHHCLDTLDSLTSTRPDLTDQPLAQAEATLFTDGSSYIRDGKRYAGAAVVTLDSVIWAEPLPIGTSAQKAELIALTKALEWSKDKSVNIYTDSRYAFATLHVHGMIYRERGWLTAGGKAIKNAPEILALLTAVWLPKRVAVMHCKGHQKDDAPTSTGNRRADEVAREVAIRPLSTQATISAGKRTADGSEFEKRTADGSEFESPKKKAKVE

SEQ ID NO: 7047 - protein, 2218 aa, synthetic construct
MPAAKRVKLDGGDKKYSIGLDIGTNSVGWAVITDEYKVPSKKFKVLGNTDRHSIKKNLIGALLFDSGETAEATRLKRTARRRYTRRKNRICYLQEIFSNEMAKVDDSFFHRLEESFLVEEDKKHERHPIFGNIVDEVAYHEKYPTIYHLRKKLVDSTDKADLRLIYLALAHMIKFRGHFLIEGDLNPDNSDVDKLFIQLVQTYNQLFEENPINASGVDAKAILSARLSKSRRLENLIAQLPGEKKNGLFGNLIALSLGLTPNFKSNFDLAEDAKLQLSKDTYDDDLDNLLAQIGDQYADLFLAAKNLSDAILLSDILRVNTEITKAPLSASMIKRYDEHHQDLTLLKALVRQQLPEKYKEIFFDQSKNGYAGYIDGGASQEEFYKFIKPILEKMDGTEELLVKLNREDLLRKQRTFDNGSIPHQIHLGELHAILRRQEDFYPFLKDNREKIEKILTFRIPYYVGPLARGNSRFAWMTRKSEETITPWNFEEVVDKGASAQSFIERMTNFDKNLPNEKVLPKHSLLYEYFTVYNELTKVKYVTEGMRKPAFLSGEQKKAIVDLLFKTNRKVTVKQLKEDYFKKIECFDSVEISGVEDRFNASLGTYHDLLKIIKDKDFLDNEENEDILEDIVLTLTLFEDREMIEERLKTYAHLFDDKVMKQLKRRRYTGWGRLSRKLINGIRDKQSGKTILDFLKSDGFANRNFMQLIHDDSLTFKEDIQKAQVSGQGDSLHEHIANLAGSPAIKKGILQTVKVVDELVKVMGRHKPENIVIEMARENQTTQKGQKNSRERMKRIEEGIKELGSQILKEHPVENTQLQNEKLYLYYLQNGRDMYVDQELDINRLSDYDVDHIVPQSFLKDDSIDNKVLTRSDKARGKSDNVPSEEVVKKMKNYWRQLLNAKLITQRKFDNLTKAERGGLSELDKAGFIKRQLVETRQITKHVAQILDSRMNTKYDENDKLIREVKVITLKSKLVSDFRKDFQFYKVREINNYHHAHDAYLNAVVGTALIKKYPKLESEFVYGDYKVYDVRKMIAKSEQEIGKATAKYFFYSNIMNFFKTEITLANGEIRKRPLIETNGETGEIVWDKGRDFATVRKVLSMPQVNIVKKTEVQTGGFSKESILPKRNSDKLIARKKDWDPKKYGGFDSPTVAYSVLVVAKVEKGKSKKLKSVKELLGITIMERSSFEKNPIDFLEAKGYKEVKKDLIIKLPKYSLFELENGRKRMLASAGELQKGNELALPSKYVNFLYLASHYEKLKGSPEDNEQKQLFVEQHKHYLDEIIEQISEFSKRVILADANLDKVLSAYNKHRDKPIREQAENIIHLFTLTNLGAPAAFKYFDTTIDRKRYTSTKEVLDATLIHQSITGLYETRIDLSQLGGDGGGGSGSSEAAAKGGTLGDQGSRGSDPLPEPRVTLTVEGIPTEFLVNTGAEHSVLTKPMGKMGSKRTVVAGATGSKVYPWTTKRLLKIGQKQVTHSFLVIPECPAPLLGRDLLTKLKAQIQFSTEGPQVTWEDRPAMCLVLNLEEEYRLHEKPVPPSIDPSWLQLFPMVWAEKAGMGLANQVPPVVVELKSDASPVAVRQYPMSKEAREGIRPHIQRFLDLGILVPCQSPWNTPLLPVKKPGTNDYRPVQDLREVNKRVQDIHPTVPNPYNLLSSLPPSHTWYSVLDLKDAFFCLKLHPNSQPLFAFEWRDPEKGNTGQLTWTRLPQGFKNSPTLFDEALHRDLASFRALNPQVVMLQYVDDLLVAAPTYRDCKEGTRRLLQELSKLGYRVSAKKAQLCREEVTYLGYLLKGGKRWLTPARKATVMKIPTPTTPRQVREFLGTAGFCRLWIPGFASLAAPLYPLTREKVPFTWTEAHQEAFGRIKEALLSAPALALPDLTKPFALYVDEKEGVARGVLTQTLGPWRRPVAYLSKKLDPVASGWPTCLKAIAAVALLLKDADKLTLGQNVLVIAPHNLESIVRQPPDRWMTNARMTHYQSLLLNERVSFAPPAILNPATLLPVESDDTPIHICSEILAEETGTRPDLRDQPLPGVPAWYTDGSSFIMDGRRQAGAAIVDNKRTVWASNLPEGTSAQKAELIALTQALRLAEGKSINIYTDSRYAFATAHVHGAIYKQRGLLTSAGKDIKNKEEILALLEAIHLPKRVAIIHCPGHQRGTDPVATGNRKADEAAKQAAQSTRILTETTKNAGKRTADGSEFEKRTADGSEFESPKKKAKVE

SEQ ID NO: 7048 - protein, 2096 aa, synthetic construct
MPAAKRVKLDGGDKKYSIGLDIGTNSVGWAVITDEYKVPSKKFKVLGNTDRHSIKKNLIGALLFDSGETAEATRLKRTARRRYTRRKNRICYLQEIFSNEMAKVDDSFFHRLEESFLVEEDKKHERHPIFGNIVDEVAYHEKYPTIYHLRKKLVDSTDKADLRLIYLALAHMIKFRGHFLIEGDLNPDNSDVDKLFIQLVQTYNQLFEENPINASGVDAKAILSARLSKSRRLENLIAQLPGEKKNGLFGNLIALSLGLTPNFKSNFDLAEDAKLQLSKDTYDDDLDNLLAQIGDQYADLFLAAKNLSDAILLSDILRVNTEITKAPLSASMIKRYDEHHQDLTLLKALVRQQLPEKYKEIFFDQSKNGYAGYIDGGASQEEFYKFIKPILEKMDGTEELLVKLNREDLLRKQRTFDNGSIPHQIHLGELHAILRRQEDFYPFLKDNREKIEKILTFRIPYYVGPLARGNSRFAWMTRKSEETITPWNFEEVVDKGASAQSFIERMTNFDKNLPNEKVLPKHSLLYEYFTVYNELTKVKYVTEGMRKPAFLSGEQKKAIVDLLFKTNRKVTVKQLKEDYFKKIECFDSVEISGVEDRFNASLGTYHDLLKIIKDKDFLDNEENEDILEDIVLTLTLFEDREMIEERLKTYAHLFDDKVMKQLKRRRYTGWGRLSRKLINGIRDKQSGKTILDFLKSDGFANRNFMQLIHDDSLTFKEDIQKAQVSGQGDSLHEHIANLAGSPAIKKGILQTVKVVDELVKVMGRHKPENIVIEMARENQTTQKGQKNSRERMKRIEEGIKELGSQILKEHPVENTQLQNEKLYLYYLQNGRDMYVDQELDINRLSDYDVDHIVPQSFLKDDSIDNKVLTRSDKARGKSDNVPSEEVVKKMKNYWRQLLNAKLITQRKFDNLTKAERGGLSELDKAGFIKRQLVETRQITKHVAQILDSRMNTKYDENDKLIREVKVITLKSKLVSDFRKDFQFYKVREINNYHHAHDAYLNAVVGTALIKKYPKLESEFVYGDYKVYDVRKMIAKSEQEIGKATAKYFFYSNIMNFFKTEITLANGEIRKRPLIETNGETGEIVWDKGRDFATVRKVLSMPQVNIVKKTEVQTGGFSKESILPKRNSDKLIARKKDWDPKKYGGFDSPTVAYSVLVVAKVEKGKSKKLKSVKELLGITIMERSSFEKNPIDFLEAKGYKEVKKDLIIKLPKYSLFELENGRKRMLASAGELQKGNELALPSKYVNFLYLASHYEKLKGSPEDNEQKQLFVEQHKHYLDEIIEQISEFSKRVILADANLDKVLSAYNKHRDKPIREQAENIIHLFTLTNLGAPAAFKYFDTTIDRKRYTSTKEVLDATLIHQSITGLYETRIDLSQLGGDGGGGSGSSEAAAKGGTLGIEDEYRLHETSTEPDVSLGSTWLSDFPQAWAETGGMGLAVRQAPLIIPLKATSTPVSIQQYPMSHEARLGIKPHIQRLLDQGILVPCQSPWNTPLLPVKKPGTNDYRPVQDLREVNKRVEDIHPTVPNPYNLLSGLPPSHQWYTVLDLKDAFFCLRLHPTSQPLFAFEWRDPGMGISGQLTWTRLPQGFKNSPTLFNEALHRDLADFRIQHPDLILLQYVDDILLAATSELDCQQGTRALLQTLGDLGYRASAKKAQICQKQVKYLGYLLREGQRWLTEARKETVMGQPVPKTPRQLREFLGTAGFCRLWIPGFAEMAAPLYPLTKPGTLFSWGPDQQKAYQEIKQALLTAPALGLPDLTKPFELFVDEKQGYAKGVLTQKLGPWRRPVAYLSKKLDPVAAGWPPCLRMVAAIAVLTKDAGKLTMGQPLVILAPHAVEALVKQPPDRWLSNARMTHYQAMLLDTDRVQFGPVVALNPATLLPLPEEGAPHDCLEILAETHGTRPDLTDQPIPDADHTWYTDGSSFLQEGQRKAGAAVTTETEVIWAGALPAGTSAQRAELIALTQALKMAEGKRLNVYTDSRYAFATAHIHGEIYRRRGWLTSEGREIKNKSEILALLKALFLPKRLSIIHCLGHQKGDSAEARGNRLADQAAREAAIKTPPDTSTLLAGKRTADGSEFEKRTADGSEFESPKKKAKVE

SEQ ID NO: 7049 - protein, 2096 aa, synthetic construct
MPAAKRVKLDGGDKKYSIGLDIGTNSVGWAVITDEYKVPSKKFKVLGNTDRHSIKKNLIGALLFDSGETAEATRLKRTARRRYTRRKNRICYLQEIFSNEMAKVDDSFFHRLEESFLVEEDKKHERHPIFGNIVDEVAYHEKYPTIYHLRKKLVDSTDKADLRLIYLALAHMIKFRGHFLIEGDLNPDNSDVDKLFIQLVQTYNQLFEENPINASGVDAKAILSARLSKSRRLENLIAQLPGEKKNGLFGNLIALSLGLTPNFKSNFDLAEDAKLQLSKDTYDDDLDNLLAQIGDQYADLFLAAKNLSDAILLSDILRVNTEITKAPLSASMIKRYDEHHQDLTLLKALVRQQLPEKYKEIFFDQSKNGYAGYIDGGASQEEFYKFIKPILEKMDGTEELLVKLNREDLLRKQRTFDNGSIPHQIHLGELHAILRRQEDFYPFLKDNREKIEKILTFRIPYYVGPLARGNSRFAWMTRKSEETITPWNFEEVVDKGASAQSFIERMTNFDKNLPNEKVLPKHSLLYEYFTVYNELTKVKYVTEGMRKPAFLSGEQKKAIVDLLFKTNRKVTVKQLKEDYFKKIECFDSVEISGVEDRFNASLGTYHDLLKIIKDKDFLDNEENEDILEDIVLTLTLFEDREMIEERLKTYAHLFDDKVMKQLKRRRYTGWGRLSRKLINGIRDKQSGKTILDFLKSDGFANRNFMQLIHDDSLTFKEDIQKAQVSGQGDSLHEHIANLAGSPAIKKGILQTVKVVDELVKVMGRHKPENIVIEMARENQTTQKGQKNSRERMKRIEEGIKELGSQILKEHPVENTQLQNEKLYLYYLQNGRDMYVDQELDINRLSDYDVDHIVPQSFLKDDSIDNKVLTRSDKARGKSDNVPSEEVVKKMKNYWRQLLNAKLITQRKFDNLTKAERGGLSELDKAGFIKRQLVETRQITKHVAQILDSRMNTKYDENDKLIREVKVITLKSKLVSDFRKDFQFYKVREINNYHHAHDAYLNAVVGTALIKKYPKLESEFVYGDYKVYDVRKMIAKSEQEIGKATAKYFFYSNIMNFFKTEITLANGEIRKRPLIETNGETGEIVWDKGRDFATVRKVLSMPQVNIVKKTEVQTGGFSKESILPKRNSDKLIARKKDWDPKKYGGFDSPTVAYSVLVVAKVEKGKSKKLKSVKELLGITIMERSSFEKNPIDFLEAKGYKEVKKDLIIKLPKYSLFELENGRKRMLASAGELQKGNELALPSKYVNFLYLASHYEKLKGSPEDNEQKQLFVEQHKHYLDEIIEQISEFSKRVILADANLDKVLSAYNKHRDKPIREQAENIIHLFTLTNLGAPAAFKYFDTTIDRKRYTSTKEVLDATLIHQSITGLYETRIDLSQLGGDGGGGSGSSEAAAKGGTLNIEDEYRLHEISTEPDVSPGSTWLSDFPQAWAETGGMGLAVRQAPLIIPLKATSTPVSIKQYPMSQEAKLGIKPHIQRLLDQGILVPCQSPWNTPLLPVKKPGTNDYRPVQGLREVNKRVEDIHPTVPNPYNLLSGLPTSHRWYTVLDLKDAFFCLRLHPTSQPLFASEWRDPGMGISGQLTWTRLPQGFKNSPTLFNEALHRGLADFRIQHPDLILLQYVDDLLLAATSELDCQQGTRALLKTLGNLGYRASAKKAQICQKQVKYLGYLLREGQRWLTEARKETVMGQPTPKTPRQLREFLGKAGFCRLFIPRFAEMAAPLYPLTKPGTLFNWGPDQQKAYHEIKQALLTAPALGLPDLTKPFELFVDEKQGYAKGVLTQKLGPWRRPVAYLSKKLDPVAAGWPPCLRMVAAIAVLTKDAGKLTMGQPLVILAPHAVEALVKQPPDRWLSNARMTHYQAMLLDTDRVQFGPVVALNPATLLPLPEEGAPHDCLEILAETHGTEPDLTDQPIPDADHTWYTDGSSFLQEGQRKAGAAVTTETEVIWARALPAGTSAQRAELIALTQALKMAEGKRLNVYTDSRYAFATAHIHGEIYKRRGWLTSEGREIKNKSEILALLKALFLPKRLSIIHCLGHQKGDSAEARGNRLADQAAREAAIKTPPDTSTLLAGKRTADGSEFEKRTADGSEFESPKKKAKVE

SEQ ID NO: 7050 - protein, 2090 aa, synthetic construct
MPAAKRVKLDGGDKKYSIGLDIGTNSVGWAVITDEYKVPSKKFKVLGNTDRHSIKKNLIGALLFDSGETAEATRLKRTARRRYTRRKNRICYLQEIFSNEMAKVDDSFFHRLEESFLVEEDKKHERHPIFGNIVDEVAYHEKYPTIYHLRKKLVDSTDKADLRLIYLALAHMIKFRGHFLIEGDLNPDNSDVDKLFIQLVQTYNQLFEENPINASGVDAKAILSARLSKSRRLENLIAQLPGEKKNGLFGNLIALSLGLTPNFKSNFDLAEDAKLQLSKDTYDDDLDNLLAQIGDQYADLFLAAKNLSDAILLSDILRVNTEITKAPLSASMIKRYDEHHQDLTLLKALVRQQLPEKYKEIFFDQSKNGYAGYIDGGASQEEFYKFIKPILEKMDGTEELLVKLNREDLLRKQRTFDNGSIPHQIHLGELHAILRRQEDFYPFLKDNREKIEKILTFRIPYYVGPLARGNSRFAWMTRKSEETITPWNFEEVVDKGASAQSFIERMTNFDKNLPNEKVLPKHSLLYEYFTVYNELTKVKYVTEGMRKPAFLSGEQKKAIVDLLFKTNRKVTVKQLKEDYFKKIECFDSVEISGVEDRFNASLGTYHDLLKIIKDKDFLDNEENEDILEDIVLTLTLFEDREMIEERLKTYAHLFDDKVMKQLKRRRYTGWGRLSRKLINGIRDKQSGKTILDFLKSDGFANRNFMQLIHDDSLTFKEDIQKAQVSGQGDSLHEHIANLAGSPAIKKGILQTVKVVDELVKVMGRHKPENIVIEMARENQTTQKGQKNSRERMKRIEEGIKELGSQILKEHPVENTQLQNEKLYLYYLQNGRDMYVDQELDINRLSDYDVDHIVPQSFLKDDSIDNKVLTRSDKARGKSDNVPSEEVVKKMKNYWRQLLNAKLITQRKFDNLTKAERGGLSELDKAGFIKRQLVETRQITKHVAQILDSRMNTKYDENDKLIREVKVITLKSKLVSDFRKDFQFYKVREINNYHHAHDAYLNAVVGTALIKKYPKLESEFVYGDYKVYDVRKMIAKSEQEIGKATAKYFFYSNIMNFFKTEITLANGEIRKRPLIETNGETGEIVWDKGRDFATVRKVLSMPQVNIVKKTEVQTGGFSKESILPKRNSDKLIARKKDWDPKKYGGFDSPTVAYSVLVVAKVEKGKSKKLKSVKELLGITIMERSSFEKNPIDFLEAKGYKEVKKDLIIKLPKYSLFELENGRKRMLASAGELQKGNELALPSKYVNFLYLASHYEKLKGSPEDNEQKQLFVEQHKHYLDEIIEQISEFSKRVILADANLDKVLSAYNKHRDKPIREQAENIIHLFTLTNLGAPAAFKYFDTTIDRKRYTSTKEVLDATLIHQSITGLYETRIDLSQLGGDGGGGSGSSEAAAKGGTLQLDDEYRLYSPLVKPDQNIQFWLEQFPQAWAETAGMGLAKQVPPQVIQLKASATPVSVRQYPLSKEAQEGIRPHVQRLIQQGILVPVQSPWNTPLLPVRKPGTNDYRPVQDLREVNKRVQDIHPTVPNPYNLLCALPPQRSWYTVLDLKDAFFCLRLHPTSQPLFAFEWRDPGTGRTGQLTWTRLPQGFKNSPTIFDEALHRDLANFRIQHPQVTLLQYVDDLLLAGATKQDCLEGTKALLLELSDLGYRASAKKAQICRREVTYLGYSLRDGQRWLTEARKKTVVQIPAPTTAKQVREFLGTAGFCRLWIPGFATLAAPLYPLTKEKGEFSWAPEHQKAFDAIKKALLSAPALALPDVTKPFTLYVDERKGVARGVLTQTLGPWRRPVAYLSKKLDPVASGWPVCLKAIAAVAILVKDADKLTLGQNITVIAPHALENIVRQPPDRWMTNARMTHYQSLLLTERVTFAPPAALNPATLLPEETDEPVTHDCHQLLIEETGVRKDLTDIPLTGEVLTWFTDGSSYVVEGKRMAGAAVVDGTRTIWASSLPEGTSAQKAELMALTQALRLAEGKSINIYTDSRYAFATAHVHGAIYKQRGLLTSAGREIKNKEEILSLLEALHLPKRLAIIHCPGHQKAKDPISRGNQMADRVAKQAAQGVNLLAGKRTADGSEFEKRTADGSEFESPKKKAKVE

SEQ ID NO: 7051 - protein, 2087 aa, synthetic construct
MPAAKRVKLDGGDKKYSIGLDIGTNSVGWAVITDEYKVPSKKFKVLGNTDRHSIKKNLIGALLFDSGETAEATRLKRTARRRYTRRKNRICYLQEIFSNEMAKVDDSFFHRLEESFLVEEDKKHERHPIFGNIVDEVAYHEKYPTIYHLRKKLVDSTDKADLRLIYLALAHMIKFRGHFLIEGDLNPDNSDVDKLFIQLVQTYNQLFEENPINASGVDAKAILSARLSKSRRLENLIAQLPGEKKNGLFGNLIALSLGLTPNFKSNFDLAEDAKLQLSKDTYDDDLDNLLAQIGDQYADLFLAAKNLSDAILLSDILRVNTEITKAPLSASMIKRYDEHHQDLTLLKALVRQQLPEKYKEIFFDQSKNGYAGYIDGGASQEEFYKFIKPILEKMDGTEELLVKLNREDLLRKQRTFDNGSIPHQIHLGELHAILRRQEDFYPFLKDNREKIEKILTFRIPYYVGPLARGNSRFAWMTRKSEETITPWNFEEVVDKGASAQSFIERMTNFDKNLPNEKVLPKHSLLYEYFTVYNELTKVKYVTEGMRKPAFLSGEQKKAIVDLLFKTNRKVTVKQLKEDYFKKIECFDSVEISGVEDRFNASLGTYHDLLKIIKDKDFLDNEENEDILEDIVLTLTLFEDREMIEERLKTYAHLFDDKVMKQLKRRRYTGWGRLSRKLINGIRDKQSGKTILDFLKSDGFANRNFMQLIHDDSLTFKEDIQKAQVSGQGDSLHEHIANLAGSPAIKKGILQTVKVVDELVKVMGRHKPENIVIEMARENQTTQKGQKNSRERMKRIEEGIKELGSQILKEHPVENTQLQNEKLYLYYLQNGRDMYVDQELDINRLSDYDVDHIVPQSFLKDDSIDNKVLTRSDKARGKSDNVPSEEVVKKMKNYWRQLLNAKLITQRKFDNLTKAERGGLSELDKAGFIKRQLVETRQITKHVAQILDSRMNTKYDENDKLIREVKVITLKSKLVSDFRKDFQFYKVREINNYHHAHDAYLNAVVGTALIKKYPKLESEFVYGDYKVYDVRKMIAKSEQEIGKATAKYFFYSNIMNFFKTEITLANGEIRKRPLIETNGETGEIVWDKGRDFATVRKVLSMPQVNIVKKTEVQTGGFSKESILPKRNSDKLIARKKDWDPKKYGGFDSPTVAYSVLVVAKVEKGKSKKLKSVKELLGITIMERSSFEKNPIDFLEAKGYKEVKKDLIIKLPKYSLFELENGRKRMLASAGELQKGNELALPSKYVNFLYLASHYEKLKGSPEDNEQKQLFVEQHKHYLDEIIEQISEFSKRVILADANLDKVLSAYNKHRDKPIREQAENIIHLFTLTNLGAPAAFKYFDTTIDRKRYTSTKEVLDATLIHQSITGLYETRIDLSQLGGDGGGGSGSSEAAAKGGIPWLMKKPLQLTTLVPLQEYEERLLKQTMLTGSYKEKLQSLFLKYDALWQHWENQVGHRRIKPHHIATGTVNPRPQKQYPINPKAKASIQTVINDLLKQGVLIQQNSIMNTPVYPVPKPDGKWRMVLDYREVNKTIPLIAAQNQHSAGILSSIFRGKYKTTLDLSNGFWAHSITPESYWLTAFTWLGQQYCWTRLPQGFLNSPALFNADVVDLLKEVPNVQVYVDDIYISHDDPREHLEQLEKVFSLLLNAGYVVSLKKSEIAQHEVEFLGFNITKEGRGLTETFKQKLLNITPPRDLKQLQSILGLLNFARNFIPNFSELVKPLYNIIATAPGKYITWTTDNSQQLQNIISMLNSAENLEERNPEVRLIMKVNTSPSAGYIRFYNEFAKRPIMYLNYVYTKAEVKFTNTEKLLTTIHKGLIKALDLGMGQEILVYSPIVSMTKIQKTPLPERKALPIRWITWMSYLEDPRIQFHYDKTLPELQQVPTVTDDIIAKIKHPSEFSMVFYTDGSAIKHPNVNKSHNAGMGIAQVQFKPEFTVINTWSIPLGDHTAQLAEVAAVEFACKKALKIDGPVLIVTDSFYVAESVNKELPYWQSNGFFNNKKKPLKHVSKWKSIADCIQLKPDIIIIHEKGHQPTASTFHTEGNNLADKLATQGSYVVNAGKRTADGSEFEKRTADGSEFESPKKKAKVE

SEQ ID NO: 7052 - protein, 2098 aa, synthetic construct
MPAAKRVKLDGGDKKYSIGLDIGTNSVGWAVITDEYKVPSKKFKVLGNTDRHSIKKNLIGALLFDSGETAEATRLKRTARRRYTRRKNRICYLQEIFSNEMAKVDDSFFHRLEESFLVEEDKKHERHPIFGNIVDEVAYHEKYPTIYHLRKKLVDSTDKADLRLIYLALAHMIKFRGHFLIEGDLNPDNSDVDKLFIQLVQTYNQLFEENPINASGVDAKAILSARLSKSRRLENLIAQLPGEKKNGLFGNLIALSLGLTPNFKSNFDLAEDAKLQLSKDTYDDDLDNLLAQIGDQYADLFLAAKNLSDAILLSDILRVNTEITKAPLSASMIKRYDEHHQDLTLLKALVRQQLPEKYKEIFFDQSKNGYAGYIDGGASQEEFYKFIKPILEKMDGTEELLVKLNREDLLRKQRTFDNGSIPHQIHLGELHAILRRQEDFYPFLKDNREKIEKILTFRIPYYVGPLARGNSRFAWMTRKSEETITPWNFEEVVDKGASAQSFIERMTNFDKNLPNEKVLPKHSLLYEYFTVYNELTKVKYVTEGMRKPAFLSGEQKKAIVDLLFKTNRKVTVKQLKEDYFKKIECFDSVEISGVEDRFNASLGTYHDLLKIIKDKDFLDNEENEDILEDIVLTLTLFEDREMIEERLKTYAHLFDDKVMKQLKRRRYTGWGRLSRKLINGIRDKQSGKTILDFLKSDGFANRNFMQLIHDDSLTFKEDIQKAQVSGQGDSLHEHIANLAGSPAIKKGILQTVKVVDELVKVMGRHKPENIVIEMARENQTTQKGQKNSRERMKRIEEGIKELGSQILKEHPVENTQLQNEKLYLYYLQNGRDMYVDQELDINRLSDYDVDHIVPQSFLKDDSIDNKVLTRSDKARGKSDNVPSEEVVKKMKNYWRQLLNAKLITQRKFDNLTKAERGGLSELDKAGFIKRQLVETRQITKHVAQILDSRMNTKYDENDKLIREVKVITLKSKLVSDFRKDFQFYKVREINNYHHAHDAYLNAVVGTALIKKYPKLESEFVYGDYKVYDVRKMIAKSEQEIGKATAKYFFYSNIMNFFKTEITLANGEIRKRPLIETNGETGEIVWDKGRDFATVRKVLSMPQVNIVKKTEVQTGGFSKESILPKRNSDKLIARKKDWDPKKYGGFDSPTVAYSVLVVAKVEKGKSKKLKSVKELLGITIMERSSFEKNPIDFLEAKGYKEVKKDLIIKLPKYSLFELENGRKRMLASAGELQKGNELALPSKYVNFLYLASHYEKLKGSPEDNEQKQLFVEQHKHYLDEIIEQISEFSKRVILADANLDKVLSAYNKHRDKPIREQAENIIHLFTLTNLGAPAAFKYFDTTIDRKRYTSTKEVLDATLIHQSITGLYETRIDLSQLGGDGGGGSEAAAKGSSGGTAPLEEEYRLFLEAPIQNVTLLEQWKREIPKVWAEINPPGLASTQAPIHVQLLSTALPVRVRQYPITLEAKRSLRETIRKFRAAGILRPVHSPWNTPLLPVRKSGTSEYRMVQDLREVNKRVETIHPTVPNPYTLLSLLPPDRIWYSVLDLKDAFFCIPLAPESQLIFAFEWADAEEGESGQLTWTRLPQGFKNSPTLFDEALNRDLQGFRLDHPSVSLLQYVDDLLIAADTQAACLSATRDLLMTLAELGYRVSGKKAQLCQEEVTYLGFKIHKGSRSLSNSRTQAILQIPVPKTKRQVREFLGTIGYCRLWIPGFAELAQPLYAATRGGNDPLVWGEKEEEAFQSLKLALTQPPALALPSLDKPFQLFVEETSGAAKGVLTQALGPWKRPVAYLSKRLDPVAAGWPRCLRAIAAAALLTREASKLTFGQDIEITSSHNLESLLRSPPDKWLTNARITQYQVLLLDPPRVRFKQTAALNPATLLPETDDTLPIHHCLDTLDSLTSTRPDLTDQPLAQAEATLFTDGSSYIRDGKRYAGAAVVTLDSVIWAEPLPIGTSAQKAELIALTKALEWSKDKSVNIYTDSRYAFATLHVHGMIYRERGLLTAGGKAIKNAPEILALLTAVWLPKRVAVMHCKGHQKDDAPTSTGNRRADEVAREVAIRPLSTQATISAGKRTADGSEFEKRTADGSEFESPKKKAKVE

SEQ ID NO: 7053 - protein, 2098 aa, synthetic construct
MPAAKRVKLDGGDKKYSIGLDIGTNSVGWAVITDEYKVPSKKFKVLGNTDRHSIKKNLIGALLFDSGETAEATRLKRTARRRYTRRKNRICYLQEIFSNEMAKVDDSFFHRLEESFLVEEDKKHERHPIFGNIVDEVAYHEKYPTIYHLRKKLVDSTDKADLRLIYLALAHMIKFRGHFLIEGDLNPDNSDVDKLFIQLVQTYNQLFEENPINASGVDAKAILSARLSKSRRLENLIAQLPGEKKNGLFGNLIALSLGLTPNFKSNFDLAEDAKLQLSKDTYDDDLDNLLAQIGDQYADLFLAAKNLSDAILLSDILRVNTEITKAPLSASMIKRYDEHHQDLTLLKALVRQQLPEKYKEIFFDQSKNGYAGYIDGGASQEEFYKFIKPILEKMDGTEELLVKLNREDLLRKQRTFDNGSIPHQIHLGELHAILRRQEDFYPFLKDNREKIEKILTFRIPYYVGPLARGNSRFAWMTRKSEETITPWNFEEVVDKGASAQSFIERMTNFDKNLPNEKVLPKHSLLYEYFTVYNELTKVKYVTEGMRKPAFLSGEQKKAIVDLLFKTNRKVTVKQLKEDYFKKIECFDSVEISGVEDRFNASLGTYHDLLKIIKDKDFLDNEENEDILEDIVLTLTLFEDREMIEERLKTYAHLFDDKVMKQLKRRRYTGWGRLSRKLINGIRDKQSGKTILDFLKSDGFANRNFMQLIHDDSLTFKEDIQKAQVSGQGDSLHEHIANLAGSPAIKKGILQTVKVVDELVKVMGRHKPENIVIEMARENQTTQKGQKNSRERMKRIEEGIKELGSQILKEHPVENTQLQNEKLYLYYLQNGRDMYVDQELDINRLSDYDVDHIVPQSFLKDDSIDNKVLTRSDKARGKSDNVPSEEVVKKMKNYWRQLLNAKLITQRKFDNLTKAERGGLSELDKAGFIKRQLVETRQITKHVAQILDSRMNTKYDENDKLIREVKVITLKSKLVSDFRKDFQFYKVREINNYHHAHDAYLNAVVGTALIKKYPKLESEFVYGDYKVYDVRKMIAKSEQEIGKATAKYFFYSNIMNFFKTEITLANGEIRKRPLIETNGETGEIVWDKGRDFATVRKVLSMPQVNIVKKTEVQTGGFSKESILPKRNSDKLIARKKDWDPKKYGGFDSPTVAYSVLVVAKVEKGKSKKLKSVKELLGITIMERSSFEKNPIDFLEAKGYKEVKKDLIIKLPKYSLFELENGRKRMLASAGELQKGNELALPSKYVNFLYLASHYEKLKGSPEDNEQKQLFVEQHKHYLDEIIEQISEFSKRVILADANLDKVLSAYNKHRDKPIREQAENIIHLFTLTNLGAPAAFKYFDTTIDRKRYTSTKEVLDATLIHQSITGLYETRIDLSQLGGDGGGGSEAAAKGSSGGTAPLEEEYRLFLEAPIQNVTLLEQWKREIPKVWAEINPPGLASTQAPIHVQLLSTALPVRVRQYPITLEAKRSLRETIRKFRAAGILRPVHSPWNTPLLPVRKSGTSEYRMVQDLREVNKRVETIHPTVPNPYTLLSLLPPDRIWYSVLDLKDAFFCIPLAPESQLIFAFEWADAEEGESGQLTWTRLPQGFKNSPTLFNEALNRDLQGFRLDHPSVSLLQYVDDLLIAADTQAACLSATRDLLMTLAELGYRVSGKKAQLCQEEVTYLGFKIHKGSRSLSNSRTQAILQIPVPKTKRQVREFLGTIGYCRLWIPGFAELAQPLYAATRPGNDPLVWGEKEEEAFQSLKLALTQPPALALPSLDKPFQLFVEETSGAAKGVLTQALGPWKRPVAYLSKRLDPVAAGWPRCLRAIAAAALLTREASKLTFGQDIEITSSHNLESLLRSPPDKWLTNARITQYQVLLLDPPRVRFKQTAALNPATLLPETDDTLPIHHCLDTLDSLTSTRPDLTDQPLAQAEATLFTDGSSYIRDGKRYAGAAVVTLDSVIWAEPLPIGTSAQKAELIALTKALEWSKDKSVNIYTDSRYAFATLHVHGMIYRERGWLTAGGKAIKNAPEILALLTAVWLPKRVAVMHCKGHQKDDAPTSTGNRRADEVAREVAIRPLSTQATISAGKRTADGSEFEKRTADGSEFESPKKKAKVE

SEQ ID NO: 7054 - protein, 2098 aa, synthetic construct
MPAAKRVKLDGGDKKYSIGLDIGTNSVGWAVITDEYKVPSKKFKVLGNTDRHSIKKNLIGALLFDSGETAEATRLKRTARRRYTRRKNRICYLQEIFSNEMAKVDDSFFHRLEESFLVEEDKKHERHPIFGNIVDEVAYHEKYPTIYHLRKKLVDSTDKADLRLIYLALAHMIKFRGHFLIEGDLNPDNSDVDKLFIQLVQTYNQLFEENPINASGVDAKAILSARLSKSRRLENLIAQLPGEKKNGLFGNLIALSLGLTPNFKSNFDLAEDAKLQLSKDTYDDDLDNLLAQIGDQYADLFLAAKNLSDAILLSDILRVNTEITKAPLSASMIKRYDEHHQDLTLLKALVRQQLPEKYKEIFFDQSKNGYAGYIDGGASQEEFYKFIKPILEKMDGTEELLVKLNREDLLRKQRTFDNGSIPHQIHLGELHAILRRQEDFYPFLKDNREKIEKILTFRIPYYVGPLARGNSRFAWMTRKSEETITPWNFEEVVDKGASAQSFIERMTNFDKNLPNEKVLPKHSLLYEYFTVYNELTKVKYVTEGMRKPAFLSGEQKKAIVDLLFKTNRKVTVKQLKEDYFKKIECFDSVEISGVEDRFNASLGTYHDLLKIIKDKDFLDNEENEDILEDIVLTLTLFEDREMIEERLKTYAHLFDDKVMKQLKRRRYTGWGRLSRKLINGIRDKQSGKTILDFLKSDGFANRNFMQLIHDDSLTFKEDIQKAQVSGQGDSLHEHIANLAGSPAIKKGILQTVKVVDELVKVMGRHKPENIVIEMARENQTTQKGQKNSRERMKRIEEGIKELGSQILKEHPVENTQLQNEKLYLYYLQNGRDMYVDQELDINRLSDYDVDHIVPQSFLKDDSIDNKVLTRSDKARGKSDNVPSEEVVKKMKNYWRQLLNAKLITQRKFDNLTKAERGGLSELDKAGFIKRQLVETRQITKHVAQILDSRMNTKYDENDKLIREVKVITLKSKLVSDFRKDFQFYKVREINNYHHAHDAYLNAVVGTALIKKYPKLESEFVYGDYKVYDVRKMIAKSEQEIGKATAKYFFYSNIMNFFKTEITLANGEIRKRPLIETNGETGEIVWDKGRDFATVRKVLSMPQVNIVKKTEVQTGGFSKESILPKRNSDKLIARKKDWDPKKYGGFDSPTVAYSVLVVAKVEKGKSKKLKSVKELLGITIMERSSFEKNPIDFLEAKGYKEVKKDLIIKLPKYSLFELENGRKRMLASAGELQKGNELALPSKYVNFLYLASHYEKLKGSPEDNEQKQLFVEQHKHYLDEIIEQISEFSKRVILADANLDKVLSAYNKHRDKPIREQAENIIHLFTLTNLGAPAAFKYFDTTIDRKRYTSTKEVLDATLIHQSITGLYETRIDLSQLGGDGGGGSEAAAKGSSGGTAPLEEEYRLFLEAPIQNVTLLEQWKREIPKVWAEINPPGLASTQAPIHVQLLSTALPVRVRQYPITLEAKRSLRETIRKFRAAGILRPVHSPWNTPLLPVRKSGTSEYRMVQDLREVNKRVETIHPTVPNPYTLLSLLPPDRIWYSVLDLKDAFFCIPLAPESQLIFAFEWADAEEGESGQLTWTRLPQGFKNSPTLFNEALNRDLQGFRLDHPSVSLLQYVDDLLIAADTQAACLSATRDLLMTLAELGYRVSGKKAQLCQEEVTYLGFKIHKGSRSLSNSRTQAILQIPVPKTKRQVREFLGKIGYCRLFIPGFAELAQPLYAATRPGNDPLVWGEKEEEAFQSLKLALTQPPALALPSLDKPFQLFVEETSGAAKGVLTQALGPWKRPVAYLSKRLDPVAAGWPRCLRAIAAAALLTREASKLTFGQDIEITSSHNLESLLRSPPDKWLTNARITQYQVLLLDPPRVRFKQTAALNPATLLPETDDTLPIHHCLDTLDSLTSTRPDLTDQPLAQAEATLFTDGSSYIRDGKRYAGAAVVTLDSVIWAEPLPIGTSAQKAELIALTKALEWSKDKSVNIYTDSRYAFATLHVHGMIYRERGWLTAGGKAIKNAPEILALLTAVWLPKRVAVMHCKGHQKDDAPTSTGNRRADEVAREVAIRPLSTQATISAGKRTADGSEFEKRTADGSEFESPKKKAKVE

SEQ ID NO: 7055 - protein, 2087 aa, synthetic construct
MPAAKRVKLDGGDKKYSIGLDIGTNSVGWAVITDEYKVPSKKFKVLGNTDRHSIKKNLIGALLFDSGETAEATRLKRTARRRYTRRKNRICYLQEIFSNEMAKVDDSFFHRLEESFLVEEDKKHERHPIFGNIVDEVAYHEKYPTIYHLRKKLVDSTDKADLRLIYLALAHMIKFRGHFLIEGDLNPDNSDVDKLFIQLVQTYNQLFEENPINASGVDAKAILSARLSKSRRLENLIAQLPGEKKNGLFGNLIALSLGLTPNFKSNFDLAEDAKLQLSKDTYDDDLDNLLAQIGDQYADLFLAAKNLSDAILLSDILRVNTEITKAPLSASMIKRYDEHHQDLTLLKALVRQQLPEKYKEIFFDQSKNGYAGYIDGGASQEEFYKFIKPILEKMDGTEELLVKLNREDLLRKQRTFDNGSIPHQIHLGELHAILRRQEDFYPFLKDNREKIEKILTFRIPYYVGPLARGNSRFAWMTRKSEETITPWNFEEVVDKGASAQSFIERMTNFDKNLPNEKVLPKHSLLYEYFTVYNELTKVKYVTEGMRKPAFLSGEQKKAIVDLLFKTNRKVTVKQLKEDYFKKIECFDSVEISGVEDRFNASLGTYHDLLKIIKDKDFLDNEENEDILEDIVLTLTLFEDREMIEERLKTYAHLFDDKVMKQLKRRRYTGWGRLSRKLINGIRDKQSGKTILDFLKSDGFANRNFMQLIHDDSLTFKEDIQKAQVSGQGDSLHEHIANLAGSPAIKKGILQTVKVVDELVKVMGRHKPENIVIEMARENQTTQKGQKNSRERMKRIEEGIKELGSQILKEHPVENTQLQNEKLYLYYLQNGRDMYVDQELDINRLSDYDVDHIVPQSFLKDDSIDNKVLTRSDKARGKSDNVPSEEVVKKMKNYWRQLLNAKLITQRKFDNLTKAERGGLSELDKAGFIKRQLVETRQITKHVAQILDSRMNTKYDENDKLIREVKVITLKSKLVSDFRKDFQFYKVREINNYHHAHDAYLNAVVGTALIKKYPKLESEFVYGDYKVYDVRKMIAKSEQEIGKATAKYFFYSNIMNFFKTEITLANGEIRKRPLIETNGETGEIVWDKGRDFATVRKVLSMPQVNIVKKTEVQTGGFSKESILPKRNSDKLIARKKDWDPKKYGGFDSPTVAYSVLVVAKVEKGKSKKLKSVKELLGITIMERSSFEKNPIDFLEAKGYKEVKKDLIIKLPKYSLFELENGRKRMLASAGELQKGNELALPSKYVNFLYLASHYEKLKGSPEDNEQKQLFVEQHKHYLDEIIEQISEFSKRVILADANLDKVLSAYNKHRDKPIREQAENIIHLFTLTNLGAPAAFKYFDTTIDRKRYTSTKEVLDATLIHQSITGLYETRIDLSQLGGDGGGGSEAAAKGSSGGVPWILKKPLELTIKLDLEEQQGTLLNNSILSKKGKEELKQLFEKYSALWQSWENQVGHRRIRPHKIATGTVKPTPQKQYHINPKAKPDIQIVINDLLKQGVLIQKESTMNTPVYPVPKPNGRWRMVLDYRAVNKVTPLIAVQNQHSYGILGSLFKGRYKTTIDLSNGFWAHPIVPEDYWITAFTWQGKQYCWTVLPQGFLNSPGLFTGDVVDLLQGIPNVEVYVDDVYISHDSEKEHLEYLDILFNRLKEAGYIISLKKSNIANSIVDFLGFQITNEGRGLTDTFKEKLENITAPTTLKQLQSILGLLNFARNFIPDFTELIAPLYALIPKSTKNYVPWQIEHSTTLETLITKLNGAEYLQGRKGDKTLIMKVNASYTTGYIRYYNEGEKKPISYVSIVFSKTELKFTELEKLLTTVHKGLLKALDLSMGQNIHVYSPIVSMQNIQKTPQTAKKALASRWLSWLSYLEDPRIRFFYDPQMPALKDLPAVDTGKDNKKHPSNFQHIFYTDGSAITSPTKEGHLNAGMGIVYFINKDGNLQKQQEWSISLGNHTAQFAEIAAFEFALKKCLPLGGNILVVTDSNYVAKAYNEELDVWASNGFVNNRKKPLKHISKWKSVADLKRLRPDVVVTHEPGHQKLDSSPHAYGNNLADQLATQASFKVHAGKRTADGSEFEKRTADGSEFESPKKKAKVE

SEQ ID NO: 7056 - protein, 2176 aa, synthetic construct
MPAAKRVKLDGGDKKYSIGLDIGTNSVGWAVITDEYKVPSKKFKVLGNTDRHSIKKNLIGALLFDSGETAEATRLKRTARRRYTRRKNRICYLQEIFSNEMAKVDDSFFHRLEESFLVEEDKKHERHPIFGNIVDEVAYHEKYPTIYHLRKKLVDSTDKADLRLIYLALAHMIKFRGHFLIEGDLNPDNSDVDKLFIQLVQTYNQLFEENPINASGVDAKAILSARLSKSRRLENLIAQLPGEKKNGLFGNLIALSLGLTPNFKSNFDLAEDAKLQLSKDTYDDDLDNLLAQIGDQYADLFLAAKNLSDAILLSDILRVNTEITKAPLSASMIKRYDEHHQDLTLLKALVRQQLPEKYKEIFFDQSKNGYAGYIDGGASQEEFYKFIKPILEKMDGTEELLVKLNREDLLRKQRTFDNGSIPHQIHLGELHAILRRQEDFYPFLKDNREKIEKILTFRIPYYVGPLARGNSRFAWMTRKSEETITPWNFEEVVDKGASAQSFIERMTNFDKNLPNEKVLPKHSLLYEYFTVYNELTKVKYVTEGMRKPAFLSGEQKKAIVDLLFKTNRKVTVKQLKEDYFKKIECFDSVEISGVEDRFNASLGTYHDLLKIIKDKDFLDNEENEDILEDIVLTLTLFEDREMIEERLKTYAHLFDDKVMKQLKRRRYTGWGRLSRKLINGIRDKQSGKTILDFLKSDGFANRNFMQLIHDDSLTFKEDIQKAQVSGQGDSLHEHIANLAGSPAIKKGILQTVKVVDELVKVMGRHKPENIVIEMARENQTTQKGQKNSRERMKRIEEGIKELGSQILKEHPVENTQLQNEKLYLYYLQNGRDMYVDQELDINRLSDYDVDHIVPQSFLKDDSIDNKVLTRSDKARGKSDNVPSEEVVKKMKNYWRQLLNAKLITQRKFDNLTKAERGGLSELDKAGFIKRQLVETRQITKHVAQILDSRMNTKYDENDKLIREVKVITLKSKLVSDFRKDFQFYKVREINNYHHAHDAYLNAVVGTALIKKYPKLESEFVYGDYKVYDVRKMIAKSEQEIGKATAKYFFYSNIMNFFKTEITLANGEIRKRPLIETNGETGEIVWDKGRDFATVRKVLSMPQVNIVKKTEVQTGGFSKESILPKRNSDKLIARKKDWDPKKYGGFDSPTVAYSVLVVAKVEKGKSKKLKSVKELLGITIMERSSFEKNPIDFLEAKGYKEVKKDLIIKLPKYSLFELENGRKRMLASAGELQKGNELALPSKYVNFLYLASHYEKLKGSPEDNEQKQLFVEQHKHYLDEIIEQISEFSKRVILADANLDKVLSAYNKHRDKPIREQAENIIHLFTLTNLGAPAAFKYFDTTIDRKRYTSTKEVLDATLIHQSITGLYETRIDLSQLGGDGGGGSEAAAKGSSGGMNPLQLLQPLPAEIKGTKLLAHWNSGATITCIPESFLEDEQPIKKTLIKTIHGEKQQNVYYVTFKVKGRKVEAEVIASPYEYILLSPTDVPWLTQQPLQLTILVPLQEYQEKILSKTALPEDQKQQLKTLFVKYDNLWQHWENQVGHRKIRPHNIATGDYPPRPQKQYPINPKAKPSIQIVIDDLLKQGVLTPQNSTMNTPVYPVPKPDGRWRMVLDYREVNKTIPLTAAQNQHSAGILATIVRQKYKTTLDLANGFWAHPITPESYWLTAFTWQGKQYCWTRLPQGFLNSPALFNADVVDLLKEIPNVQVYVDDIYLSHDDPKEHVQQLEKVFQILLQAGYVVSLKKSEIGQKTVEFLGFNITKEGRGLTDTFKTKLLNITPPKDLKQLQSILGKLNFARNFIPNFAELVQPLYNLIAPAKGKYIEWSEENTKQLNMVIEALNTASNLEERLPEQRLVIKVNTSPSAGYVRYYNETGKKPIMYLNYVFSKAELKFSMLEKLLTTMHKALIKAMDLAMGQEILVYSPIVSMTKIQKTPLPERKALPIRWITWMTYLEDPRIQFHYDKTLPELKHIPDVYTSSQSPVKHPSQYEGVFYTDGSAIKSPDPTKSNNAGMGIVHATYKPEYQVLNQWSIPLGNHTAQMAEIAAVEFACKKALKIPGPVLVITDSFYVAESANKELPYWKSNGFVNNKKKPLKHISKWKSIAECLSMKPDITIQHEKGISLQIPVFILKGNALADKLATQGSYVVNAGKRTADGSEFEKRTADGSEFESPKKKAKVE

SEQ ID NO: 7057 - protein, 2218 aa, synthetic construct
MPAAKRVKLDGGDKKYSIGLDIGTNSVGWAVITDEYKVPSKKFKVLGNTDRHSIKKNLIGALLFDSGETAEATRLKRTARRRYTRRKNRICYLQEIFSNEMAKVDDSFFHRLEESFLVEEDKKHERHPIFGNIVDEVAYHEKYPTIYHLRKKLVDSTDKADLRLIYLALAHMIKFRGHFLIEGDLNPDNSDVDKLFIQLVQTYNQLFEENPINASGVDAKAILSARLSKSRRLENLIAQLPGEKKNGLFGNLIALSLGLTPNFKSNFDLAEDAKLQLSKDTYDDDLDNLLAQIGDQYADLFLAAKNLSDAILLSDILRVNTEITKAPLSASMIKRYDEHHQDLTLLKALVRQQLPEKYKEIFFDQSKNGYAGYIDGGASQEEFYKFIKPILEKMDGTEELLVKLNREDLLRKQRTFDNGSIPHQIHLGELHAILRRQEDFYPFLKDNREKIEKILTFRIPYYVGPLARGNSRFAWMTRKSEETITPWNFEEVVDKGASAQSFIERMTNFDKNLPNEKVLPKHSLLYEYFTVYNELTKVKYVTEGMRKPAFLSGEQKKAIVDLLFKTNRKVTVKQLKEDYFKKIECFDSVEISGVEDRFNASLGTYHDLLKIIKDKDFLDNEENEDILEDIVLTLTLFEDREMIEERLKTYAHLFDDKVMKQLKRRRYTGWGRLSRKLINGIRDKQSGKTILDFLKSDGFANRNFMQLIHDDSLTFKEDIQKAQVSGQGDSLHEHIANLAGSPAIKKGILQTVKVVDELVKVMGRHKPENIVIEMARENQTTQKGQKNSRERMKRIEEGIKELGSQILKEHPVENTQLQNEKLYLYYLQNGRDMYVDQELDINRLSDYDVDHIVPQSFLKDDSIDNKVLTRSDKARGKSDNVPSEEVVKKMKNYWRQLLNAKLITQRKFDNLTKAERGGLSELDKAGFIKRQLVETRQITKHVAQILDSRMNTKYDENDKLIREVKVITLKSKLVSDFRKDFQFYKVREINNYHHAHDAYLNAVVGTALIKKYPKLESEFVYGDYKVYDVRKMIAKSEQEIGKATAKYFFYSNIMNFFKTEITLANGEIRKRPLIETNGETGEIVWDKGRDFATVRKVLSMPQVNIVKKTEVQTGGFSKESILPKRNSDKLIARKKDWDPKKYGGFDSPTVAYSVLVVAKVEKGKSKKLKSVKELLGITIMERSSFEKNPIDFLEAKGYKEVKKDLIIKLPKYSLFELENGRKRMLASAGELQKGNELALPSKYVNFLYLASHYEKLKGSPEDNEQKQLFVEQHKHYLDEIIEQISEFSKRVILADANLDKVLSAYNKHRDKPIREQAENIIHLFTLTNLGAPAAFKYFDTTIDRKRYTSTKEVLDATLIHQSITGLYETRIDLSQLGGDGGGGSEAAAKGSSGGTLGDQGSRGSDPLPEPRVTLTVEGIPTEFLVNTGAEHSVLTKPMGKMGSKRTVVAGATGSKVYPWTTKRLLKIGQKQVTHSFLVIPECPAPLLGRDLLTKLKAQIQFSTEGPQVTWEDRPAMCLVLNLEEEYRLHEKPVPPSIDPSWLQLFPMVWAEKAGMGLANQVPPVVVELKSDASPVAVRQYPMSKEAREGIRPHIQRFLDLGILVPCQSPWNTPLLPVKKPGTNDYRPVQDLREVNKRVQDIHPTVPNPYNLLSSLPPSHTWYSVLDLKDAFFCLKLHPNSQPLFAFEWRDPEKGNTGQLTWTRLPQGFKNSPTLFDEALHRDLASFRALNPQVVMLQYVDDLLVAAPTYRDCKEGTRRLLQELSKLGYRVSAKKAQLCREEVTYLGYLLKGGKRWLTPARKATVMKIPTPTTPRQVREFLGTAGFCRLWIPGFASLAAPLYPLTREKVPFTWTEAHQEAFGRIKEALLSAPALALPDLTKPFALYVDEKEGVARGVLTQTLGPWRRPVAYLSKKLDPVASGWPTCLKAIAAVALLLKDADKLTLGQNVLVIAPHNLESIVRQPPDRWMTNARMTHYQSLLLNERVSFAPPAILNPATLLPVESDDTPIHICSEILAEETGTRPDLRDQPLPGVPAWYTDGSSFIMDGRRQAGAAIVDNKRTVWASNLPEGTSAQKAELIALTQALRLAEGKSINIYTDSRYAFATAHVHGAIYKQRGLLTSAGKDIKNKEEILALLEAIHLPKRVAIIHCPGHQRGTDPVATGNRKADEAAKQAAQSTRILTETTKNAGKRTADGSEFEKRTADGSEFESPKKKAKVE

SEQ ID NO: 7058 - protein, 2127 aa, synthetic construct
MPAAKRVKLDGGDKKYSIGLDIGTNSVGWAVITDEYKVPSKKFKVLGNTDRHSIKKNLIGALLFDSGETAEATRLKRTARRRYTRRKNRICYLQEIFSNEMAKVDDSFFHRLEESFLVEEDKKHERHPIFGNIVDEVAYHEKYPTIYHLRKKLVDSTDKADLRLIYLALAHMIKFRGHFLIEGDLNPDNSDVDKLFIQLVQTYNQLFEENPINASGVDAKAILSARLSKSRRLENLIAQLPGEKKNGLFGNLIALSLGLTPNFKSNFDLAEDAKLQLSKDTYDDDLDNLLAQIGDQYADLFLAAKNLSDAILLSDILRVNTEITKAPLSASMIKRYDEHHQDLTLLKALVRQQLPEKYKEIFFDQSKNGYAGYIDGGASQEEFYKFIKPILEKMDGTEELLVKLNREDLLRKQRTFDNGSIPHQIHLGELHAILRRQEDFYPFLKDNREKIEKILTFRIPYYVGPLARGNSRFAWMTRKSEETITPWNFEEVVDKGASAQSFIERMTNFDKNLPNEKVLPKHSLLYEYFTVYNELTKVKYVTEGMRKPAFLSGEQKKAIVDLLFKTNRKVTVKQLKEDYFKKIECFDSVEISGVEDRFNASLGTYHDLLKIIKDKDFLDNEENEDILEDIVLTLTLFEDREMIEERLKTYAHLFDDKVMKQLKRRRYTGWGRLSRKLINGIRDKQSGKTILDFLKSDGFANRNFMQLIHDDSLTFKEDIQKAQVSGQGDSLHEHIANLAGSPAIKKGILQTVKVVDELVKVMGRHKPENIVIEMARENQTTQKGQKNSRERMKRIEEGIKELGSQILKEHPVENTQLQNEKLYLYYLQNGRDMYVDQELDINRLSDYDVDHIVPQSFLKDDSIDNKVLTRSDKARGKSDNVPSEEVVKKMKNYWRQLLNAKLITQRKFDNLTKAERGGLSELDKAGFIKRQLVETRQITKHVAQILDSRMNTKYDENDKLIREVKVITLKSKLVSDFRKDFQFYKVREINNYHHAHDAYLNAVVGTALIKKYPKLESEFVYGDYKVYDVRKMIAKSEQEIGKATAKYFFYSNIMNFFKTEITLANGEIRKRPLIETNGETGEIVWDKGRDFATVRKVLSMPQVNIVKKTEVQTGGFSKESILPKRNSDKLIARKKDWDPKKYGGFDSPTVAYSVLVVAKVEKGKSKKLKSVKELLGITIMERSSFEKNPIDFLEAKGYKEVKKDLIIKLPKYSLFELENGRKRMLASAGELQKGNELALPSKYVNFLYLASHYEKLKGSPEDNEQKQLFVEQHKHYLDEIIEQISEFSKRVILADANLDKVLSAYNKHRDKPIREQAENIIHLFTLTNLGAPAAFKYFDTTIDRKRYTSTKEVLDATLIHQSITGLYETRIDLSQLGGDGGGGSEAAAKGSSGGLLGRDLLTKLKAQIQFSTEGPQVTWEDRPAMCLVLNLEEEYRLHEKPVPPSIDPSWLQLFPMVWAEKAGMGLANQVPPVVVELKSDASPVAVRQYPMSKEAREGIRPHIQRFLDLGILVPCQSPWNTPLLPVKKPGTNDYRPVQDLREVNKRVQDIHPTVPNPYNLLSSLPPSHTWYSVLDLKDAFFCLKLHPNSQPLFAFEWRDPEKGNTGQLTWTRLPQGFKNSPTLFNEALHRDLASFRALNPQVVMLQYVDDLLVAAPTYRDCKEGTRRLLQELSKLGYRVSAKKAQLCREEVTYLGYLLKGGKRWLTPARKATVMKIPTPTTPRQVREFLGTAGFCRLWIPGFASLAAPLYPLTRPKVPFTWTEAHQEAFGRIKEALLSAPALALPDLTKPFALYVDEKEGVARGVLTQTLGPWRRPVAYLSKKLDPVASGWPTCLKAIAAVALLLKDADKLTLGQNVLVIAPHNLESIVRQPPDRWMTNARMTHYQSLLLNERVSFAPPAILNPATLLPVESDDTPIHICSEILAEETGTRPDLRDQPLPGVPAWYTDGSSFIMDGRRQAGAAIVDNKRTVWASNLPEGTSAQKAELIALTQALRLAEGKSINIYTDSRYAFATAHVHGAIYKQRGWLTSAGKDIKNKEEILALLEAIHLPKRVAIIHCPGHQRGTDPVATGNRKADEAAKQAAQSTRILTETTKNAGKRTADGSEFEKRTADGSEFESPKKKAKVE

SEQ ID NO: 7059 - protein, 2096 aa, synthetic construct
MPAAKRVKLDGGDKKYSIGLDIGTNSVGWAVITDEYKVPSKKFKVLGNTDRHSIKKNLIGALLFDSGETAEATRLKRTARRRYTRRKNRICYLQEIFSNEMAKVDDSFFHRLEESFLVEEDKKHERHPIFGNIVDEVAYHEKYPTIYHLRKKLVDSTDKADLRLIYLALAHMIKFRGHFLIEGDLNPDNSDVDKLFIQLVQTYNQLFEENPINASGVDAKAILSARLSKSRRLENLIAQLPGEKKNGLFGNLIALSLGLTPNFKSNFDLAEDAKLQLSKDTYDDDLDNLLAQIGDQYADLFLAAKNLSDAILLSDILRVNTEITKAPLSASMIKRYDEHHQDLTLLKALVRQQLPEKYKEIFFDQSKNGYAGYIDGGASQEEFYKFIKPILEKMDGTEELLVKLNREDLLRKQRTFDNGSIPHQIHLGELHAILRRQEDFYPFLKDNREKIEKILTFRIPYYVGPLARGNSRFAWMTRKSEETITPWNFEEVVDKGASAQSFIERMTNFDKNLPNEKVLPKHSLLYEYFTVYNELTKVKYVTEGMRKPAFLSGEQKKAIVDLLFKTNRKVTVKQLKEDYFKKIECFDSVEISGVEDRFNASLGTYHDLLKIIKDKDFLDNEENEDILEDIVLTLTLFEDREMIEERLKTYAHLFDDKVMKQLKRRRYTGWGRLSRKLINGIRDKQSGKTILDFLKSDGFANRNFMQLIHDDSLTFKEDIQKAQVSGQGDSLHEHIANLAGSPAIKKGILQTVKVVDELVKVMGRHKPENIVIEMARENQTTQKGQKNSRERMKRIEEGIKELGSQILKEHPVENTQLQNEKLYLYYLQNGRDMYVDQELDINRLSDYDVDHIVPQSFLKDDSIDNKVLTRSDKARGKSDNVPSEEVVKKMKNYWRQLLNAKLITQRKFDNLTKAERGGLSELDKAGFIKRQLVETRQITKHVAQILDSRMNTKYDENDKLIREVKVITLKSKLVSDFRKDFQFYKVREINNYHHAHDAYLNAVVGTALIKKYPKLESEFVYGDYKVYDVRKMIAKSEQEIGKATAKYFFYSNIMNFFKTEITLANGEIRKRPLIETNGETGEIVWDKGRDFATVRKVLSMPQVNIVKKTEVQTGGFSKESILPKRNSDKLIARKKDWDPKKYGGFDSPTVAYSVLVVAKVEKGKSKKLKSVKELLGITIMERSSFEKNPIDFLEAKGYKEVKKDLIIKLPKYSLFELENGRKRMLASAGELQKGNELALPSKYVNFLYLASHYEKLKGSPEDNEQKQLFVEQHKHYLDEIIEQISEFSKRVILADANLDKVLSAYNKHRDKPIREQAENIIHLFTLTNLGAPAAFKYFDTTIDRKRYTSTKEVLDATLIHQSITGLYETRIDLSQLGGDGGGGSEAAAKGSSGGTLGIEDEYRLHETSTEPDVSLGSTWLSDFPQAWAETGGMGLAVRQAPLIIPLKATSTPVSIQQYPMSHEARLGIKPHIQRLLDQGILVPCQSPWNTPLLPVKKPGTNDYRPVQDLREVNKRVEDIHPTVPNPYNLLSGLPPSHQWYTVLDLKDAFFCLRLHPTSQPLFAFEWRDPGMGISGQLTWTRLPQGFKNSPTLFDEALHRDLADFRIQHPDLILLQYVDDILLAATSELDCQQGTRALLQTLGDLGYRASAKKAQICQKQVKYLGYLLREGQRWLTEARKETVMGQPVPKTPRQLREFLGTAGFCRLWIPGFAEMAAPLYPLTKTGTLFSWGPDQQKAYQEIKQALLTAPALGLPDLTKPFELFVDEKQGYAKGVLTQKLGPWRRPVAYLSKKLDPVAAGWPPCLRMVAAIAVLTKDAGKLTMGQPLVILAPHAVEALVKQPPDRWLSNARMTHYQAMLLDTDRVQFGPVVALNPATLLPLPEEGAPHDCLEILAETHGTRPDLTDQPIPDADHTWYTDGSSFLQEGQRKAGAAVTTETEVIWAGALPAGTSAQRAELIALTQALKMAEGKRLNVYTDSRYAFATAHIHGEIYRRRGLLTSEGREIKNKSEILALLKALFLPKRLSIIHCLGHQKGDSAEARGNRLADQAAREAAIKTPPDTSTLLAGKRTADGSEFEKRTADGSEFESPKKKAKVE

SEQ ID NO: 7060 - protein, 2096 aa, synthetic construct
MPAAKRVKLDGGDKKYSIGLDIGTNSVGWAVITDEYKVPSKKFKVLGNTDRHSIKKNLIGALLFDSGETAEATRLKRTARRRYTRRKNRICYLQEIFSNEMAKVDDSFFHRLEESFLVEEDKKHERHPIFGNIVDEVAYHEKYPTIYHLRKKLVDSTDKADLRLIYLALAHMIKFRGHFLIEGDLNPDNSDVDKLFIQLVQTYNQLFEENPINASGVDAKAILSARLSKSRRLENLIAQLPGEKKNGLFGNLIALSLGLTPNFKSNFDLAEDAKLQLSKDTYDDDLDNLLAQIGDQYADLFLAAKNLSDAILLSDILRVNTEITKAPLSASMIKRYDEHHQDLTLLKALVRQQLPEKYKEIFFDQSKNGYAGYIDGGASQEEFYKFIKPILEKMDGTEELLVKLNREDLLRKQRTFDNGSIPHQIHLGELHAILRRQEDFYPFLKDNREKIEKILTFRIPYYVGPLARGNSRFAWMTRKSEETITPWNFEEVVDKGASAQSFIERMTNFDKNLPNEKVLPKHSLLYEYFTVYNELTKVKYVTEGMRKPAFLSGEQKKAIVDLLFKTNRKVTVKQLKEDYFKKIECFDSVEISGVEDRFNASLGTYHDLLKIIKDKDFLDNEENEDILEDIVLTLTLFEDREMIEERLKTYAHLFDDKVMKQLKRRRYTGWGRLSRKLINGIRDKQSGKTILDFLKSDGFANRNFMQLIHDDSLTFKEDIQKAQVSGQGDSLHEHIANLAGSPAIKKGILQTVKVVDELVKVMGRHKPENIVIEMARENQTTQKGQKNSRERMKRIEEGIKELGSQILKEHPVENTQLQNEKLYLYYLQNGRDMYVDQELDINRLSDYDVDHIVPQSFLKDDSIDNKVLTRSDKARGKSDNVPSEEVVKKMKNYWRQLLNAKLITQRKFDNLTKAERGGLSELDKAGFIKRQLVETRQITKHVAQILDSRMNTKYDENDKLIREVKVITLKSKLVSDFRKDFQFYKVREINNYHHAHDAYLNAVVGTALIKKYPKLESEFVYGDYKVYDVRKMIAKSEQEIGKATAKYFFYSNIMNFFKTEITLANGEIRKRPLIETNGETGEIVWDKGRDFATVRKVLSMPQVNIVKKTEVQTGGFSKESILPKRNSDKLIARKKDWDPKKYGGFDSPTVAYSVLVVAKVEKGKSKKLKSVKELLGITIMERSSFEKNPIDFLEAKGYKEVKKDLIIKLPKYSLFELENGRKRMLASAGELQKGNELALPSKYVNFLYLASHYEKLKGSPEDNEQKQLFVEQHKHYLDEIIEQISEFSKRVILADANLDKVLSAYNKHRDKPIREQAENIIHLFTLTNLGAPAAFKYFDTTIDRKRYTSTKEVLDATLIHQSITGLYETRIDLSQLGGDGGGGSEAAAKGSSGGTLNIEDEYRLHETSKGPDVPLGSTWLSDFPQAWAETGGMGLAVRQAPLIIPLKATSTPVSIKQYPMSQEARLGIKPHIQRLLDQGILVPCQSPWNTPLLPVKKPGTNDYRPVQDLREVNKRVEDIHPTVPNPYNLLSGLPPSHQWYTVLDLKDAFFCLRLHPTSQSLFAFEWRDPEMGISGQLTWTRLPQGFKNSPTLFNEALHRDLADFRIQHPDLILLQYVDDLLLAATSELDCQQGTRALLQTLGDLGYRASAKKAQICQKQVKYLGYLLKEGQRWLTEARKETVMGQPTPKTPRQLREFLGTAGFCRLWIPGFAEMAAPLYPLTKPGTLFEWGPDQQKAYQEIKQALLTAPALGLPDLTKPFELFVDEKQGYAKGVLTQKLGPWRRPVAYLSKKLDPVAAGWPPCLRMVAAIAVLTKDAGKLTMGQPLVILAPHAVEALVKQPPDRWLSNARMTHYQALLLDTDRVQFGPIVALNPATLLPLPEEGLQHDCLDILAEAHGTRPDLTDQPLPDADHTWYTDGSSFLQEGQRKAGAAVTTETEVVWAKALPAGTSAQRAELIALTQALKMAEGKKLNVYTDSRYAFATAHIHGEIYRRRGWLTSEGKEIKNKDEILALLKALFLPKRLSIIHCPGHQKGNRAEARGNRMADQAAREVATRETPETSTLLAGKRTADGSEFEKRTADGSEFESPKKKAKVE

SEQ ID NO: 7061 - protein, 2116 aa, synthetic construct
MPAAKRVKLDGGDKKYSIGLDIGTNSVGWAVITDEYKVPSKKFKVLGNTDRHSIKKNLIGALLFDSGETAEATRLKRTARRRYTRRKNRICYLQEIFSNEMAKVDDSFFHRLEESFLVEEDKKHERHPIFGNIVDEVAYHEKYPTIYHLRKKLVDSTDKADLRLIYLALAHMIKFRGHFLIEGDLNPDNSDVDKLFIQLVQTYNQLFEENPINASGVDAKAILSARLSKSRRLENLIAQLPGEKKNGLFGNLIALSLGLTPNFKSNFDLAEDAKLQLSKDTYDDDLDNLLAQIGDQYADLFLAAKNLSDAILLSDILRVNTEITKAPLSASMIKRYDEHHQDLTLLKALVRQQLPEKYKEIFFDQSKNGYAGYIDGGASQEEFYKFIKPILEKMDGTEELLVKLNREDLLRKQRTFDNGSIPHQIHLGELHAILRRQEDFYPFLKDNREKIEKILTFRIPYYVGPLARGNSRFAWMTRKSEETITPWNFEEVVDKGASAQSFIERMTNFDKNLPNEKVLPKHSLLYEYFTVYNELTKVKYVTEGMRKPAFLSGEQKKAIVDLLFKTNRKVTVKQLKEDYFKKIECFDSVEISGVEDRFNASLGTYHDLLKIIKDKDFLDNEENEDILEDIVLTLTLFEDREMIEERLKTYAHLFDDKVMKQLKRRRYTGWGRLSRKLINGIRDKQSGKTILDFLKSDGFANRNFMQLIHDDSLTFKEDIQKAQVSGQGDSLHEHIANLAGSPAIKKGILQTVKVVDELVKVMGRHKPENIVIEMARENQTTQKGQKNSRERMKRIEEGIKELGSQILKEHPVENTQLQNEKLYLYYLQNGRDMYVDQELDINRLSDYDVDHIVPQSFLKDDSIDNKVLTRSDKARGKSDNVPSEEVVKKMKNYWRQLLNAKLITQRKFDNLTKAERGGLSELDKAGFIKRQLVETRQITKHVAQILDSRMNTKYDENDKLIREVKVITLKSKLVSDFRKDFQFYKVREINNYHHAHDAYLNAVVGTALIKKYPKLESEFVYGDYKVYDVRKMIAKSEQEIGKATAKYFFYSNIMNFFKTEITLANGEIRKRPLIETNGETGEIVWDKGRDFATVRKVLSMPQVNIVKKTEVQTGGFSKESILPKRNSDKLIARKKDWDPKKYGGFDSPTVAYSVLVVAKVEKGKSKKLKSVKELLGITIMERSSFEKNPIDFLEAKGYKEVKKDLIIKLPKYSLFELENGRKRMLASAGELQKGNELALPSKYVNFLYLASHYEKLKGSPEDNEQKQLFVEQHKHYLDEIIEQISEFSKRVILADANLDKVLSAYNKHRDKPIREQAENIIHLFTLTNLGAPAAFKYFDTTIDRKRYTSTKEVLDATLIHQSITGLYETRIDLSQLGGDGGGGSEAAAKGSSGGWVQEISDSRPMLHIYLNGRRFLGLLNTGADKTCIAGRDWPANWPIHQTESSLQGLGMACGVARSSQPLRWQHEDKSGIIHPFVIPTLPFTLWGRDIMKDIKVRLMTDSPDDSQDLMIGAIESNLFADQISWKSDQPVWLNQWPLKQEKLQALQQLVTEQLQLGHLEESNSPWNTPVFVIKKKSGKWRLLQDLRAVNATMHDMGALQPGLPSPVAVPKGWEIIIIDLQDCFFNIKLHPEDCKRFAFSVPSPNFKRPYQRFQWKVLPQGMKNSPTLCQKFVDKAILTVRDKYQDSYIVHYMDDILLAHPSRSIVDEILTSMIQALNKHGLVVSTEKIQKYDNLKYLGTHIQGDSVSYQKLQIRTDKLRTLNDFQKLLGNINWIRPFLKLTTGELKPLFEILNGDSNPISTRKLTPEACKALQLMNERLSTARVKRLDLSQPWSLCILKTEYTPTACLWQDGVVEWIHLPHISPKVITPYDIFCTQLIIKGRHRSKELFSKDPDYIVVPYTKVQFDLLLQEKEDWPISLLGFLGEVHFHLPKDPLLTFTLQTAIIFPHMTSTTPLEKGIVIFTDGSANGRSVTYIQGREPIIKENTQNTAQQAEIVAVITAFEEVSQPFNLYTDSKYVTGLFPEIETATLSPRTKIYTELKHLQRLIHKRQEKFYIGHIRGHTGLPGPLAQGNAYADSLTRILTAGKRTADGSEFEKRTADGSEFESPKKKAKVE

SEQ ID NO: 7062 - protein, 2090 aa, synthetic construct
MPAAKRVKLDGGDKKYSIGLDIGTNSVGWAVITDEYKVPSKKFKVLGNTDRHSIKKNLIGALLFDSGETAEATRLKRTARRRYTRRKNRICYLQEIFSNEMAKVDDSFFHRLEESFLVEEDKKHERHPIFGNIVDEVAYHEKYPTIYHLRKKLVDSTDKADLRLIYLALAHMIKFRGHFLIEGDLNPDNSDVDKLFIQLVQTYNQLFEENPINASGVDAKAILSARLSKSRRLENLIAQLPGEKKNGLFGNLIALSLGLTPNFKSNFDLAEDAKLQLSKDTYDDDLDNLLAQIGDQYADLFLAAKNLSDAILLSDILRVNTEITKAPLSASMIKRYDEHHQDLTLLKALVRQQLPEKYKEIFFDQSKNGYAGYIDGGASQEEFYKFIKPILEKMDGTEELLVKLNREDLLRKQRTFDNGSIPHQIHLGELHAILRRQEDFYPFLKDNREKIEKILTFRIPYYVGPLARGNSRFAWMTRKSEETITPWNFEEVVDKGASAQSFIERMTNFDKNLPNEKVLPKHSLLYEYFTVYNELTKVKYVTEGMRKPAFLSGEQKKAIVDLLFKTNRKVTVKQLKEDYFKKIECFDSVEISGVEDRFNASLGTYHDLLKIIKDKDFLDNEENEDILEDIVLTLTLFEDREMIEERLKTYAHLFDDKVMKQLKRRRYTGWGRLSRKLINGIRDKQSGKTILDFLKSDGFANRNFMQLIHDDSLTFKEDIQKAQVSGQGDSLHEHIANLAGSPAIKKGILQTVKVVDELVKVMGRHKPENIVIEMARENQTTQKGQKNSRERMKRIEEGIKELGSQILKEHPVENTQLQNEKLYLYYLQNGRDMYVDQELDINRLSDYDVDHIVPQSFLKDDSIDNKVLTRSDKARGKSDNVPSEEVVKKMKNYWRQLLNAKLITQRKFDNLTKAERGGLSELDKAGFIKRQLVETRQITKHVAQILDSRMNTKYDENDKLIREVKVITLKSKLVSDFRKDFQFYKVREINNYHHAHDAYLNAVVGTALIKKYPKLESEFVYGDYKVYDVRKMIAKSEQEIGKATAKYFFYSNIMNFFKTEITLANGEIRKRPLIETNGETGEIVWDKGRDFATVRKVLSMPQVNIVKKTEVQTGGFSKESILPKRNSDKLIARKKDWDPKKYGGFDSPTVAYSVLVVAKVEKGKSKKLKSVKELLGITIMERSSFEKNPIDFLEAKGYKEVKKDLIIKLPKYSLFELENGRKRMLASAGELQKGNELALPSKYVNFLYLASHYEKLKGSPEDNEQKQLFVEQHKHYLDEIIEQISEFSKRVILADANLDKVLSAYNKHRDKPIREQAENIIHLFTLTNLGAPAAFKYFDTTIDRKRYTSTKEVLDATLIHQSITGLYETRIDLSQLGGDGGGGSEAAAKGSSGGTLQLDDEYRLYSPLVKPDQNIQFWLEQFPQAWAETAGMGLAKQVPPQVIQLKASATPVSVRQYPLSKEAQEGIRPHVQRLIQQGILVPVQSPWNTPLLPVRKPGTNDYRPVQDLREVNKRVQDIHPTVPNPYNLLCALPPQRSWYTVLDLKDAFFCLRLHPTSQPLFAFEWRDPGTGRTGQLTWTRLPQGFKNSPTIFDEALHRDLANFRIQHPQVTLLQYVDDLLLAGATKQDCLEGTKALLLELSDLGYRASAKKAQICRREVTYLGYSLRDGQRWLTEARKKTVVQIPAPTTAKQVREFLGTAGFCRLWIPGFATLAAPLYPLTKEKGEFSWAPEHQKAFDAIKKALLSAPALALPDVTKPFTLYVDERKGVARGVLTQTLGPWRRPVAYLSKKLDPVASGWPVCLKAIAAVAILVKDADKLTLGQNITVIAPHALENIVRQPPDRWMTNARMTHYQSLLLTERVTFAPPAALNPATLLPEETDEPVTHDCHQLLIEETGVRKDLTDIPLTGEVLTWFTDGSSYVVEGKRMAGAAVVDGTRTIWASSLPEGTSAQKAELMALTQALRLAEGKSINIYTDSRYAFATAHVHGAIYKQRGLLTSAGREIKNKEEILSLLEALHLPKRLAIIHCPGHQKAKDPISRGNQMADRVAKQAAQGVNLLAGKRTADGSEFEKRTADGSEFESPKKKAKVE

SEQ ID NO: 7063 - protein, 2090 aa, synthetic construct; identical to SEQ ID NO: 7062

SEQ ID NO: 7064 - protein, 2094 aa, synthetic construct
MPAAKRVKLDGGDKKYSIGLDIGTNSVGWAVITDEYKVPSKKFKVLGNTDRHSIKKNLIGALLFDSGETAEATRLKRTARRRYTRRKNRICYLQEIFSNEMAKVDDSFFHRLEESFLVEEDKKHERHPIFGNIVDEVAYHEKYPTIYHLRKKLVDSTDKADLRLIYLALAHMIKFRGHFLIEGDLNPDNSDVDKLFIQLVQTYNQLFEENPINASGVDAKAILSARLSKSRRLENLIAQLPGEKKNGLFGNLIALSLGLTPNFKSNFDLAEDAKLQLSKDTYDDDLDNLLAQIGDQYADLFLAAKNLSDAILLSDILRVNTEITKAPLSASMIKRYDEHHQDLTLLKALVRQQLPEKYKEIFFDQSKNGYAGYIDGGASQEEFYKFIKPILEKMDGTEELLVKLNREDLLRKQRTFDNGSIPHQIHLGELHAILRRQEDFYPFLKDNREKIEKILTFRIPYYVGPLARGNSRFAWMTRKSEETITPWNFEEVVDKGASAQSFIERMTNFDKNLPNEKVLPKHSLLYEYFTVYNELTKVKYVTEGMRKPAFLSGEQKKAIVDLLFKTNRKVTVKQLKEDYFKKIECFDSVEISGVEDRFNASLGTYHDLLKIIKDKDFLDNEENEDILEDIVLTLTLFEDREMIEERLKTYAHLFDDKVMKQLKRRRYTGWGRLSRKLINGIRDKQSGKTILDFLKSDGFANRNFMQLIHDDSLTFKEDIQKAQVSGQGDSLHEHIANLAGSPAIKKGILQTVKVVDELVKVMGRHKPENIVIEMARENQTTQKGQKNSRERMKRIEEGIKELGSQILKEHPVENTQLQNEKLYLYYLQNGRDMYVDQELDINRLSDYDVDHIVPQSFLKDDSIDNKVLTRSDKARGKSDNVPSEEVVKKMKNYWRQLLNAKLITQRKFDNLTKAERGGLSELDKAGFIKRQLVETRQITKHVAQILDSRMNTKYDENDKLIREVKVITLKSKLVSDFRKDFQFYKVREINNYHHAHDAYLNAVVGTALIKKYPKLESEFVYGDYKVYDVRKMIAKSEQEIGKATAKYFFYSNIMNFFKTEITLANGEIRKRPLIETNGETGEIVWDKGRDFATVRKVLSMPQVNIVKKTEVQTGGFSKESILPKRNSDKLIARKKDWDPKKYGGFDSPTVAYSVLVVAKVEKGKSKKLKSVKELLGITIMERSSFEKNPIDFLEAKGYKEVKKDLIIKLPKYSLFELENGRKRMLASAGELQKGNELALPSKYVNFLYLASHYEKLKGSPEDNEQKQLFVEQHKHYLDEIIEQISEFSKRVILADANLDKVLSAYNKHRDKPIREQAENIIHLFTLTNLGAPAAFKYFDTTIDRKRYTSTKEVLDATLIHQSITGLYETRIDLSQLGGDGGGGSEAAAKGSSGGVLNLEEEYRLHEKPVPSSIDPSWLQLFPTVWAERAGMGLANQVPPVVVELRSGASPVAVRQYPMSKEAREGIRPHIQRFLDLGVLVPCQSPWNTPLLPVKKPGTNDYRPVQDLREINKRVQDIHPTVPNPYNLLSSLPPSHTWYSVLDLKDAFFCLKLHPNSQPLFAFEWRDPEKGNTGQLTWTRLPQGFKNSPTLFNEALHRDLAPFRALNPQVVLLQYVDDLLVAAPTYRDCKEGTQKLLQELSKLGYRVSAKKAQLCQKEVTYLGYLLKEGKRWLTPARKATVMKIPPPTTPRQVREFLGTAGFCRLWIPGFASLAAPLYPLTKPSIPFIWTEEHQKAFDRIKEALLSAPALALPDLTKPFTLYVDERAGVARGVLTQTLGPWRRPVAYLSKKLDPVASGWPTCLKAVAAVALLLKDADKLTLGQNVTVIASHSLESIVRQPPDRWMTNARMTHYQSLLLNERVSFAPPAVLNPATLLPVESEATPVHRCSEILAEETGTRRDLKDQPLPGVPAWYTDGSSFIAEGKRRAGAAIVDGKRTVWASSLPEGTSAQKAELVALTQALRLAEGKDINIYTDSRYAFATAHIHGAIYKQRGWLTSAGKDIKNKEEILALLEAIHLPKRVAIIHCPGHQKGNDPVATGNRRADEAAKQAALSTRVLAETTKPAGKRTADGSEFEKRTADGSEFESPKKKAKVE

SEQ ID NO: 7065 - protein, 2094 aa, synthetic construct
MPAAKRVKLDGGDKKYSIGLDIGTNSVGWAVITDEYKVPSKKFKVLGNTDRHSIKKNLIGALLFDSGETAEATRLKRTARRRYTRRKNRICYLQEIFSNEMAKVDDSFFHRLEESFLVEEDKKHERHPIFGNIVDEVAYHEKYPTIYHLRKKLVDSTDKADLRLIYLALAHMIKFRGHFLIEGDLNPDNSDVDKLFIQLVQTYNQLFEENPINASGVDAKAILSARLSKSRRLENLIAQLPGEKKNGLFGNLIALSLGLTPNFKSNFDLAEDAKLQLSKDTYDDDLDNLLAQIGDQYADLFLAAKNLSDAILLSDILRVNTEITKAPLSASMIKRYDEHHQDLTLLKALVRQQLPEKYKEIFFDQSKNGYAGYIDGGASQEEFYKFIKPILEKMDGTEELLVKLNREDLLRKQRTFDNGSIPHQIHLGELHAILRRQEDFYPFLKDNREKIEKILTFRIPYYVGPLARGNSRFAWMTRKSEETITPWNFEEVVDKGASAQSFIERMTNFDKNLPNEKVLPKHSLLYEYFTVYNELTKVKYVTEGMRKPAFLSGEQKKAIVDLLFKTNRKVTVKQLKEDYFKKIECFDSVEISGVEDRFNASLGTYHDLLKIIKDKDFLDNEENEDILEDIVLTLTLFEDREMIEERLKTYAHLFDDKVMKQLKRRRYTGWGRLSRKLINGIRDKQSGKTILDFLKSDGFANRNFMQLIHDDSLTFKEDIQKAQVSGQGDSLHEHIANLAGSPAIKKGILQTVKVVDELVKVMGRHKPENIVIEMARENQTTQKGQKNSRERMKRIEEGIKELGSQILKEHPVENTQLQNEKLYLYYLQNGRDMYVDQELDINRLSDYDVDHIVPQSFLKDDSIDNKVLTRSDKARGKSDNVPSEEVVKKMKNYWRQLLNAKLITQRKFDNLTKAERGGLSELDKAGFIKRQLVETRQITKHVAQILDSRMNTKYDENDKLIREVKVITLKSKLVSDFRKDFQFYKVREINNYHHAHDAYLNAVVGTALIKKYPKLESEFVYGDYKVYDVRKMIAKSEQEIGKATAKYFFYSNIMNFFKTEITLANGEIRKRPLIETNGETGEIVWDKGRDFATVRKVLSMPQVNIVKKTEVQTGGFSKESILPKRNSDKLIARKKDWDPKKYGGFDSPTVAYSVLVVAKVEKGKSKKLKSVKELLGITIMERSSFEKNPIDFLEAKGYKEVKKDLIIKLPKYSLFELENGRKRMLASAGELQKGNELALPSKYVNFLYLASHYEKLKGSPEDNEQKQLFVEQHKHYLDEIIEQISEFSKRVILADANLDKVLSAYNKHRDKPIREQAENIIHLFTLTNLGAPAAFKYFDTTIDRKRYTSTKEVLDATLIHQSITGLYETRIDLSQLGGDGGGGSEAAAKGSSGGVLNLEEEYRLHEKPVPSSIDPSWLQLFPTVWAERAGMGLANQVPPVVVELRSGASPVAVRQYPMSKEAREGIRPHIQRFLDLGVLVPCQSPWNTPLLPVKKPGTNDYRPVQDLREINKRVQDIHPTVPNPYNLLSSLPPSHTWYSVLDLKDAFFCLKLHPNSQPLFAFEWRDPEKGNTGQLTWTRLPQGFKNSPTLFNEALHRDLAPFRALNPQVVLLQYVDDLLVAAPTYRDCKEGTQKLLQELSKLGYRVSAKKAQLCQKEVTYLGYLLKEGKRWLTPARKATVMKIPPPTTPRQVREFLGKAGFCRLFIPGFASLAAPLYPLTKPSIPFIWTEEHQKAFDRIKEALLSAPALALPDLTKPFTLYVDERAGVARGVLTQTLGPWRRPVAYLSKKLDPVASGWPTCLKAVAAVALLLKDADKLTLGQNVTVIASHSLESIVRQPPDRWMTNARMTHYQSLLLNERVSFAPPAVLNPATLLPVESEATPVHRCSEILAEETGTRRDLKDQPLPGVPAWYTDGSSFIAEGKRRAGAAIVDGKRTVWASSLPEGTSAQKAELVALTQALRLAEGKDINIYTDSRYAFATAHIHGAIYKQRGWLTSAGKDIKNKEEILALLEAIHLPKRVAIIHCPGHQKGNDPVATGNRRADEAAKQAALSTRVLAETTKPAGKRTADGSEFEKRTADGSEFESPKKKAKVE

SEQ ID NO: 7066 - protein, 2096 aa, synthetic construct
MPAAKRVKLDGGDKKYSIGLDIGTNSVGWAVITDEYKVPSKKFKVLGNTDRHSIKKNLIGALLFDSGETAEATRLKRTARRRYTRRKNRICYLQEIFSNEMAKVDDSFFHRLEESFLVEEDKKHERHPIFGNIVDEVAYHEKYPTIYHLRKKLVDSTDKADLRLIYLALAHMIKFRGHFLIEGDLNPDNSDVDKLFIQLVQTYNQLFEENPINASGVDAKAILSARLSKSRRLENLIAQLPGEKKNGLFGNLIALSLGLTPNFKSNFDLAEDAKLQLSKDTYDDDLDNLLAQIGDQYADLFLAAKNLSDAILLSDILRVNTEITKAPLSASMIKRYDEHHQDLTLLKALVRQQLPEKYKEIFFDQSKNGYAGYIDGGASQEEFYKFIKPILEKMDGTEELLVKLNREDLLRKQRTFDNGSIPHQIHLGELHAILRRQEDFYPFLKDNREKIEKILTFRIPYYVGPLARGNSRFAWMTRKSEETITPWNFEEVVDKGASAQSFIERMTNFDKNLPNEKVLPKHSLLYEYFTVYNELTKVKYVTEGMRKPAFLSGEQKKAIVDLLFKTNRKVTVKQLKEDYFKKIECFDSVEISGVEDRFNASLGTYHDLLKIIKDKDFLDNEENEDILEDIVLTLTLFEDREMIEERLKTYAHLFDDKVMKQLKRRRYTGWGRLSRKLINGIRDKQSGKTILDFLKSDGFANRNFMQLIHDDSLTFKEDIQKAQVSGQGDSLHEHIANLAGSPAIKKGILQTVKVVDELVKVMGRHKPENIVIEMARENQTTQKGQKNSRERMKRIEEGIKELGSQILKEHPVENTQLQNEKLYLYYLQNGRDMYVDQELDINRLSDYDVDHIVPQSFLKDDSIDNKVLTRSDKARGKSDNVPSEEVVKKMKNYWRQLLNAKLITQRKFDNLTKAERGGLSELDKAGFIKRQLVETRQITKHVAQILDSRMNTKYDENDKLIREVKVITLKSKLVSDFRKDFQFYKVREINNYHHAHDAYLNAVVGTALIKKYPKLESEFVYGDYKVYDVRKMIAKSEQEIGKATAKYFFYSNIMNFFKTEITLANGEIRKRPLIETNGETGEIVWDKGRDFATVRKVLSMPQVNIVKKTEVQTGGFSKESILPKRNSDKLIARKKDWDPKKYGGFDSPTVAYSVLVVAKVEKGKSKKLKSVKELLGITIMERSSFEKNPIDFLEAKGYKEVKKDLIIKLPKYSLFELENGRKRMLASAGELQKGNELALPSKYVNFLYLASHYEKLKGSPEDNEQKQLFVEQHKHYLDEIIEQISEFSKRVILADANLDKVLSAYNKHRDKPIREQAENIIHLFTLTNLGAPAAFKYFDTTIDRKRYTSTKEVLDATLIHQSITGLYETRIDLSQLGGDGGGGSEAAAKGSSGGTLNIEDEYRLHETSKEPDVPLGSTWLSDFPQAWAETGGMGLAVRQAPLIIPLKATSTPVSIKQYPMSQEARLGIKPHIQRLLDQGILVPCQSPWNTPLLPVKKPGTNDYRPVQDLREVNKRVEDIHPTVPNPYNLLSGLPPSHQWYTVLDLKDAFFCLRLHPTSQPLFAFEWRDPEMGISGQLTWTRLPQGFKNSPTLFNEALHRDLADFRIQHPDLILLQYVDDLLLAATSEQDCQRGTRALLQTLGNLGYRASAKKAQICQKQVKYLGYLLKEGQRWLTEARKETVMGQPTPKTPRQLREFLGTAGFCRLWIPGFAEMAAPLYPLTKPGTLFNWGPDQQKAYQEIKQALLTAPALGLPDLTKPFELFVDEKQGYAKGVLTQKLGPWRRPVAYLSKKLDPVAAGWPPCLRMVAAIAVLTKDAGKLTMGQPLVILAPHAVEALVKQPPDRWLSNARMTHYQAMLLDTDRVQFGPVVALNPATLLPLPEKEAPHDCLEILAETHGTRPDLTDQPIPDADYTWYTDGSSFLQEGQRRAGAAVTTETEVIWARALPAGTSAQRAELIALTQALKMAEGKKLNVYTDSRYAFATAHVHGEIYRRRGWLTSEGREIKNKNEILALLKALFLPKRLSIIHCPGHQKGNSAEARGNRMADQAAREAAMKAVLETSTLLAGKRTADGSEFEKRTADGSEFESPKKKAKVE

SEQ ID NO: 7067 - protein, 2096 aa, synthetic construct; identical to SEQ ID NO: 4522

SEQ ID NO: 7068 - protein, 2098 aa, synthetic construct
MPAAKRVKLDGGDKKYSIGLDIGTNSVGWAVITDEYKVPSKKFKVLGNTDRHSIKKNLIGALLFDSGETAEATRLKRTARRRYTRRKNRICYLQEIFSNEMAKVDDSFFHRLEESFLVEEDKKHERHPIFGNIVDEVAYHEKYPTIYHLRKKLVDSTDKADLRLIYLALAHMIKFRGHFLIEGDLNPDNSDVDKLFIQLVQTYNQLFEENPINASGVDAKAILSARLSKSRRLENLIAQLPGEKKNGLFGNLIALSLGLTPNFKSNFDLAEDAKLQLSKDTYDDDLDNLLAQIGDQYADLFLAAKNLSDAILLSDILRVNTEITKAPLSASMIKRYDEHHQDLTLLKALVRQQLPEKYKEIFFDQSKNGYAGYIDGGASQEEFYKFIKPILEKMDGTEELLVKLNREDLLRKQRTFDNGSIPHQIHLGELHAILRRQEDFYPFLKDNREKIEKILTFRIPYYVGPLARGNSRFAWMTRKSEETITPWNFEEVVDKGASAQSFIERMTNFDKNLPNEKVLPKHSLLYEYFTVYNELTKVKYVTEGMRKPAFLSGEQKKAIVDLLFKTNRKVTVKQLKEDYFKKIECFDSVEISGVEDRFNASLGTYHDLLKIIKDKDFLDNEENEDILEDIVLTLTLFEDREMIEERLKTYAHLFDDKVMKQLKRRRYTGWGRLSRKLINGIRDKQSGKTILDFLKSDGFANRNFMQLIHDDSLTFKEDIQKAQVSGQGDSLHEHIANLAGSPAIKKGILQTVKVVDELVKVMGRHKPENIVIEMARENQTTQKGQKNSRERMKRIEEGIKELGSQILKEHPVENTQLQNEKLYLYYLQNGRDMYVDQELDINRLSDYDVDHIVPQSFLKDDSIDNKVLTRSDKARGKSDNVPSEEVVKKMKNYWRQLLNAKLITQRKFDNLTKAERGGLSELDKAGFIKRQLVETRQITKHVAQILDSRMNTKYDENDKLIREVKVITLKSKLVSDFRKDFQFYKVREINNYHHAHDAYLNAVVGTALIKKYPKLESEFVYGDYKVYDVRKMIAKSEQEIGKATAKYFFYSNIMNFFKTEITLANGEIRKRPLIETNGETGEIVWDKGRDFATVRKVLSMPQVNIVKKTEVQTGGFSKESILPKRNSDKLIARKKDWDPKKYGGFDSPTVAYSVLVVAKVEKGKSKKLKSVKELLGITIMERSSFEKNPIDFLEAKGYKEVKKDLIIKLPKYSLFELENGRKRMLASAGELQKGNELALPSKYVNFLYLASHYEKLKGSPEDNEQKQLFVEQHKHYLDEIIEQISEFSKRVILADANLDKVLSAYNKHRDKPIREQAENIIHLFTLTNLGAPAAFKYFDTTIDRKRYTSTKEVLDATLIHQSITGLYETRIDLSQLGGDGGGSSGGSEAAAKGGTAPLEEEYRLFLEAPIQNVTLLEQWKREIPKVWAEINPPGLASTQAPIHVQLLSTALPVRVRQYPITLEAKRSLRETIRKFRAAGILRPVHSPWNTPLLPVRKSGTSEYRMVQDLREVNKRVETIHPTVPNPYTLLSLLPPDRIWYSVLDLKDAFFCIPLAPESQLIFAFEWADAEEGESGQLTWTRLPQGFKNSPTLFNEALNRDLQGFRLDHPSVSLLQYVDDLLIAADTQAACLSATRDLLMTLAELGYRVSGKKAQLCQEEVTYLGFKIHKGSRSLSNSRTQAILQIPVPKTKRQVREFLGTIGYCRLWIPGFAELAQPLYAATRPGNDPLVWGEKEEEAFQSLKLALTQPPALALPSLDKPFQLFVEETSGAAKGVLTQALGPWKRPVAYLSKRLDPVAAGWPRCLRAIAAAALLTREASKLTFGQDIEITSSHNLESLLRSPPDKWLTNARITQYQVLLLDPPRVRFKQTAALNPATLLPETDDTLPIHHCLDTLDSLTSTRPDLTDQPLAQAEATLFTDGSSYIRDGKRYAGAAVVTLDSVIWAEPLPIGTSAQKAELIALTKALEWSKDKSVNIYTDSRYAFATLHVHGMIYRERGWLTAGGKAIKNAPEILALLTAVWLPKRVAVMHCKGHQKDDAPTSTGNRRADEVAREVAIRPLSTQATISAGKRTADGSEFEKRTADGSEFESPKKKAKVE

SEQ ID NO: 7069 - protein, 2098 aa, synthetic construct
MPAAKRVKLDGGDKKYSIGLDIGTNSVGWAVITDEYKVPSKKFKVLGNTDRHSIKKNLIGALLFDSGETAEATRLKRTARRRYTRRKNRICYLQEIFSNEMAKVDDSFFHRLEESFLVEEDKKHERHPIFGNIVDEVAYHEKYPTIYHLRKKLVDSTDKADLRLIYLALAHMIKFRGHFLIEGDLNPDNSDVDKLFIQLVQTYNQLFEENPINASGVDAKAILSARLSKSRRLENLIAQLPGEKKNGLFGNLIALSLGLTPNFKSNFDLAEDAKLQLSKDTYDDDLDNLLAQIGDQYADLFLAAKNLSDAILLSDILRVNTEITKAPLSASMIKRYDEHHQDLTLLKALVRQQLPEKYKEIFFDQSKNGYAGYIDGGASQEEFYKFIKPILEKMDGTEELLVKLNREDLLRKQRTFDNGSIPHQIHLGELHAILRRQEDFYPFLKDNREKIEKILTFRIPYYVGPLARGNSRFAWMTRKSEETITPWNFEEVVDKGASAQSFIERMTNFDKNLPNEKVLPKHSLLYEYFTVYNELTKVKYVTEGMRKPAFLSGEQKKAIVDLLFKTNRKVTVKQLKEDYFKKIECFDSVEISGVEDRFNASLGTYHDLLKIIKDKDFLDNEENEDILEDIVLTLTLFEDREMIEERLKTYAHLFDDKVMKQLKRRRYTGWGRLSRKLINGIRDKQSGKTILDFLKSDGFANRNFMQLIHDDSLTFKEDIQKAQVSGQGDSLHEHIANLAGSPAIKKGILQTVKVVDELVKVMGRHKPENIVIEMARENQTTQKGQKNSRERMKRIEEGIKELGSQILKEHPVENTQLQNEKLYLYYLQNGRDMYVDQELDINRLSDYDVDHIVPQSFLKDDSIDNKVLTRSDKARGKSDNVPSEEVVKKMKNYWRQLLNAKLITQRKFDNLTKAERGGLSELDKAGFIKRQLVETRQITKHVAQILDSRMNTKYDENDKLIREVKVITLKSKLVSDFRKDFQFYKVREINNYHHAHDAYLNAVVGTALIKKYPKLESEFVYGDYKVYDVRKMIAKSEQEIGKATAKYFFYSNIMNFFKTEITLANGEIRKRPLIETNGETGEIVWDKGRDFATVRKVLSMPQVNIVKKTEVQTGGFSKESILPKRNSDKLIARKKDWDPKKYGGFDSPTVAYSVLVVAKVEKGKSKKLKSVKELLGITIMERSSFEKNPIDFLEAKGYKEVKKDLIIKLPKYSLFELENGRKRMLASAGELQKGNELALPSKYVNFLYLASHYEKLKGSPEDNEQKQLFVEQHKHYLDEIIEQISEFSKRVILADANLDKVLSAYNKHRDKPIREQAENIIHLFTLTNLGAPAAFKYFDTTIDRKRYTSTKEVLDATLIHQSITGLYETRIDLSQLGGDGGGSSGGSEAAAKGGTAPLEEEYRLFLEAPIQNVTLLEQWKREIPKVWAEINPPGLASTQAPIHVQLLSTALPVRVRQYPITLEAKRSLRETIRKFRAAGILRPVHSPWNTPLLPVRKSGTSEYRMVQDLREVNKRVETIHPTVPNPYTLLSLLPPDRIWYSVLDLKDAFFCIPLAPESQLIFAFEWADAEEGESGQLTWTRLPQGFKNSPTLFNEALNRDLQGFRLDHPSVSLLQYVDDLLIAADTQAACLSATRDLLMTLAELGYRVSGKKAQLCQEEVTYLGFKIHKGSRSLSNSRTQAILQIPVPKTKRQVREFLGKIGYCRLFIPGFAELAQPLYAATRPGNDPLVWGEKEEEAFQSLKLALTQPPALALPSLDKPFQLFVEETSGAAKGVLTQALGPWKRPVAYLSKRLDPVAAGWPRCLRAIAAAALLTREASKLTFGQDIEITSSHNLESLLRSPPDKWLTNARITQYQVLLLDPPRVRFKQTAALNPATLLPETDDTLPIHHCLDTLDSLTSTRPDLTDQPLAQAEATLFTDGSSYIRDGKRYAGAAVVTLDSVIWAEPLPIGTSAQKAELIALTKALEWSKDKSVNIYTDSRYAFATLHVHGMIYRERGWLTAGGKAIKNAPEILALLTAVWLPKRVAVMHCKGHQKDDAPTSTGNRRADEVAREVAIRPLSTQATISAGKRTADGSEFEKRTADGSEFESPKKKAKVE

SEQ ID NO: 7070 - protein, 2095 aa, synthetic construct
MPAAKRVKLDGGDKKYSIGLDIGTNSVGWAVITDEYKVPSKKFKVLGNTDRHSIKKNLIGALLFDSGETAEATRLKRTARRRYTRRKNRICYLQEIFSNEMAKVDDSFFHRLEESFLVEEDKKHERHPIFGNIVDEVAYHEKYPTIYHLRKKLVDSTDKADLRLIYLALAHMIKFRGHFLIEGDLNPDNSDVDKLFIQLVQTYNQLFEENPINASGVDAKAILSARLSKSRRLENLIAQLPGEKKNGLFGNLIALSLGLTPNFKSNFDLAEDAKLQLSKDTYDDDLDNLLAQIGDQYADLFLAAKNLSDAILLSDILRVNTEITKAPLSASMIKRYDEHHQDLTLLKALVRQQLPEKYKEIFFDQSKNGYAGYIDGGASQEEFYKFIKPILEKMDGTEELLVKLNREDLLRKQRTFDNGSIPHQIHLGELHAILRRQEDFYPFLKDNREKIEKILTFRIPYYVGPLARGNSRFAWMTRKSEETITPWNFEEVVDKGASAQSFIERMTNFDKNLPNEKVLPKHSLLYEYFTVYNELTKVKYVTEGMRKPAFLSGEQKKAIVDLLFKTNRKVTVKQLKEDYFKKIECFDSVEISGVEDRFNASLGTYHDLLKIIKDKDFLDNEENEDILEDIVLTLTLFEDREMIEERLKTYAHLFDDKVMKQLKRRRYTGWGRLSRKLINGIRDKQSGKTILDFLKSDGFANRNFMQLIHDDSLTFKEDIQKAQVSGQGDSLHEHIANLAGSPAIKKGILQTVKVVDELVKVMGRHKPENIVIEMARENQTTQKGQKNSRERMKRIEEGIKELGSQILKEHPVENTQLQNEKLYLYYLQNGRDMYVDQELDINRLSDYDVDHIVPQSFLKDDSIDNKVLTRSDKARGKSDNVPSEEVVKKMKNYWRQLLNAKLITQRKFDNLTKAERGGLSELDKAGFIKRQLVETRQITKHVAQILDSRMNTKYDENDKLIREVKVITLKSKLVSDFRKDFQFYKVREINNYHHAHDAYLNAVVGTALIKKYPKLESEFVYGDYKVYDVRKMIAKSEQEIGKATAKYFFYSNIMNFFKTEITLANGEIRKRPLIETNGETGEIVWDKGRDFATVRKVLSMPQVNIVKKTEVQTGGFSKESILPKRNSDKLIARKKDWDPKKYGGFDSPTVAYSVLVVAKVEKGKSKKLKSVKELLGITIMERSSFEKNPIDFLEAKGYKEVKKDLIIKLPKYSLFELENGRKRMLASAGELQKGNELALPSKYVNFLYLASHYEKLKGSPEDNEQKQLFVEQHKHYLDEIIEQISEFSKRVILADANLDKVLSAYNKHRDKPIREQAENIIHLFTLTNLGAPAAFKYFDTTIDRKRYTSTKEVLDATLIHQSITGLYETRIDLSQLGGDGGGSSGGSEAAAKGGTLQLEEEYRLFEPESTQKQEMDIWLKNFPQAWAETGGMGTAHCQAPVLIQLKATATPISIRQYPMPHEAYQGIKPHIRRMLDQGILKPCQSPWNTPLLPVKKPGTEDYRPVQDLREVNKRVEDIHPTVPNPYNLLSTLPPSHPWYTVLDLKDAFFCLRLHSESQLLFAFEWRDPEIGLSGQLTWTRLPQGFKNSPTLFNEALHSDLADFRVRYPALVLLQYVDDLLLAAATRTECLEGTKALLETLGNKGYRASAKKAQICLQEVTYLGYSLKDGQRWLTKARKEAILSIPVPKNSRQVREFLGTAGYCRLWIPGFAELAAPLYPLTRPGTLFQWGTEQQLAFEDIKKALLSSPALGLPDITKPFELFIDENSGFAKGVLVQKLGPWKRPVAYLSKKLDTVASGWPPCLRMVAAIAILVKDAGKLTLGQPLTILTSHPVEALVRQPPNKWLSNARMTHYQAMLLDAERVHFGPTVSLNPATLLPLPSGGNHHDCLQILAETHGTRPDLTDQPLPDADLTWYTDGSSFIRNGEREAGAAVTTESEVIWAAPLPPGTSAQRAELIALTQALKMAEGKKLTVYTDSRYAFATTHVHGEIYRRRGWLTSEGKEIKNKNEILALLEALFLPKRLSIIHCPGHQKGDSPQAKGNRLADDTAKKAATETHSSLTVLPAGKRTADGSEFEKRTADGSEFESPKKKAKVE

SEQ ID NO: 7071 - protein, 2094 aa, synthetic construct
MPAAKRVKLDGGDKKYSIGLDIGTNSVGWAVITDEYKVPSKKFKVLGNTDRHSIKKNLIGALLFDSGETAEATRLKRTARRRYTRRKNRICYLQEIFSNEMAKVDDSFFHRLEESFLVEEDKKHERHPIFGNIVDEVAYHEKYPTIYHLRKKLVDSTDKADLRLIYLALAHMIKFRGHFLIEGDLNPDNSDVDKLFIQLVQTYNQLFEENPINASGVDAKAILSARLSKSRRLENLIAQLPGEKKNGLFGNLIALSLGLTPNFKSNFDLAEDAKLQLSKDTYDDDLDNLLAQIGDQYADLFLAAKNLSDAILLSDILRVNTEITKAPLSASMIKRYDEHHQDLTLLKALVRQQLPEKYKEIFFDQSKNGYAGYIDGGASQEEFYKFIKPILEKMDGTEELLVKLNREDLLRKQRTFDNGSIPHQIHLGELHAILRRQEDFYPFLKDNREKIEKILTFRIPYYVGPLARGNSRFAWMTRKSEETITPWNFEEVVDKGASAQSFIERMTNFDKNLPNEKVLPKHSLLYEYFTVYNELTKVKYVTEGMRKPAFLSGEQKKAIVDLLFKTNRKVTVKQLKEDYFKKIECFDSVEISGVEDRFNASLGTYHDLLKIIKDKDFLDNEENEDILEDIVLTLTLFEDREMIEERLKTYAHLFDDKVMKQLKRRRYTGWGRLSRKLINGIRDKQSGKTILDFLKSDGFANRNFMQLIHDDSLTFKEDIQKAQVSGQGDSLHEHIANLAGSPAIKKGILQTVKVVDELVKVMGRHKPENIVIEMARENQTTQKGQKNSRERMKRIEEGIKELGSQILKEHPVENTQLQNEKLYLYYLQNGRDMYVDQELDINRLSDYDVDHIVPQSFLKDDSIDNKVLTRSDKARGKSDNVPSEEVVKKMKNYWRQLLNAKLITQRKFDNLTKAERGGLSELDKAGFIKRQLVETRQITKHVAQILDSRMNTKYDENDKLIREVKVITLKSKLVSDFRKDFQFYKVREINNYHHAHDAYLNAVVGTALIKKYPKLESEFVYGDYKVYDVRKMIAKSEQEIGKATAKYFFYSNIMNFFKTEITLANGEIRKRPLIETNGETGEIVWDKGRDFATVRKVLSMPQVNIVKKTEVQTGGFSKESILPKRNSDKLIARKKDWDPKKYGGFDSPTVAYSVLVVAKVEKGKSKKLKSVKELLGITIMERSSFEKNPIDFLEAKGYKEVKKDLIIKLPKYSLFELENGRKRMLASAGELQKGNELALPSKYVNFLYLASHYEKLKGSPEDNEQKQLFVEQHKHYLDEIIEQISEFSKRVILADANLDKVLSAYNKHRDKPIREQAENIIHLFTLTNLGAPAAFKYFDTTIDRKRYTSTKEVLDATLIHQSITGLYETRIDLSQLGGDGGGSSGGSEAAAKGGVLNLEEEYRLHEKPVPSSIDPSWLQLFPTVWAERAGMGLANQVPPVVVELRSGASPVAVRQYPMSKEAREGIRPHIQKFLDLGVLVPCRSPWNTPLLPVKKPGTNDYRPVQDLREINKRVQDIHPTVPNPYNLLSSLPPSYTWYSVLDLKDAFFCLRLHPNSQPLFAFEWKDPEKGNTGQLTWTRLPQGFKNSPTLFNEALHRDLAPFRALNPQVVLLQYVDDLLVAAPTYEDCKKGTQKLLQELSKLGYRVSAKKAQLCQREVTYLGYLLKEGKRWLTPARKATVMKIPVPTTPRQVREFLGKAGFCRLFIPGFASLAAPLYPLTKPSIPFIWTEEHQQAFDHIKKALLSAPALALPDLTKPFTLYIDERAGVARGVLTQTLGPWRRPVAYLSKKLDPVASGWPTCLKAVAAVALLLKDADKLTLGQNVTVIASHSLESIVRQPPDRWMTNARMTHYQSLLLNERVSFAPPAVLNPATLLPVESEATPVHRCSEILAEETGTRRDLEDQPLPGVPTWYTDGSSFITEGKRRAGAPIVDGKRTVWASSLPEGTSAQKAELVALTQALRLAEGKNINIYTDSRYAFATAHIHGAIYKQRGWLTSAGKDIKNKEEILALLEAIHLPRRVAIIHCPGHQRGSNPVATGNRRADEAAKQAALSTRVLAGTTKPAGKRTADGSEFEKRTADGSEFESPKKKAKVE

SEQ ID NO: 7072 - protein, 2127 aa, synthetic construct
MPAAKRVKLDGGDKKYSIGLDIGTNSVGWAVITDEYKVPSKKFKVLGNTDRHSIKKNLIGALLFDSGETAEATRLKRTARRRYTRRKNRICYLQEIFSNEMAKVDDSFFHRLEESFLVEEDKKHERHPIFGNIVDEVAYHEKYPTIYHLRKKLVDSTDKADLRLIYLALAHMIKFRGHFLIEGDLNPDNSDVDKLFIQLVQTYNQLFEENPINASGVDAKAILSARLSKSRRLENLIAQLPGEKKNGLFGNLIALSLGLTPNFKSNFDLAEDAKLQLSKDTYDDDLDNLLAQIGDQYADLFLAAKNLSDAILLSDILRVNTEITKAPLSASMIKRYDEHHQDLTLLKALVRQQLPEKYKEIFFDQSKNGYAGYIDGGASQEEFYKFIKPILEKMDGTEELLVKLNREDLLRKQRTFDNGSIPHQIHLGELHAILRRQEDFYPFLKDNREKIEKILTFRIPYYVGPLARGNSRFAWMTRKSEETITPWNFEEVVDKGASAQSFIERMTNFDKNLPNEKVLPKHSLLYEYFTVYNELTKVKYVTEGMRKPAFLSGEQKKAIVDLLFKTNRKVTVKQLKEDYFKKIECFDSVEISGVEDRFNASLGTYHDLLKIIKDKDFLDNEENEDILEDIVLTLTLFEDREMIEERLKTYAHLFDDKVMKQLKRRRYTGWGRLSRKLINGIRDKQSGKTILDFLKSDGFANRNFMQLIHDDSLTFKEDIQKAQVSGQGDSLHEHIANLAGSPAIKKGILQTVKVVDELVKVMGRHKPENIVIEMARENQTTQKGQKNSRERMKRIEEGIKELGSQILKEHPVENTQLQNEKLYLYYLQNGRDMYVDQELDINRLSDYDVDHIVPQSFLKDDSIDNKVLTRSDKARGKSDNVPSEEVVKKMKNYWRQLLNAKLITQRKFDNLTKAERGGLSELDKAGFIKRQLVETRQITKHVAQILDSRMNTKYDENDKLIREVKVITLKSKLVSDFRKDFQFYKVREINNYHHAHDAYLNAVVGTALIKKYPKLESEFVYGDYKVYDVRKMIAKSEQEIGKATAKYFFYSNIMNFFKTEITLANGEIRKRPLIETNGETGEIVWDKGRDFATVRKVLSMPQVNIVKKTEVQTGGFSKESILPKRNSDKLIARKKDWDPKKYGGFDSPTVAYSVLVVAKVEKGKSKKLKSVKELLGITIMERSSFEKNPIDFLEAKGYKEVKKDLIIKLPKYSLFELENGRKRMLASAGELQKGNELALPSKYVNFLYLASHYEKLKGSPEDNEQKQLFVEQHKHYLDEIIEQISEFSKRVILADANLDKVLSAYNKHRDKPIREQAENIIHLFTLTNLGAPAAFKYFDTTIDRKRYTSTKEVLDATLIHQSITGLYETRIDLSQLGGDGGGSSGGSEAAAKGGLLGRDLLTKLKAQIQFSTEGPQVTWEDRPAMCLVLNLEEEYRLHEKPVPPSIDPSWLQLFPMVWAEKAGMGLANQVPPVVVELKSDASPVAVRQYPMSKEAREGIRPHIQRFLDLGILVPCQSPWNTPLLPVKKPGTNDYRPVQDLREVNKRVQDIHPTVPNPYNLLSSLPPSHTWYSVLDLKDAFFCLKLHPNSQPLFAFEWRDPEKGNTGQLTWTRLPQGFKNSPTLFNEALHRDLASFRALNPQVVMLQYVDDLLVAAPTYRDCKEGTRRLLQELSKLGYRVSAKKAQLCREEVTYLGYLLKGGKRWLTPARKATVMKIPTPTTPRQVREFLGTAGFCRLWIPGFASLAAPLYPLTRPKVPFTWTEAHQEAFGRIKEALLSAPALALPDLTKPFALYVDEKEGVARGVLTQTLGPWRRPVAYLSKKLDPVASGWPTCLKAIAAVALLLKDADKLTLGQNVLVIAPHNLESIVRQPPDRWMTNARMTHYQSLLLNERVSFAPPAILNPATLLPVESDDTPIHICSEILAEETGTRPDLRDQPLPGVPAWYTDGSSFIMDGRRQAGAAIVDNKRTVWASNLPEGTSAQKAELIALTQALRLAEGKSINIYTDSRYAFATAHVHGAIYKQRGWLTSAGKDIKNKEEILALLEAIHLPKRVAIIHCPGHQRGTDPVATGNRKADEAAKQAAQSTRILTETTKNAGKRTADGSEFEKRTADGSEFESPKKKAKVE

SEQ ID NO: 7073 - protein, 2218 aa, synthetic construct
MPAAKRVKLDGGDKKYSIGLDIGTNSVGWAVITDEYKVPSKKFKVLGNTDRHSIKKNLIGALLFDSGETAEATRLKRTARRRYTRRKNRICYLQEIFSNEMAKVDDSFFHRLEESFLVEEDKKHERHPIFGNIVDEVAYHEKYPTIYHLRKKLVDSTDKADLRLIYLALAHMIKFRGHFLIEGDLNPDNSDVDKLFIQLVQTYNQLFEENPINASGVDAKAILSARLSKSRRLENLIAQLPGEKKNGLFGNLIALSLGLTPNFKSNFDLAEDAKLQLSKDTYDDDLDNLLAQIGDQYADLFLAAKNLSDAILLSDILRVNTEITKAPLSASMIKRYDEHHQDLTLLKALVRQQLPEKYKEIFFDQSKNGYAGYIDGGASQEEFYKFIKPILEKMDGTEELLVKLNREDLLRKQRTFDNGSIPHQIHLGELHAILRRQEDFYPFLKDNREKIEKILTFRIPYYVGPLARGNSRFAWMTRKSEETITPWNFEEVVDKGASAQSFIERMTNFDKNLPNEKVLPKHSLLYEYFTVYNELTKVKYVTEGMRKPAFLSGEQKKAIVDLLFKTNRKVTVKQLKEDYFKKIECFDSVEISGVEDRFNASLGTYHDLLKIIKDKDFLDNEENEDILEDIVLTLTLFEDREMIEERLKTYAHLFDDKVMKQLKRRRYTGWGRLSRKLINGIRDKQSGKTILDFLKSDGFANRNFMQLIHDDSLTFKEDIQKAQVSGQGDSLHEHIANLAGSPAIKKGILQTVKVVDELVKVMGRHKPENIVIEMARENQTTQKGQKNSRERMKRIEEGIKELGSQILKEHPVENTQLQNEKLYLYYLQNGRDMYVDQELDINRLSDYDVDHIVPQSFLKDDSIDNKVLTRSDKARGKSDNVPSEEVVKKMKNYWRQLLNAKLITQRKFDNLTKAERGGLSELDKAGFIKRQLVETRQITKHVAQILDSRMNTKYDENDKLIREVKVITLKSKLVSDFRKDFQFYKVREINNYHHAHDAYLNAVVGTALIKKYPKLESEFVYGDYKVYDVRKMIAKSEQEIGKATAKYFFYSNIMNFFKTEITLANGEIRKRPLIETNGETGEIVWDKGRDFATVRKVLSMPQVNIVKKTEVQTGGFSKESILPKRNSDKLIARKKDWDPKKYGGFDSPTVAYSVLVVAKVEKGKSKKLKSVKELLGITIMERSSFEKNPIDFLEAKGYKEVKKDLIIKLPKYSLFELENGRKRMLASAGELQKGNELALPSKYVNFLYLASHYEKLKGSPEDNEQKQLFVEQHKHYLDEIIEQISEFSKRVILADANLDKVLSAYNKHRDKPIREQAENIIHLFTLTNLGAPAAFKYFDTTIDRKRYTSTKEVLDATLIHQSITGLYETRIDLSQLGGDGGGSSGGSEAAAKGGTLGDQGSRGSDPLPEPRVTLTVEGIPTEFLVNTGAEHSVLTKPMGKMGSKRTVVAGATGSKVYPWTTKRLLKIGQKQVTHSFLVIPECPAPLLGRDLLTKLKAQIQFSTEGPQVTWEDRPAMCLVLNLEEEYRLHEKPVPPSIDPSWLQLFPMVWAEKAGMGLANQVPPVVVELKSDASPVAVRQYPMSKEAREGIRPHIQRFLDLGILVPCQSPWNTPLLPVKKPGTNDYRPVQDLREVNKRVQDIHPTVPNPYNLLSSLPPSHTWYSVLDLKDAFFCLKLHPNSQPLFAFEWRDPEKGNTGQLTWTRLPQGFKNSPTLFNEALHRDLASFRALNPQVVMLQYVDDLLVAAPTYRDCKEGTRRLLQELSKLGYRVSAKKAQLCREEVTYLGYLLKGGKRWLTPARKATVMKIPTPTTPRQVREFLGTAGFCRLWIPGFASLAAPLYPLTRPKVPFTWTEAHQEAFGRIKEALLSAPALALPDLTKPFALYVDEKEGVARGVLTQTLGPWRRPVAYLSKKLDPVASGWPTCLKAIAAVALLLKDADKLTLGQNVLVIAPHNLESIVRQPPDRWMTNARMTHYQSLLLNERVSFAPPAILNPATLLPVESDDTPIHICSEILAEETGTRPDLRDQPLPGVPAWYTDGSSFIMDGRRQAGAAIVDNKRTVWASNLPEGTSAQKAELIALTQALRLAEGKSINIYTDSRYAFATAHVHGAIYKQRGWLTSAGKDIKNKEEILALLEAIHLPKRVAIIHCPGHQRGTDPVATGNRKADEAAKQAAQSTRILTETTKNAGKRTADGSEFEKRTADGSEFESPKKKAKVE

SEQ ID NO: 7074 - protein, 2090 aa, synthetic construct
MPAAKRVKLDGGDKKYSIGLDIGTNSVGWAVITDEYKVPSKKFKVLGNTDRHSIKKNLIGALLFDSGETAEATRLKRTARRRYTRRKNRICYLQEIFSNEMAKVDDSFFHRLEESFLVEEDKKHERHPIFGNIVDEVAYHEKYPTIYHLRKKLVDSTDKADLRLIYLALAHMIKFRGHFLIEGDLNPDNSDVDKLFIQLVQTYNQLFEENPINASGVDAKAILSARLSKSRRLENLIAQLPGEKKNGLFGNLIALSLGLTPNFKSNFDLAEDAKLQLSKDTYDDDLDNLLAQIGDQYADLFLAAKNLSDAILLSDILRVNTEITKAPLSASMIKRYDEHHQDLTLLKALVRQQLPEKYKEIFFDQSKNGYAGYIDGGASQEEFYKFIKPILEKMDGTEELLVKLNREDLLRKQRTFDNGSIPHQIHLGELHAILRRQEDFYPFLKDNREKIEKILTFRIPYYVGPLARGNSRFAWMTRKSEETITPWNFEEVVDKGASAQSFIERMTNFDKNLPNEKVLPKHSLLYEYFTVYNELTKVKYVTEGMRKPAFLSGEQKKAIVDLLFKTNRKVTVKQLKEDYFKKIECFDSVEISGVEDRFNASLGTYHDLLKIIKDKDFLDNEENEDILEDIVLTLTLFEDREMIEERLKTYAHLFDDKVMKQLKRRRYTGWGRLSRKLINGIRDKQSGKTILDFLKSDGFANRNFMQLIHDDSLTFKEDIQKAQVSGQGDSLHEHIANLAGSPAIKKGILQTVKVVDELVKVMGRHKPENIVIEMARENQTTQKGQKNSRERMKRIEEGIKELGSQILKEHPVENTQLQNEKLYLYYLQNGRDMYVDQELDINRLSDYDVDHIVPQSFLKDDSIDNKVLTRSDKARGKSDNVPSEEVVKKMKNYWRQLLNAKLITQRKFDNLTKAERGGLSELDKAGFIKRQLVETRQITKHVAQILDSRMNTKYDENDKLIREVKVITLKSKLVSDFRKDFQFYKVREINNYHHAHDAYLNAVVGTALIKKYPKLESEFVYGDYKVYDVRKMIAKSEQEIGKATAKYFFYSNIMNFFKTEITLANGEIRKRPLIETNGETGEIVWDKGRDFATVRKVLSMPQVNIVKKTEVQTGGFSKESILPKRNSDKLIARKKDWDPKKYGGFDSPTVAYSVLVVAKVEKGKSKKLKSVKELLGITIMERSSFEKNPIDFLEAKGYKEVKKDLIIKLPKYSLFELENGRKRMLASAGELQKGNELALPSKYVNFLYLASHYEKLKGSPEDNEQKQLFVEQHKHYLDEIIEQISEFSKRVILADANLDKVLSAYNKHRDKPIREQAENIIHLFTLTNLGAPAAFKYFDTTIDRKRYTSTKEVLDATLIHQSITGLYETRIDLSQLGGDGGGSSGGSEAAAKGGTLQLDDEYRLYSPLVKPDQNIQFWLEQFPQAWAETAGMGLAKQVPPQVIQLKASATPVSVRQYPLSKEAQEGIRPHVQRLIQQGILVPVQSPWNTPLLPVRKPGTNDYRPVQDLREVNKRVQDIHPTVPNPYNLLCALPPQRSWYTVLDLKDAFFCLRLHPTSQPLFAFEWRDPGTGRTGQLTWTRLPQGFKNSPTIFDEALHRDLANFRIQHPQVTLLQYVDDLLLAGATKQDCLEGTKALLLELSDLGYRASAKKAQICRREVTYLGYSLRDGQRWLTEARKKTVVQIPAPTTAKQVREFLGTAGFCRLWIPGFATLAAPLYPLTKEKGEFSWAPEHQKAFDAIKKALLSAPALALPDVTKPFTLYVDERKGVARGVLTQTLGPWRRPVAYLSKKLDPVASGWPVCLKAIAAVAILVKDADKLTLGQNITVIAPHALENIVRQPPDRWMTNARMTHYQSLLLTERVTFAPPAALNPATLLPEETDEPVTHDCHQLLIEETGVRKDLTDIPLTGEVLTWFTDGSSYVVEGKRMAGAAVVDGTRTIWASSLPEGTSAQKAELMALTQALRLAEGKSINIYTDSRYAFATAHVHGAIYKQRGLLTSAGREIKNKEEILSLLEALHLPKRLAIIHCPGHQKAKDPISRGNQMADRVAKQAAQGVNLLAGKRTADGSEFEKRTADGSEFESPKKKAKVE

SEQ ID NO: 7075 - protein, 2090 aa, synthetic construct; identical to SEQ ID NO: 7074

SEQ ID NO: 7076 - protein, 2176 aa, synthetic construct
MPAAKRVKLDGGDKKYSIGLDIGTNSVGWAVITDEYKVPSKKFKVLGNTDRHSIKKNLIGALLFDSGETAEATRLKRTARRRYTRRKNRICYLQEIFSNEMAKVDDSFFHRLEESFLVEEDKKHERHPIFGNIVDEVAYHEKYPTIYHLRKKLVDSTDKADLRLIYLALAHMIKFRGHFLIEGDLNPDNSDVDKLFIQLVQTYNQLFEENPINASGVDAKAILSARLSKSRRLENLIAQLPGEKKNGLFGNLIALSLGLTPNFKSNFDLAEDAKLQLSKDTYDDDLDNLLAQIGDQYADLFLAAKNLSDAILLSDILRVNTEITKAPLSASMIKRYDEHHQDLTLLKALVRQQLPEKYKEIFFDQSKNGYAGYIDGGASQEEFYKFIKPILEKMDGTEELLVKLNREDLLRKQRTFDNGSIPHQIHLGELHAILRRQEDFYPFLKDNREKIEKILTFRIPYYVGPLARGNSRFAWMTRKSEETITPWNFEEVVDKGASAQSFIERMTNFDKNLPNEKVLPKHSLLYEYFTVYNELTKVKYVTEGMRKPAFLSGEQKKAIVDLLFKTNRKVTVKQLKEDYFKKIECFDSVEISGVEDRFNASLGTYHDLLKIIKDKDFLDNEENEDILEDIVLTLTLFEDREMIEERLKTYAHLFDDKVMKQLKRRRYTGWGRLSRKLINGIRDKQSGKTILDFLKSDGFANRNFMQLIHDDSLTFKEDIQKAQVSGQGDSLHEHIANLAGSPAIKKGILQTVKVVDELVKVMGRHKPENIVIEMARENQTTQKGQKNSRERMKRIEEGIKELGSQILKEHPVENTQLQNEKLYLYYLQNGRDMYVDQELDINRLSDYDVDHIVPQSFLKDDSIDNKVLTRSDKARGKSDNVPSEEVVKKMKNYWRQLLNAKLITQRKFDNLTKAERGGLSELDKAGFIKRQLVETRQITKHVAQILDSRMNTKYDENDKLIREVKVITLKSKLVSDFRKDFQFYKVREINNYHHAHDAYLNAVVGTALIKKYPKLESEFVYGDYKVYDVRKMIAKSEQEIGKATAKYFFYSNIMNFFKTEITLANGEIRKRPLIETNGETGEIVWDKGRDFATVRKVLSMPQVNIVKKTEVQTGGFSKESILPKRNSDKLIARKKDWDPKKYGGFDSPTVAYSVLVVAKVEKGKSKKLKSVKELLGITIMERSSFEKNPIDFLEAKGYKEVKKDLIIKLPKYSLFELENGRKRMLASAGELQKGNELALPSKYVNFLYLASHYEKLKGSPEDNEQKQLFVEQHKHYLDEIIEQISEFSKRVILADANLDKVLSAYNKHRDKPIREQAENIIHLFTLTNLGAPAAFKYFDTTIDRKRYTSTKEVLDATLIHQSITGLYETRIDLSQLGGDGGGSSGGSEAAAKGGMDPLQLLQPLEAEIKGTKLKAHWNSGATITCVPEAFLEDERPIQTMLIKTIHGEKQQDVYYLTFKVQGRKVEAEVLASPYDYILLNPSDVPWLMKKPLQLTVLVPLHEYQERLLQQTALPKEQKELLQKLFLKYDALWQHWENQVGHRRIKPHNIATGTLAPRPQKQYPINPKAKPSIQIVIDDLLKQGVLIQQNSTMNTPVYPVPKPDGKWRMVLDYREVNKTIPLIAAQNQHSAGILSSIYRGKYKTTLDLTNGFWAHPITPESYWLTAFTWQGKQYCWTRLPQGFLNSPALFNADVVDLLKEIPNVQAYVDDIYISHDDPQEHLEQLEKIFSILLNAGYVVSLKKSEIAQREVEFLGFNITKEGRGLTDTFKQKLLNITPPKDLKQLQSILGLLNFARNFIPNYSELVKPLYTIVAPANGKFISWTEDNSNQLQHIISVLNQADNLEERNPETRLIIKVNSSPSAGYIRYYNEGSKRPIMYVNYIFSKAEAKFTQTEKLLTTMHKGLIKAMDLAMGQEILVYSPIVSMTKIQRTPLPERKALPVRWITWMTYLEDPRIQFHYDKSLPELQQIPNVTEDVIAKTKHPSEFAMVFYTDGSAIKHPDVNKSHSAGMGIAQVQFIPEYKIVHQWSIPLGDHTAQLAEIAAVEFACKKALKISGPVLIVTDSFYVAESANKELPYWKSNGFLNNKKKPLRHVSKWKSIAECLQLKPDIIIMHEKGHQQPMTTLHTEGNNLADKLATQGSYVVHAGKRTADGSEFEKRTADGSEFESPKKKAKVE

SEQ ID NO: 7077 - protein, 2176 aa, synthetic construct
MPAAKRVKLDGGDKKYSIGLDIGTNSVGWAVITDEYKVPSKKFKVLGNTDRHSIKKNLIGALLFDSGETAEATRLKRTARRRYTRRKNRICYLQEIFSNEMAKVDDSFFHRLEESFLVEEDKKHERHPIFGNIVDEVAYHEKYPTIYHLRKKLVDSTDKADLRLIYLALAHMIKFRGHFLIEGDLNPDNSDVDKLFIQLVQTYNQLFEENPINASGVDAKAILSARLSKSRRLENLIAQLPGEKKNGLFGNLIALSLGLTPNFKSNFDLAEDAKLQLSKDTYDDDLDNLLAQIGDQYADLFLAAKNLSDAILLSDILRVNTEITKAPLSASMIKRYDEHHQDLTLLKALVRQQLPEKYKEIFFDQSKNGYAGYIDGGASQEEFYKFIKPILEKMDGTEELLVKLNREDLLRKQRTFDNGSIPHQIHLGELHAILRRQEDFYPFLKDNREKIEKILTFRIPYYVGPLARGNSRFAWMTRKSEETITPWNFEEVVDKGASAQSFIERMTNFDKNLPNEKVLPKHSLLYEYFTVYNELTKVKYVTEGMRKPAFLSGEQKKAIVDLLFKTNRKVTVKQLKEDYFKKIECFDSVEISGVEDRFNASLGTYHDLLKIIKDKDFLDNEENEDILEDIVLTLTLFEDREMIEERLKTYAHLFDDKVMKQLKRRRYTGWGRLSRKLINGIRDKQSGKTILDFLKSDGFANRNFMQLIHDDSLTFKEDIQKAQVSGQGDSLHEHIANLAGSPAIKKGILQTVKVVDELVKVMGRHKPENIVIEMARENQTTQKGQKNSRERMKRIEEGIKELGSQILKEHPVENTQLQNEKLYLYYLQNGRDMYVDQELDINRLSDYDVDHIVPQSFLKDDSIDNKVLTRSDKARGKSDNVPSEEVVKKMKNYWRQLLNAKLITQRKFDNLTKAERGGLSELDKAGFIKRQLVETRQITKHVAQILDSRMNTKYDENDKLIREVKVITLKSKLVSDFRKDFQFYKVREINNYHHAHDAYLNAVVGTALIKKYPKLESEFVYGDYKVYDVRKMIAKSEQEIGKATAKYFFYSNIMNFFKTEITLANGEIRKRPLIETNGETGEIVWDKGRDFATVRKVLSMPQVNIVKKTEVQTGGFSKESILPKRNSDKLIARKKDWDPKKYGGFDSPTVAYSVLVVAKVEKGKSKKLKSVKELLGITIMERSSFEKNPIDFLEAKGYKEVKKDLIIKLPKYSLFELENGRKRMLASAGELQKGNELALPSKYVNFLYLASHYEKLKGSPEDNEQKQLFVEQHKHYLDEIIEQISEFSKRVILADANLDKVLSAYNKHRDKPIREQAENIIHLFTLTNLGAPAAFKYFDTTIDRKRYTSTKEVLDATLIHQSITGLYETRIDLSQLGGDGGGSSGGSEAAAKGGMDPLQLLQPLEAEIKGTKLKAHWNSGATITCVPQAFLEEEVPIKNIWIKTIHGEKEQPVYYLTFKIQGRKVEAEVISSPYDYILVSPSDIPWLMKKPLQLTTLVPLQEYEERLLKQTMLTGSYKEKLQSLFLKYDALWQHWENQVGHRRIKPHHIATGTVNPRPQKQYPINPKAKASIQTVINDLLKQGVLIQQNSIMNTPVYPVPKPDGKWRMVLDYREVNKTIPLIAAQNQHSAGILSSIFRGKYKTTLDLSNGFWAHSITPESYWLTAFTWLGQQYCWTRLPQGFLNSPALFNADVVDLLKEVPNVQVYVDDIYISHDDPREHLEQLEKVFSLLLNAGYVVSLKKSEIAQHEVEFLGFNITKEGRGLTETFKQKLLNITPPRDLKQLQSILGLLNFARNFIPNFSELVKPLYNIIATAPGKYITWTTDNSQQLQNIISMLNSAENLEERNPEVRLIMKVNTSPSAGYIRFYNEFAKRPIMYLNYVYTKAEVKFTNTEKLLTTIHKGLIKALDLGMGQEILVYSPIVSMTKIQKTPLPERKALPIRWITWMSYLEDPRIQFHYDKTLPELQQVPTVTDDIIAKIKHPSEFSMVFYTDGSAIKHPNVNKSHNAGMGIAQVQFKPEFTVINTWSIPLGDHTAQLAEVAAVEFACKKALKIDGPVLIVTDSFYVAESVNKELPYWQSNGFFNNKKKPLKHVSKWKSIADCIQLKPDIIIIHEKGHQPTASTFHTEGNNLADKLATQGSYVVNAGKRTADGSEFEKRTADGSEFESPKKKAKVE

SEQ ID NO: 7078 - protein, 2098 aa, synthetic construct
MPAAKRVKLDGGDKKYSIGLDIGTNSVGWAVITDEYKVPSKKFKVLGNTDRHSIKKNLIGALLFDSGETAEATRLKRTARRRYTRRKNRICYLQEIFSNEMAKVDDSFFHRLEESFLVEEDKKHERHPIFGNIVDEVAYHEKYPTIYHLRKKLVDSTDKADLRLIYLALAHMIKFRGHFLIEGDLNPDNSDVDKLFIQLVQTYNQLFEENPINASGVDAKAILSARLSKSRRLENLIAQLPGEKKNGLFGNLIALSLGLTPNFKSNFDLAEDAKLQLSKDTYDDDLDNLLAQIGDQYADLFLAAKNLSDAILLSDILRVNTEITKAPLSASMIKRYDEHHQDLTLLKALVRQQLPEKYKEIFFDQSKNGYAGYIDGGASQEEFYKFIKPILEKMDGTEELLVKLNREDLLRKQRTFDNGSIPHQIHLGELHAILRRQEDFYPFLKDNREKIEKILTFRIPYYVGPLARGNSRFAWMTRKSEETITPWNFEEVVDKGASAQSFIERMTNFDKNLPNEKVLPKHSLLYEYFTVYNELTKVKYVTEGMRKPAFLSGEQKKAIVDLLFKTNRKVTVKQLKEDYFKKIECFDSVEISGVEDRFNASLGTYHDLLKIIKDKDFLDNEENEDILEDIVLTLTLFEDREMIEERLKTYAHLFDDKVMKQLKRRRYTGWGRLSRKLINGIRDKQSGKTILDFLKSDGFANRNFMQLIHDDSLTFKEDIQKAQVSGQGDSLHEHIANLAGSPAIKKGILQTVKVVDELVKVMGRHKPENIVIEMARENQTTQKGQKNSRERMKRIEEGIKELGSQILKEHPVENTQLQNEKLYLYYLQNGRDMYVDQELDINRLSDYDVDHIVPQSFLKDDSIDNKVLTRSDKARGKSDNVPSEEVVKKMKNYWRQLLNAKLITQRKFDNLTKAERGGLSELDKAGFIKRQLVETRQITKHVAQILDSRMNTKYDENDKLIREVKVITLKSKLVSDFRKDFQFYKVREINNYHHAHDAYLNAVVGTALIKKYPKLESEFVYGDYKVYDVRKMIAKSEQEIGKATAKYFFYSNIMNFFKTEITLANGEIRKRPLIETNGETGEIVWDKGRDFATVRKVLSMPQVNIVKKTEVQTGGFSKESILPKRNSDKLIARKKDWDPKKYGGFDSPTVAYSVLVVAKVEKGKSKKLKSVKELLGITIMERSSFEKNPIDFLEAKGYKEVKKDLIIKLPKYSLFELENGRKRMLASAGELQKGNELALPSKYVNFLYLASHYEKLKGSPEDNEQKQLFVEQHKHYLDEIIEQISEFSKRVILADANLDKVLSAYNKHRDKPIREQAENIIHLFTLTNLGAPAAFKYFDTTIDRKRYTSTKEVLDATLIHQSITGLYETRIDLSQLGGDGGGSSEAAAKGGSGGTAPLEEEYRLFLEAPIQNVTLLEQWKREIPKVWAEINPPGLASTQAPIHVQLLSTALPVRVRQYPITLEAKRSLRETIRKFRAAGILRPVHSPWNTPLLPVRKSGTSEYRMVQDLREVNKRVETIHPTVPNPYTLLSLLPPDRIWYSVLDLKDAFFCIPLAPESQLIFAFEWADAEEGESGQLTWTRLPQGFKNSPTLFDEALNRDLQGFRLDHPSVSLLQYVDDLLIAADTQAACLSATRDLLMTLAELGYRVSGKKAQLCQEEVTYLGFKIHKGSRSLSNSRTQAILQIPVPKTKRQVREFLGTIGYCRLWIPGFAELAQPLYAATRGGNDPLVWGEKEEEAFQSLKLALTQPPALALPSLDKPFQLFVEETSGAAKGVLTQALGPWKRPVAYLSKRLDPVAAGWPRCLRAIAAAALLTREASKLTFGQDIEITSSHNLESLLRSPPDKWLTNARITQYQVLLLDPPRVRFKQTAALNPATLLPETDDTLPIHHCLDTLDSLTSTRPDLTDQPLAQAEATLFTDGSSYIRDGKRYAGAAVVTLDSVIWAEPLPIGTSAQKAELIALTKALEWSKDKSVNIYTDSRYAFATLHVHGMIYRERGLLTAGGKAIKNAPEILALLTAVWLPKRVAVMHCKGHQKDDAPTSTGNRRADEVAREVAIRPLSTQATISAGKRTADGSEFEKRTADGSEFESPKKKAKVE

SEQ ID NO: 7079 - protein, 2098 aa, synthetic construct
MPAAKRVKLDGGDKKYSIGLDIGTNSVGWAVITDEYKVPSKKFKVLGNTDRHSIKKNLIGALLFDSGETAEATRLKRTARRRYTRRKNRICYLQEIFSNEMAKVDDSFFHRLEESFLVEEDKKHERHPIFGNIVDEVAYHEKYPTIYHLRKKLVDSTDKADLRLIYLALAHMIKFRGHFLIEGDLNPDNSDVDKLFIQLVQTYNQLFEENPINASGVDAKAILSARLSKSRRLENLIAQLPGEKKNGLFGNLIALSLGLTPNFKSNFDLAEDAKLQLSKDTYDDDLDNLLAQIGDQYADLFLAAKNLSDAILLSDILRVNTEITKAPLSASMIKRYDEHHQDLTLLKALVRQQLPEKYKEIFFDQSKNGYAGYIDGGASQEEFYKFIKPILEKMDGTEELLVKLNREDLLRKQRTFDNGSIPHQIHLGELHAILRRQEDFYPFLKDNREKIEKILTFRIPYYVGPLARGNSRFAWMTRKSEETITPWNFEEVVDKGASAQSFIERMTNFDKNLPNEKVLPKHSLLYEYFTVYNELTKVKYVTEGMRKPAFLSGEQKKAIVDLLFKTNRKVTVKQLKEDYFKKIECFDSVEISGVEDRFNASLGTYHDLLKIIKDKDFLDNEENEDILEDIVLTLTLFEDREMIEERLKTYAHLFDDKVMKQLKRRRYTGWGRLSRKLINGIRDKQSGKTILDFLKSDGFANRNFMQLIHDDSLTFKEDIQKAQVSGQGDSLHEHIANLAGSPAIKKGILQTVKVVDELVKVMGRHKPENIVIEMARENQTTQKGQKNSRERMKRIEEGIKELGSQILKEHPVENTQLQNEKLYLYYLQNGRDMYVDQELDINRLSDYDVDHIVPQSFLKDDSIDNKVLTRSDKARGKSDNVPSEEVVKKMKNYWRQLLNAKLITQRKFDNLTKAERGGLSELDKAGFIKRQLVETRQITKHVAQILDSRMNTKYDENDKLIREVKVITLKSKLVSDFRKDFQFYKVREINNYHHAHDAYLNAVVGTALIKKYPKLESEFVYGDYKVYDVRKMIAKSEQEIGKATAKYFFYSNIMNFFKTEITLANGEIRKRPLIETNGETGEIVWDKGRDFATVRKVLSMPQVNIVKKTEVQTGGFSKESILPKRNSDKLIARKKDWDPKKYGGFDSPTVAYSVLVVAKVEKGKSKKLKSVKELLGITIMERSSFEKNPIDFLEAKGYKEVKKDLIIKLPKYSLFELENGRKRMLASAGELQKGNELALPSKYVNFLYLASHYEKLKGSPEDNEQKQLFVEQHKHYLDEIIEQISEFSKRVILADANLDKVLSAYNKHRDKPIREQAENIIHLFTLTNLGAPAAFKYFDTTIDRKRYTSTKEVLDATLIHQSITGLYETRIDLSQLGGDGGGSSEAAAKGGSGGTAPLEEEYRLFLEAPIQNVTLLEQWKREIPKVWAEINPPGLASTQAPIHVQLLSTALPVRVRQYPITLEAKRSLRETIRKFRAAGILRPVHSPWNTPLLPVRKSGTSEYRMVQDLREVNKRVETIHPTVPNPYTLLSLLPPDRIWYSVLDLKDAFFCIPLAPESQLIFAFEWADAEEGESGQLTWTRLPQGFKNSPTLFNEALNRDLQGFRLDHPSVSLLQYVDDLLIAADTQAACLSATRDLLMTLAELGYRVSGKKAQLCQEEVTYLGFKIHKGSRSLSNSRTQAILQIPVPKTKRQVREFLGTIGYCRLWIPGFAELAQPLYAATRPGNDPLVWGEKEEEAFQSLKLALTQPPALALPSLDKPFQLFVEETSGAAKGVLTQALGPWKRPVAYLSKRLDPVAAGWPRCLRAIAAAALLTREASKLTFGQDIEITSSHNLESLLRSPPDKWLTNARITQYQVLLLDPPRVRFKQTAALNPATLLPETDDTLPIHHCLDTLDSLTSTRPDLTDQPLAQAEATLFTDGSSYIRDGKRYAGAAVVTLDSVIWAEPLPIGTSAQKAELIALTKALEWSKDKSVNIYTDSRYAFATLHVHGMIYRERGWLTAGGKAIKNAPEILALLTAVWLPKRVAVMHCKGHQKDDAPTSTGNRRADEVAREVAIRPLSTQATISAGKRTADGSEFEKRTADGSEFESPKKKAKVE

SEQ ID NO: 7080 - protein, 2098 aa, synthetic construct
MPAAKRVKLDGGDKKYSIGLDIGTNSVGWAVITDEYKVPSKKFKVLGNTDRHSIKKNLIGALLFDSGETAEATRLKRTARRRYTRRKNRICYLQEIFSNEMAKVDDSFFHRLEESFLVEEDKKHERHPIFGNIVDEVAYHEKYPTIYHLRKKLVDSTDKADLRLIYLALAHMIKFRGHFLIEGDLNPDNSDVDKLFIQLVQTYNQLFEENPINASGVDAKAILSARLSKSRRLENLIAQLPGEKKNGLFGNLIALSLGLTPNFKSNFDLAEDAKLQLSKDTYDDDLDNLLAQIGDQYADLFLAAKNLSDAILLSDILRVNTEITKAPLSASMIKRYDEHHQDLTLLKALVRQQLPEKYKEIFFDQSKNGYAGYIDGGASQEEFYKFIKPILEKMDGTEELLVKLNREDLLRKQRTFDNGSIPHQIHLGELHAILRRQEDFYPFLKDNREKIEKILTFRIPYYVGPLARGNSRFAWMTRKSEETITPWNFEEVVDKGASAQSFIERMTNFDKNLPNEKVLPKHSLLYEYFTVYNELTKVKYVTEGMRKPAFLSGEQKKAIVDLLFKTNRKVTVKQLKEDYFKKIECFDSVEISGVEDRFNASLGTYHDLLKIIKDKDFLDNEENEDILEDIVLTLTLFEDREMIEERLKTYAHLFDDKVMKQLKRRRYTGWGRLSRKLINGIRDKQSGKTILDFLKSDGFANRNFMQLIHDDSLTFKEDIQKAQVSGQGDSLHEHIANLAGSPAIKKGILQTVKVVDELVKVMGRHKPENIVIEMARENQTTQKGQKNSRERMKRIEEGIKELGSQILKEHPVENTQLQNEKLYLYYLQNGRDMYVDQELDINRLSDYDVDHIVPQSFLKDDSIDNKVLTRSDKARGKSDNVPSEEVVKKMKNYWRQLLNAKLITQRKFDNLTKAERGGLSELDKAGFIKRQLVETRQITKHVAQILDSRMNTKYDENDKLIREVKVITLKSKLVSDFRKDFQFYKVREINNYHHAHDAYLNAVVGTALIKKYPKLESEFVYGDYKVYDVRKMIAKSEQEIGKATAKYFFYSNIMNFFKTEITLANGEIRKRPLIETNGETGEIVWDKGRDFATVRKVLSMPQVNIVKKTEVQTGGFSKESILPKRNSDKLIARKKDWDPKKYGGFDSPTVAYSVLVVAKVEKGKSKKLKSVKELLGITIMERSSFEKNPIDFLEAKGYKEVKKDLIIKLPKYSLFELENGRKRMLASAGELQKGNELALPSKYVNFLYLASHYEKLKGSPEDNEQKQLFVEQHKHYLDEIIEQISEFSKRVILADANLDKVLSAYNKHRDKPIREQAENIIHLFTLTNLGAPAAFKYFDTTIDRKRYTSTKEVLDATLIHQSITGLYETRIDLSQLGGDGGGSSEAAAKGGSGGTAPLEEEYRLFLEAPIQNVTLLEQWKREIPKVWAEINPPGLASTQAPIHVQLLSTALPVRVRQYPITLEAKRSLRETIRKFRAAGILRPVHSPWNTPLLPVRKSGTSEYRMVQDLREVNKRVETIHPTVPNPYTLLSLLPPDRIWYSVLDLKDAFFCIPLAPESQLIFAFEWADAEEGESGQLTWTRLPQGFKNSPTLFNEALNRDLQGFRLDHPSVSLLQYVDDLLIAADTQAACLSATRDLLMTLAELGYRVSGKKAQLCQEEVTYLGFKIHKGSRSLSNSRTQAILQIPVPKTKRQVREFLGKIGYCRLFIPGFAELAQPLYAATRPGNDPLVWGEKEEEAFQSLKLALTQPPALALPSLDKPFQLFVEETSGAAKGVLTQALGPWKRPVAYLSKRLDPVAAGWPRCLRAIAAAALLTREASKLTFGQDIEITSSHNLESLLRSPPDKWLTNARITQYQVLLLDPPRVRFKQTAALNPATLLPETDDTLPIHHCLDTLDSLTSTRPDLTDQPLAQAEATLFTDGSSYIRDGKRYAGAAVVTLDSVIWAEPLPIGTSAQKAELIALTKALEWSKDKSVNIYTDSRYAFATLHVHGMIYRERGWLTAGGKAIKNAPEILALLTAVWLPKRVAVMHCKGHQKDDAPTSTGNRRADEVAREVAIRPLSTQATISAGKRTADGSEFEKRTADGSEFESPKKKAKVE

SEQ ID NO: 7081 - protein, 2102 aa, synthetic construct
MPAAKRVKLDGGDKKYSIGLDIGTNSVGWAVITDEYKVPSKKFKVLGNTDRHSIKKNLIGALLFDSGETAEATRLKRTARRRYTRRKNRICYLQEIFSNEMAKVDDSFFHRLEESFLVEEDKKHERHPIFGNIVDEVAYHEKYPTIYHLRKKLVDSTDKADLRLIYLALAHMIKFRGHFLIEGDLNPDNSDVDKLFIQLVQTYNQLFEENPINASGVDAKAILSARLSKSRRLENLIAQLPGEKKNGLFGNLIALSLGLTPNFKSNFDLAEDAKLQLSKDTYDDDLDNLLAQIGDQYADLFLAAKNLSDAILLSDILRVNTEITKAPLSASMIKRYDEHHQDLTLLKALVRQQLPEKYKEIFFDQSKNGYAGYIDGGASQEEFYKFIKPILEKMDGTEELLVKLNREDLLRKQRTFDNGSIPHQIHLGELHAILRRQEDFYPFLKDNREKIEKILTFRIPYYVGPLARGNSRFAWMTRKSEETITPWNFEEVVDKGASAQSFIERMTNFDKNLPNEKVLPKHSLLYEYFTVYNELTKVKYVTEGMRKPAFLSGEQKKAIVDLLFKTNRKVTVKQLKEDYFKKIECFDSVEISGVEDRFNASLGTYHDLLKIIKDKDFLDNEENEDILEDIVLTLTLFEDREMIEERLKTYAHLFDDKVMKQLKRRRYTGWGRLSRKLINGIRDKQSGKTILDFLKSDGFANRNFMQLIHDDSLTFKEDIQKAQVSGQGDSLHEHIANLAGSPAIKKGILQTVKVVDELVKVMGRHKPENIVIEMARENQTTQKGQKNSRERMKRIEEGIKELGSQILKEHPVENTQLQNEKLYLYYLQNGRDMYVDQELDINRLSDYDVDHIVPQSFLKDDSIDNKVLTRSDKARGKSDNVPSEEVVKKMKNYWRQLLNAKLITQRKFDNLTKAERGGLSELDKAGFIKRQLVETRQITKHVAQILDSRMNTKYDENDKLIREVKVITLKSKLVSDFRKDFQFYKVREINNYHHAHDAYLNAVVGTALIKKYPKLESEFVYGDYKVYDVRKMIAKSEQEIGKATAKYFFYSNIMNFFKTEITLANGEIRKRPLIETNGETGEIVWDKGRDFATVRKVLSMPQVNIVKKTEVQTGGFSKESILPKRNSDKLIARKKDWDPKKYGGFDSPTVAYSVLVVAKVEKGKSKKLKSVKELLGITIMERSSFEKNPIDFLEAKGYKEVKKDLIIKLPKYSLFELENGRKRMLASAGELQKGNELALPSKYVNFLYLASHYEKLKGSPEDNEQKQLFVEQHKHYLDEIIEQISEFSKRVILADANLDKVLSAYNKHRDKPIREQAENIIHLFTLTNLGAPAAFKYFDTTIDRKRYTSTKEVLDATLIHQSITGLYETRIDLSQLGGDGGGSSEAAAKGGSGGTVSLQDEHRLFDIPVTTSLPDVWLQDFPQAWAETGGLGRAKCQAPIIIDLKPTAVPVSIKQYPMSLEAHMGIRQHIIKFLELGVLRPCRSPWNTPLLPVKKPGTQDYRPVQDLREINKRTVDIHPTVPNPYNLLSTLKPDYSWYTVLDLKDAFFCLPLAPQSQELFAFEWKDPERGISGQLTWTRLPQGFKNSPTLFNEALHRDLTDFRTQHPEVTLLQYVDDLLLAAPTKKACTQGTRHLLQELGEKGYRASAKKAQICQTKVTYLGYILSEGKRWLTPGRIETVARIPPPRNPREVREFLGTAGFCRLWIPGFAELAAPLYALTKPSTPFTWQTEHQLAFEALKKALLSAPALGLPDTSKPFTLFLDERQGIAKGVLTQKLGPWKRPVAYLSKKLDPVAAGWPPCLRIMAATAMLVKDSAKLTLGQPLTVITPHTLEAIVRQPPDRWITNARLTHYQALLLDTDRVQFGPPVTLNPATLLPVPENQPSPHDCRQVLAETHGTREDLKDQELPDADHTWYTDGSSYLDSGTRRAGAAVVDGHNTIWAQSLPPGTSAQKAELIALTKALELSKGKKANIYTDSRYAFATAHTHGSIYERRGWLTSEGKEIKNKAEIIALLKALFLPQEVAIIHCPGHQKGQDPVAVGNRQADRVARQAAMAEVLTLATEPDNTSHITAGKRTADGSEFEKRTADGSEFESPKKKAKVE

SEQ ID NO: 7082 - protein, 2095 aa, synthetic construct
MPAAKRVKLDGGDKKYSIGLDIGTNSVGWAVITDEYKVPSKKFKVLGNTDRHSIKKNLIGALLFDSGETAEATRLKRTARRRYTRRKNRICYLQEIFSNEMAKVDDSFFHRLEESFLVEEDKKHERHPIFGNIVDEVAYHEKYPTIYHLRKKLVDSTDKADLRLIYLALAHMIKFRGHFLIEGDLNPDNSDVDKLFIQLVQTYNQLFEENPINASGVDAKAILSARLSKSRRLENLIAQLPGEKKNGLFGNLIALSLGLTPNFKSNFDLAEDAKLQLSKDTYDDDLDNLLAQIGDQYADLFLAAKNLSDAILLSDILRVNTEITKAPLSASMIKRYDEHHQDLTLLKALVRQQLPEKYKEIFFDQSKNGYAGYIDGGASQEEFYKFIKPILEKMDGTEELLVKLNREDLLRKQRTFDNGSIPHQIHLGELHAILRRQEDFYPFLKDNREKIEKILTFRIPYYVGPLARGNSRFAWMTRKSEETITPWNFEEVVDKGASAQSFIERMTNFDKNLPNEKVLPKHSLLYEYFTVYNELTKVKYVTEGMRKPAFLSGEQKKAIVDLLFKTNRKVTVKQLKEDYFKKIECFDSVEISGVEDRFNASLGTYHDLLKIIKDKDFLDNEENEDILEDIVLTLTLFEDREMIEERLKTYAHLFDDKVMKQLKRRRYTGWGRLSRKLINGIRDKQSGKTILDFLKSDGFANRNFMQLIHDDSLTFKEDIQKAQVSGQGDSLHEHIANLAGSPAIKKGILQTVKVVDELVKVMGRHKPENIVIEMARENQTTQKGQKNSRERMKRIEEGIKELGSQILKEHPVENTQLQNEKLYLYYLQNGRDMYVDQELDINRLSDYDVDHIVPQSFLKDDSIDNKVLTRSDKARGKSDNVPSEEVVKKMKNYWRQLLNAKLITQRKFDNLTKAERGGLSELDKAGFIKRQLVETRQITKHVAQILDSRMNTKYDENDKLIREVKVITLKSKLVSDFRKDFQFYKVREINNYHHAHDAYLNAVVGTALIKKYPKLESEFVYGDYKVYDVRKMIAKSEQEIGKATAKYFFYSNIMNFFKTEITLANGEIRKRPLIETNGETGEIVWDKGRDFATVRKVLSMPQVNIVKKTEVQTGGFSKESILPKRNSDKLIARKKDWDPKKYGGFDSPTVAYSVLVVAKVEKGKSKKLKSVKELLGITIMERSSFEKNPIDFLEAKGYKEVKKDLIIKLPKYSLFELENGRKRMLASAGELQKGNELALPSKYVNFLYLASHYEKLKGSPEDNEQKQLFVEQHKHYLDEIIEQISEFSKRVILADANLDKVLSAYNKHRDKPIREQAENIIHLFTLTNLGAPAAFKYFDTTIDRKRYTSTKEVLDATLIHQSITGLYETRIDLSQLGGDGGGSSEAAAKGGSGGTLQLEEEYRLFEPESTQKQEMDIWLKNFPQAWAETGGMGTAHCQAPVLIQLKATATPISIRQYPMPHEAYQGIKPHIRRMLDQGILKPCQSPWNTPLLPVKKPGTEDYRPVQDLREVNKRVEDIHPTVPNPYNLLSTLPPSHPWYTVLDLKDAFFCLRLHSESQLLFAFEWRDPEIGLSGQLTWTRLPQGFKNSPTLFNEALHSDLADFRVRYPALVLLQYVDDLLLAAATRTECLEGTKALLETLGNKGYRASAKKAQICLQEVTYLGYSLKDGQRWLTKARKEAILSIPVPKNSRQVREFLGTAGYCRLWIPGFAELAAPLYPLTRPGTLFQWGTEQQLAFEDIKKALLSSPALGLPDITKPFELFIDENSGFAKGVLVQKLGPWKRPVAYLSKKLDTVASGWPPCLRMVAAIAILVKDAGKLTLGQPLTILTSHPVEALVRQPPNKWLSNARMTHYQAMLLDAERVHFGPTVSLNPATLLPLPSGGNHHDCLQILAETHGTRPDLTDQPLPDADLTWYTDGSSFIRNGEREAGAAVTTESEVIWAAPLPPGTSAQRAELIALTQALKMAEGKKLTVYTDSRYAFATTHVHGEIYRRRGWLTSEGKEIKNKNEILALLEALFLPKRLSIIHCPGHQKGDSPQAKGNRLADDTAKKAATETHSSLTVLPAGKRTADGSEFEKRTADGSEFESPKKKAKVE

SEQ ID NO: 7083 - protein, 2176 aa, synthetic construct
MPAAKRVKLDGGDKKYSIGLDIGTNSVGWAVITDEYKVPSKKFKVLGNTDRHSIKKNLIGALLFDSGETAEATRLKRTARRRYTRRKNRICYLQEIFSNEMAKVDDSFFHRLEESFLVEEDKKHERHPIFGNIVDEVAYHEKYPTIYHLRKKLVDSTDKADLRLIYLALAHMIKFRGHFLIEGDLNPDNSDVDKLFIQLVQTYNQLFEENPINASGVDAKAILSARLSKSRRLENLIAQLPGEKKNGLFGNLIALSLGLTPNFKSNFDLAEDAKLQLSKDTYDDDLDNLLAQIGDQYADLFLAAKNLSDAILLSDILRVNTEITKAPLSASMIKRYDEHHQDLTLLKALVRQQLPEKYKEIFFDQSKNGYAGYIDGGASQEEFYKFIKPILEKMDGTEELLVKLNREDLLRKQRTFDNGSIPHQIHLGELHAILRRQEDFYPFLKDNREKIEKILTFRIPYYVGPLARGNSRFAWMTRKSEETITPWNFEEVVDKGASAQSFIERMTNFDKNLPNEKVLPKHSLLYEYFTVYNELTKVKYVTEGMRKPAFLSGEQKKAIVDLLFKTNRKVTVKQLKEDYFKKIECFDSVEISGVEDRFNASLGTYHDLLKIIKDKDFLDNEENEDILEDIVLTLTLFEDREMIEERLKTYAHLFDDKVMKQLKRRRYTGWGRLSRKLINGIRDKQSGKTILDFLKSDGFANRNFMQLIHDDSLTFKEDIQKAQVSGQGDSLHEHIANLAGSPAIKKGILQTVKVVDELVKVMGRHKPENIVIEMARENQTTQKGQKNSRERMKRIEEGIKELGSQILKEHPVENTQLQNEKLYLYYLQNGRDMYVDQELDINRLSDYDVDHIVPQSFLKDDSIDNKVLTRSDKARGKSDNVPSEEVVKKMKNYWRQLLNAKLITQRKFDNLTKAERGGLSELDKAGFIKRQLVETRQITKHVAQILDSRMNTKYDENDKLIREVKVITLKSKLVSDFRKDFQFYKVREINNYHHAHDAYLNAVVGTALIKKYPKLESEFVYGDYKVYDVRKMIAKSEQEIGKATAKYFFYSNIMNFFKTEITLANGEIRKRPLIETNGETGEIVWDKGRDFATVRKVLSMPQVNIVKKTEVQTGGFSKESILPKRNSDKLIARKKDWDPKKYGGFDSPTVAYSVLVVAKVEKGKSKKLKSVKELLGITIMERSSFEKNPIDFLEAKGYKEVKKDLIIKLPKYSLFELENGRKRMLASAGELQKGNELALPSKYVNFLYLASHYEKLKGSPEDNEQKQLFVEQHKHYLDEIIEQISEFSKRVILADANLDKVLSAYNKHRDKPIREQAENIIHLFTLTNLGAPAAFKYFDTTIDRKRYTSTKEVLDATLIHQSITGLYETRIDLSQLGGDGGGSSEAAAKGGSGGMNPLQLLQPLPAEIKGTKLLAHWNSGATITCIPESFLEDEQPIKKTLIKTIHGEKQQNVYYVTFKVKGRKVEAEVIASPYEYILLSPTDVPWLTQQPLQLTILVPLQEYQEKILSKTALPEDQKQQLKTLFVKYDNLWQHWENQVGHRKIRPHNIATGDYPPRPQKQYPINPKAKPSIQIVIDDLLKQGVLTPQNSTMNTPVYPVPKPDGRWRMVLDYREVNKTIPLTAAQNQHSAGILATIVRQKYKTTLDLANGFWAHPITPESYWLTAFTWQGKQYCWTRLPQGFLNSPALFTADVVDLLKEIPNVQVYVDDIYLSHDDPKEHVQQLEKVFQILLQAGYVVSLKKSEIGQKTVEFLGFNITKEGRGLTDTFKTKLLNITPPKDLKQLQSILGLLNFARNFIPNFAELVQPLYNLIASAKGKYIEWSEENTKQLNMVIEALNTASNLEERLPEQRLVIKVNTSPSAGYVRYYNETGKKPIMYLNYVFSKAELKFSMLEKLLTTMHKALIKAMDLAMGQEILVYSPIVSMTKIQKTPLPERKALPIRWITWMTYLEDPRIQFHYDKTLPELKHIPDVYTSSQSPVKHPSQYEGVFYTDGSAIKSPDPTKSNNAGMGIVHATYKPEYQVLNQWSIPLGNHTAQMAEIAAVEFACKKALKIPGPVLVITDSFYVAESANKELPYWKSNGFVNNKKKPLKHISKWKSIAECLSMKPDITIQHEKGISLQIPVFILKGNALADKLATQGSYVVNAGKRTADGSEFEKRTADGSEFESPKKKAKVE

SEQ ID NO: 7084 - protein, 2218 aa, synthetic construct
MPAAKRVKLDGGDKKYSIGLDIGTNSVGWAVITDEYKVPSKKFKVLGNTDRHSIKKNLIGALLFDSGETAEATRLKRTARRRYTRRKNRICYLQEIFSNEMAKVDDSFFHRLEESFLVEEDKKHERHPIFGNIVDEVAYHEKYPTIYHLRKKLVDSTDKADLRLIYLALAHMIKFRGHFLIEGDLNPDNSDVDKLFIQLVQTYNQLFEENPINASGVDAKAILSARLSKSRRLENLIAQLPGEKKNGLFGNLIALSLGLTPNFKSNFDLAEDAKLQLSKDTYDDDLDNLLAQIGDQYADLFLAAKNLSDAILLSDILRVNTEITKAPLSASMIKRYDEHHQDLTLLKALVRQQLPEKYKEIFFDQSKNGYAGYIDGGASQEEFYKFIKPILEKMDGTEELLVKLNREDLLRKQRTFDNGSIPHQIHLGELHAILRRQEDFYPFLKDNREKIEKILTFRIPYYVGPLARGNSRFAWMTRKSEETITPWNFEEVVDKGASAQSFIERMTNFDKNLPNEKVLPKHSLLYEYFTVYNELTKVKYVTEGMRKPAFLSGEQKKAIVDLLFKTNRKVTVKQLKEDYFKKIECFDSVEISGVEDRFNASLGTYHDLLKIIKDKDFLDNEENEDILEDIVLTLTLFEDREMIEERLKTYAHLFDDKVMKQLKRRRYTGWGRLSRKLINGIRDKQSGKTILDFLKSDGFANRNFMQLIHDDSLTFKEDIQKAQVSGQGDSLHEHIANLAGSPAIKKGILQTVKVVDELVKVMGRHKPENIVIEMARENQTTQKGQKNSRERMKRIEEGIKELGSQILKEHPVENTQLQNEKLYLYYLQNGRDMYVDQELDINRLSDYDVDHIVPQSFLKDDSIDNKVLTRSDKARGKSDNVPSEEVVKKMKNYWRQLLNAKLITQRKFDNLTKAERGGLSELDKAGFIKRQLVETRQITKHVAQILDSRMNTKYDENDKLIREVKVITLKSKLVSDFRKDFQFYKVREINNYHHAHDAYLNAVVGTALIKKYPKLESEFVYGDYKVYDVRKMIAKSEQEIGKATAKYFFYSNIMNFFKTEITLANGEIRKRPLIETNGETGEIVWDKGRDFATVRKVLSMPQVNIVKKTEVQTGGFSKESILPKRNSDKLIARKKDWDPKKYGGFDSPTVAYSVLVVAKVEKGKSKKLKSVKELLGITIMERSSFEKNPIDFLEAKGYKEVKKDLIIKLPKYSLFELENGRKRMLASAGELQKGNELALPSKYVNFLYLASHYEKLKGSPEDNEQKQLFVEQHKHYLDEIIEQISEFSKRVILADANLDKVLSAYNKHRDKPIREQAENIIHLFTLTNLGAPAAFKYFDTTIDRKRYTSTKEVLDATLIHQSITGLYETRIDLSQLGGDGGGSSEAAAKGGSGGTLGDQGSRGSDPLPEPRVTLTVEGIPTEFLVNTGAEHSVLTKPMGKMGSKRTVVAGATGSKVYPWTTKRLLKIGQKQVTHSFLVIPECPAPLLGRDLLTKLKAQIQFSTEGPQVTWEDRPAMCLVLNLEEEYRLHEKPVPPSIDPSWLQLFPMVWAEKAGMGLANQVPPVVVELKSDASPVAVRQYPMSKEAREGIRPHIQRFLDLGILVPCQSPWNTPLLPVKKPGTNDYRPVQDLREVNKRVQDIHPTVPNPYNLLSSLPPSHTWYSVLDLKDAFFCLKLHPNSQPLFAFEWRDPEKGNTGQLTWTRLPQGFKNSPTLFNEALHRDLASFRALNPQVVMLQYVDDLLVAAPTYRDCKEGTRRLLQELSKLGYRVSAKKAQLCREEVTYLGYLLKGGKRWLTPARKATVMKIPTPTTPRQVREFLGTAGFCRLWIPGFASLAAPLYPLTRPKVPFTWTEAHQEAFGRIKEALLSAPALALPDLTKPFALYVDEKEGVARGVLTQTLGPWRRPVAYLSKKLDPVASGWPTCLKAIAAVALLLKDADKLTLGQNVLVIAPHNLESIVRQPPDRWMTNARMTHYQSLLLNERVSFAPPAILNPATLLPVESDDTPIHICSEILAEETGTRPDLRDQPLPGVPAWYTDGSSFIMDGRRQAGAAIVDNKRTVWASNLPEGTSAQKAELIALTQALRLAEGKSINIYTDSRYAFATAHVHGAIYKQRGWLTSAGKDIKNKEEILALLEAIHLPKRVAIIHCPGHQRGTDPVATGNRKADEAAKQAAQSTRILTETTKNAGKRTADGSEFEKRTADGSEFESPKKKAKVE

SEQ ID NO: 7085 - protein, 2096 aa, synthetic construct
MPAAKRVKLDGGDKKYSIGLDIGTNSVGWAVITDEYKVPSKKFKVLGNTDRHSIKKNLIGALLFDSGETAEATRLKRTARRRYTRRKNRICYLQEIFSNEMAKVDDSFFHRLEESFLVEEDKKHERHPIFGNIVDEVAYHEKYPTIYHLRKKLVDSTDKADLRLIYLALAHMIKFRGHFLIEGDLNPDNSDVDKLFIQLVQTYNQLFEENPINASGVDAKAILSARLSKSRRLENLIAQLPGEKKNGLFGNLIALSLGLTPNFKSNFDLAEDAKLQLSKDTYDDDLDNLLAQIGDQYADLFLAAKNLSDAILLSDILRVNTEITKAPLSASMIKRYDEHHQDLTLLKALVRQQLPEKYKEIFFDQSKNGYAGYIDGGASQEEFYKFIKPILEKMDGTEELLVKLNREDLLRKQRTFDNGSIPHQIHLGELHAILRRQEDFYPFLKDNREKIEKILTFRIPYYVGPLARGNSRFAWMTRKSEETITPWNFEEVVDKGASAQSFIERMTNFDKNLPNEKVLPKHSLLYEYFTVYNELTKVKYVTEGMRKPAFLSGEQKKAIVDLLFKTNRKVTVKQLKEDYFKKIECFDSVEISGVEDRFNASLGTYHDLLKIIKDKDFLDNEENEDILEDIVLTLTLFEDREMIEERLKTYAHLFDDKVMKQLKRRRYTGWGRLSRKLINGIRDKQSGKTILDFLKSDGFANRNFMQLIHDDSLTFKEDIQKAQVSGQGDSLHEHIANLAGSPAIKKGILQTVKVVDELVKVMGRHKPENIVIEMARENQTTQKGQKNSRERMKRIEEGIKELGSQILKEHPVENTQLQNEKLYLYYLQNGRDMYVDQELDINRLSDYDVDHIVPQSFLKDDSIDNKVLTRSDKARGKSDNVPSEEVVKKMKNYWRQLLNAKLITQRKFDNLTKAERGGLSELDKAGFIKRQLVETRQITKHVAQILDSRMNTKYDENDKLIREVKVITLKSKLVSDFRKDFQFYKVREINNYHHAHDAYLNAVVGTALIKKYPKLESEFVYGDYKVYDVRKMIAKSEQEIGKATAKYFFYSNIMNFFKTEITLANGEIRKRPLIETNGETGEIVWDKGRDFATVRKVLSMPQVNIVKKTEVQTGGFSKESILPKRNSDKLIARKKDWDPKKYGGFDSPTVAYSVLVVAKVEKGKSKKLKSVKELLGITIMERSSFEKNPIDFLEAKGYKEVKKDLIIKLPKYSLFELENGRKRMLASAGELQKGNELALPSKYVNFLYLASHYEKLKGSPEDNEQKQLFVEQHKHYLDEIIEQISEFSKRVILADANLDKVLSAYNKHRDKPIREQAENIIHLFTLTNLGAPAAFKYFDTTIDRKRYTSTKEVLDATLIHQSITGLYETRIDLSQLGGDGGGSSEAAAKGGSGGTLNLEDEYRLYETSAEPEVSPGSTWLSDFPQAWAETGGMGLAVRQAPLIIPLKATSTPVSIKQYPMSQEAKLGIKPHIQRLLDQGILVPCQSPWNTPLLPVKKPGTNDYRPVQDLREVNKRVEDIHPTVPNPYNLLSGLPPSHRWYTVLDLKDAFFCLRLHPTSQPLFAFEWRDPGMGISGQLTWTRLPQGFKNSPTLFNEALHRDLADFRIQHPDLILLQYVDDILLAATSELDCQQGTRALLLTLGNLGYRASAKKAQLCQKQVKYLGYLLKEGQRWLTEARKETVMGQPTPKTPRQLREFLGTAGFCRLWIPGFAEMAAPLYPLTKPGTLFNWGPDQQKAYQEIKQALLTAPALGLPDLTKPFELFVDEKQGYAKGVLTQKLGPWRRPVAYLSKKLDPVAAGWPPCLRMVAAIAVLRKDAGKLTMGQPLVILAPHAVEALVKQPPDRWLSNARMTHYQAMLLDTDRVQFGPVVALNPATLLPLPEEGAPHDCLEILAETHGTRPDLTDQPIPDADHTWYTDGSSFLQEGQRKAGAAVTTETEVIWARALPAGTSAQRAELIALTQALKMAEGKRLNVYTDSRYAFATAHIHGEIYRRRGWLTSEGREIKNKSEILALLKALFLPKRLSIIHCLGHQKGDSAEARGNRLADQAAREAAIKTPPDTSTLLAGKRTADGSEFEKRTADGSEFESPKKKAKVE

SEQ ID NO: 7086 - protein, 2096 aa, synthetic construct
MPAAKRVKLDGGDKKYSIGLDIGTNSVGWAVITDEYKVPSKKFKVLGNTDRHSIKKNLIGALLFDSGETAEATRLKRTARRRYTRRKNRICYLQEIFSNEMAKVDDSFFHRLEESFLVEEDKKHERHPIFGNIVDEVAYHEKYPTIYHLRKKLVDSTDKADLRLIYLALAHMIKFRGHFLIEGDLNPDNSDVDKLFIQLVQTYNQLFEENPINASGVDAKAILSARLSKSRRLENLIAQLPGEKKNGLFGNLIALSLGLTPNFKSNFDLAEDAKLQLSKDTYDDDLDNLLAQIGDQYADLFLAAKNLSDAILLSDILRVNTEITKAPLSASMIKRYDEHHQDLTLLKALVRQQLPEKYKEIFFDQSKNGYAGYIDGGASQEEFYKFIKPILEKMDGTEELLVKLNREDLLRKQRTFDNGSIPHQIHLGELHAILRRQEDFYPFLKDNREKIEKILTFRIPYYVGPLARGNSRFAWMTRKSEETITPWNFEEVVDKGASAQSFIERMTNFDKNLPNEKVLPKHSLLYEYFTVYNELTKVKYVTEGMRKPAFLSGEQKKAIVDLLFKTNRKVTVKQLKEDYFKKIECFDSVEISGVEDRFNASLGTYHDLLKIIKDKDFLDNEENEDILEDIVLTLTLFEDREMIEERLKTYAHLFDDKVMKQLKRRRYTGWGRLSRKLINGIRDKQSGKTILDFLKSDGFANRNFMQLIHDDSLTFKEDIQKAQVSGQGDSLHEHIANLAGSPAIKKGILQTVKVVDELVKVMGRHKPENIVIEMARENQTTQKGQKNSRERMKRIEEGIKELGSQILKEHPVENTQLQNEKLYLYYLQNGRDMYVDQELDINRLSDYDVDHIVPQSFLKDDSIDNKVLTRSDKARGKSDNVPSEEVVKKMKNYWRQLLNAKLITQRKFDNLTKAERGGLSELDKAGFIKRQLVETRQITKHVAQILDSRMNTKYDENDKLIREVKVITLKSKLVSDFRKDFQFYKVREINNYHHAHDAYLNAVVGTALIKKYPKLESEFVYGDYKVYDVRKMIAKSEQEIGKATAKYFFYSNIMNFFKTEITLANGEIRKRPLIETNGETGEIVWDKGRDFATVRKVLSMPQVNIVKKTEVQTGGFSKESILPKRNSDKLIARKKDWDPKKYGGFDSPTVAYSVLVVAKVEKGKSKKLKSVKELLGITIMERSSFEKNPIDFLEAKGYKEVKKDLIIKLPKYSLFELENGRKRMLASAGELQKGNELALPSKYVNFLYLASHYEKLKGSPEDNEQKQLFVEQHKHYLDEIIEQISEFSKRVILADANLDKVLSAYNKHRDKPIREQAENIIHLFTLTNLGAPAAFKYFDTTIDRKRYTSTKEVLDATLIHQSITGLYETRIDLSQLGGDGGGSSEAAAKGGSGGTLGIEDEYRLHETSTEPDVSLGSTWLSDFPQAWAETGGMGLAVRQAPLIIPLKATSTPVSIQQYPMSHEARLGIKPHIQRLLDQGILVPCQSPWNTPLLPVKKPGTNDYRPVQDLREVNKRVEDIHPTVPNPYNLLSGLPPSHQWYTVLDLKDAFFCLRLHPTSQPLFAFEWRDPGMGISGQLTWTRLPQGFKNSPTLFNEALHRDLADFRIQHPDLILLQYVDDILLAATSELDCQQGTRALLQTLGDLGYRASAKKAQICQKQVKYLGYLLREGQRWLTEARKETVMGQPVPKTPRQLREFLGTAGFCRLWIPGFAEMAAPLYPLTKPGTLFSWGPDQQKAYQEIKQALLTAPALGLPDLTKPFELFVDEKQGYAKGVLTQKLGPWRRPVAYLSKKLDPVAAGWPPCLRMVAAIAVLTKDAGKLTMGQPLVILAPHAVEALVKQPPDRWLSNARMTHYQAMLLDTDRVQFGPVVALNPATLLPLPEEGAPHDCLEILAETHGTRPDLTDQPIPDADHTWYTDGSSFLQEGQRKAGAAVTTETEVIWAGALPAGTSAQRAELIALTQALKMAEGKRLNVYTDSRYAFATAHIHGEIYRRRGWLTSEGREIKNKSEILALLKALFLPKRLSIIHCLGHQKGDSAEARGNRLADQAAREAAIKTPPDTSTLLAGKRTADGSEFEKRTADGSEFESPKKKAKVE

SEQ ID NO: 7087 - protein, 2096 aa, synthetic construct
MPAAKRVKLDGGDKKYSIGLDIGTNSVGWAVITDEYKVPSKKFKVLGNTDRHSIKKNLIGALLFDSGETAEATRLKRTARRRYTRRKNRICYLQEIFSNEMAKVDDSFFHRLEESFLVEEDKKHERHPIFGNIVDEVAYHEKYPTIYHLRKKLVDSTDKADLRLIYLALAHMIKFRGHFLIEGDLNPDNSDVDKLFIQLVQTYNQLFEENPINASGVDAKAILSARLSKSRRLENLIAQLPGEKKNGLFGNLIALSLGLTPNFKSNFDLAEDAKLQLSKDTYDDDLDNLLAQIGDQYADLFLAAKNLSDAILLSDILRVNTEITKAPLSASMIKRYDEHHQDLTLLKALVRQQLPEKYKEIFFDQSKNGYAGYIDGGASQEEFYKFIKPILEKMDGTEELLVKLNREDLLRKQRTFDNGSIPHQIHLGELHAILRRQEDFYPFLKDNREKIEKILTFRIPYYVGPLARGNSRFAWMTRKSEETITPWNFEEVVDKGASAQSFIERMTNFDKNLPNEKVLPKHSLLYEYFTVYNELTKVKYVTEGMRKPAFLSGEQKKAIVDLLFKTNRKVTVKQLKEDYFKKIECFDSVEISGVEDRFNASLGTYHDLLKIIKDKDFLDNEENEDILEDIVLTLTLFEDREMIEERLKTYAHLFDDKVMKQLKRRRYTGWGRLSRKLINGIRDKQSGKTILDFLKSDGFANRNFMQLIHDDSLTFKEDIQKAQVSGQGDSLHEHIANLAGSPAIKKGILQTVKVVDELVKVMGRHKPENIVIEMARENQTTQKGQKNSRERMKRIEEGIKELGSQILKEHPVENTQLQNEKLYLYYLQNGRDMYVDQELDINRLSDYDVDHIVPQSFLKDDSIDNKVLTRSDKARGKSDNVPSEEVVKKMKNYWRQLLNAKLITQRKFDNLTKAERGGLSELDKAGFIKRQLVETRQITKHVAQILDSRMNTKYDENDKLIREVKVITLKSKLVSDFRKDFQFYKVREINNYHHAHDAYLNAVVGTALIKKYPKLESEFVYGDYKVYDVRKMIAKSEQEIGKATAKYFFYSNIMNFFKTEITLANGEIRKRPLIETNGETGEIVWDKGRDFATVRKVLSMPQVNIVKKTEVQTGGFSKESILPKRNSDKLIARKKDWDPKKYGGFDSPTVAYSVLVVAKVEKGKSKKLKSVKELLGITIMERSSFEKNPIDFLEAKGYKEVKKDLIIKLPKYSLFELENGRKRMLASAGELQKGNELALPSKYVNFLYLASHYEKLKGSPEDNEQKQLFVEQHKHYLDEIIEQISEFSKRVILADANLDKVLSAYNKHRDKPIREQAENIIHLFTLTNLGAPAAFKYFDTTIDRKRYTSTKEVLDATLIHQSITGLYETRIDLSQLGGDGGGSSEAAAKGGSGGTLNIEDEYRLHETSKGPDVPLGSTWLSDFPQAWAETGGMGLAVRQAPLIIPLKATSTPVSIKQYPMSQEARLGIKPHIQRLLDQGILVPCQSPWNTPLLPVKKPGTNDYRPVQDLREVNKRVEDIHPTVPNPYNLLSGLPPSHQWYTVLDLKDAFFCLRLHPTSQSLFAFEWRDPEMGISGQLTWTRLPQGFKNSPTLFNEALHRDLADFRIQHPDLILLQYVDDLLLAATSELDCQQGTRALLQTLGDLGYRASAKKAQICQKQVKYLGYLLKEGQRWLTEARKETVMGQPTPKTPRQLREFLGTAGFCRLWIPGFAEMAAPLYPLTKPGTLFEWGPDQQKAYQEIKQALLTAPALGLPDLTKPFELFVDEKQGYAKGVLTQKLGPWRRPVAYLSKKLDPVAAGWPPCLRMVAAIAVLTKDAGKLTMGQPLVILAPHAVEALVKQPPDRWLSNARMTHYQALLLDTDRVQFGPIVALNPATLLPLPEEGLQHDCLDILAEAHGTRPDLTDQPLPDADHTWYTDGSSFLQEGQRKAGAAVTTETEVVWAKALPAGTSAQRAELIALTQALKMAEGKKLNVYTDSRYAFATAHIHGEIYRRRGWLTSEGKEIKNKDEILALLKALFLPKRLSIIHCPGHQKGNRAEARGNRMADQAAREVATRETPETSTLLAGKRTADGSEFEKRTADGSEFESPKKKAKVE

SEQ ID NO: 7088 - protein, 2096 aa, synthetic construct
MPAAKRVKLDGGDKKYSIGLDIGTNSVGWAVITDEYKVPSKKFKVLGNTDRHSIKKNLIGALLFDSGETAEATRLKRTARRRYTRRKNRICYLQEIFSNEMAKVDDSFFHRLEESFLVEEDKKHERHPIFGNIVDEVAYHEKYPTIYHLRKKLVDSTDKADLRLIYLALAHMIKFRGHFLIEGDLNPDNSDVDKLFIQLVQTYNQLFEENPINASGVDAKAILSARLSKSRRLENLIAQLPGEKKNGLFGNLIALSLGLTPNFKSNFDLAEDAKLQLSKDTYDDDLDNLLAQIGDQYADLFLAAKNLSDAILLSDILRVNTEITKAPLSASMIKRYDEHHQDLTLLKALVRQQLPEKYKEIFFDQSKNGYAGYIDGGASQEEFYKFIKPILEKMDGTEELLVKLNREDLLRKQRTFDNGSIPHQIHLGELHAILRRQEDFYPFLKDNREKIEKILTFRIPYYVGPLARGNSRFAWMTRKSEETITPWNFEEVVDKGASAQSFIERMTNFDKNLPNEKVLPKHSLLYEYFTVYNELTKVKYVTEGMRKPAFLSGEQKKAIVDLLFKTNRKVTVKQLKEDYFKKIECFDSVEISGVEDRFNASLGTYHDLLKIIKDKDFLDNEENEDILEDIVLTLTLFEDREMIEERLKTYAHLFDDKVMKQLKRRRYTGWGRLSRKLINGIRDKQSGKTILDFLKSDGFANRNFMQLIHDDSLTFKEDIQKAQVSGQGDSLHEHIANLAGSPAIKKGILQTVKVVDELVKVMGRHKPENIVIEMARENQTTQKGQKNSRERMKRIEEGIKELGSQILKEHPVENTQLQNEKLYLYYLQNGRDMYVDQELDINRLSDYDVDHIVPQSFLKDDSIDNKVLTRSDKARGKSDNVPSEEVVKKMKNYWRQLLNAKLITQRKFDNLTKAERGGLSELDKAGFIKRQLVETRQITKHVAQILDSRMNTKYDENDKLIREVKVITLKSKLVSDFRKDFQFYKVREINNYHHAHDAYLNAVVGTALIKKYPKLESEFVYGDYKVYDVRKMIAKSEQEIGKATAKYFFYSNIMNFFKTEITLANGEIRKRPLIETNGETGEIVWDKGRDFATVRKVLSMPQVNIVKKTEVQTGGFSKESILPKRNSDKLIARKKDWDPKKYGGFDSPTVAYSVLVVAKVEKGKSKKLKSVKELLGITIMERSSFEKNPIDFLEAKGYKEVKKDLIIKLPKYSLFELENGRKRMLASAGELQKGNELALPSKYVNFLYLASHYEKLKGSPEDNEQKQLFVEQHKHYLDEIIEQISEFSKRVILADANLDKVLSAYNKHRDKPIREQAENIIHLFTLTNLGAPAAFKYFDTTIDRKRYTSTKEVLDATLIHQSITGLYETRIDLSQLGGDGGGSSEAAAKGGSGGTLNIEDEHRLHETSKEPDVSLGSTWLSDFPQAWAETGGMGLAVRQAPLIIPLKATSTPVSIKQYPMSQEARLGIKPHIQRLLDQGILVPCQSPWNTPLLPVKKPGTNDYRPVQDLREVNKRVEDIHPTVPNPYNLLSGLPPSHQWYTVLDLKDAFFCLRLHPTSQPLFAFEWRDPEMGISGQLTWTRLPQGFKNSPTLFDEALHRDLADFRIQHPDLILLQYVDDLLLAATSELDCQQGTRALLQTLGNLGYRASAKKAQICQKQVKYLGYLLKEGQRWLTEARKETVMGQPTPKTPRQLREFLGTAGFCRLWIPGFAEMAAPLYPLTKTGTLFNWGPDQQKAYQEIKQALLTAPALGLPDLTKPFELFVDEKQGYAKGVLTQKLGPWRRPVAYLSKKLDPVAAGWPPCLRMVAAIAVLTKDAGKLTMGQPLVILAPHAVEALVKQPPDRWLSNARMTHYQALLLDTDRVQFGPVVALNPATLLPLPEEGLQHNCLDILAEAHGTRPDLTDQPLPDADHTWYTDGSSLLQEGQRKAGAAVTTETEVIWAKALPAGTSAQRAELIALTQALKMAEGKKLNVYTDSRYAFATAHIHGEIYRRRGLLTSEGKEIKNKDEILALLKALFLPKRLSIIHCPGHQKGHSAEARGNRMADQAARKAAITETPDTSTLLAGKRTADGSEFEKRTADGSEFESPKKKAKVE

SEQ ID NO: 7089 - protein, 2096 aa, synthetic construct
MPAAKRVKLDGGDKKYSIGLDIGTNSVGWAVITDEYKVPSKKFKVLGNTDRHSIKKNLIGALLFDSGETAEATRLKRTARRRYTRRKNRICYLQEIFSNEMAKVDDSFFHRLEESFLVEEDKKHERHPIFGNIVDEVAYHEKYPTIYHLRKKLVDSTDKADLRLIYLALAHMIKFRGHFLIEGDLNPDNSDVDKLFIQLVQTYNQLFEENPINASGVDAKAILSARLSKSRRLENLIAQLPGEKKNGLFGNLIALSLGLTPNFKSNFDLAEDAKLQLSKDTYDDDLDNLLAQIGDQYADLFLAAKNLSDAILLSDILRVNTEITKAPLSASMIKRYDEHHQDLTLLKALVRQQLPEKYKEIFFDQSKNGYAGYIDGGASQEEFYKFIKPILEKMDGTEELLVKLNREDLLRKQRTFDNGSIPHQIHLGELHAILRRQEDFYPFLKDNREKIEKILTFRIPYYVGPLARGNSRFAWMTRKSEETITPWNFEEVVDKGASAQSFIERMTNFDKNLPNEKVLPKHSLLYEYFTVYNELTKVKYVTEGMRKPAFLSGEQKKAIVDLLFKTNRKVTVKQLKEDYFKKIECFDSVEISGVEDRFNASLGTYHDLLKIIKDKDFLDNEENEDILEDIVLTLTLFEDREMIEERLKTYAHLFDDKVMKQLKRRRYTGWGRLSRKLINGIRDKQSGKTILDFLKSDGFANRNFMQLIHDDSLTFKEDIQKAQVSGQGDSLHEHIANLAGSPAIKKGILQTVKVVDELVKVMGRHKPENIVIEMARENQTTQKGQKNSRERMKRIEEGIKELGSQILKEHPVENTQLQNEKLYLYYLQNGRDMYVDQELDINRLSDYDVDHIVPQSFLKDDSIDNKVLTRSDKARGKSDNVPSEEVVKKMKNYWRQLLNAKLITQRKFDNLTKAERGGLSELDKAGFIKRQLVETRQITKHVAQILDSRMNTKYDENDKLIREVKVITLKSKLVSDFRKDFQFYKVREINNYHHAHDAYLNAVVGTALIKKYPKLESEFVYGDYKVYDVRKMIAKSEQEIGKATAKYFFYSNIMNFFKTEITLANGEIRKRPLIETNGETGEIVWDKGRDFATVRKVLSMPQVNIVKKTEVQTGGFSKESILPKRNSDKLIARKKDWDPKKYGGFDSPTVAYSVLVVAKVEKGKSKKLKSVKELLGITIMERSSFEKNPIDFLEAKGYKEVKKDLIIKLPKYSLFELENGRKRMLASAGELQKGNELALPSKYVNFLYLASHYEKLKGSPEDNEQKQLFVEQHKHYLDEIIEQISEFSKRVILADANLDKVLSAYNKHRDKPIREQAENIIHLFTLTNLGAPAAFKYFDTTIDRKRYTSTKEVLDATLIHQSITGLYETRIDLSQLGGDGGGSSEAAAKGGSGGTLNIEDEHRLHETSKEPDVSLGSTWLSDFPQAWAETGGMGLAVRQAPLIIPLKATSTPVSIKQYPMSQEARLGIKPHIQRLLDQGILVPCQSPWNTPLLPVKKPGTNDYRPVQDLREVNKRVEDIHPTVPNPYNLLSGLPPSHQWYTVLDLKDAFFCLRLHPTSQPLFAFEWRDPEMGISGQLTWTRLPQGFKNSPTLFNEALHRDLADFRIQHPDLILLQYVDDLLLAATSELDCQQGTRALLQTLGNLGYRASAKKAQICQKQVKYLGYLLKEGQRWLTEARKETVMGQPTPKTPRQLREFLGTAGFCRLWIPGFAEMAAPLYPLTKPGTLFNWGPDQQKAYQEIKQALLTAPALGLPDLTKPFELFVDEKQGYAKGVLTQKLGPWRRPVAYLSKKLDPVAAGWPPCLRMVAAIAVLTKDAGKLTMGQPLVILAPHAVEALVKQPPDRWLSNARMTHYQALLLDTDRVQFGPVVALNPATLLPLPEEGLQHNCLDILAEAHGTRPDLTDQPLPDADHTWYTDGSSLLQEGQRKAGAAVTTETEVIWAKALPAGTSAQRAELIALTQALKMAEGKKLNVYTDSRYAFATAHIHGEIYRRRGWLTSEGKEIKNKDEILALLKALFLPKRLSIIHCPGHQKGHSAEARGNRMADQAARKAAITETPDTSTLLAGKRTADGSEFEKRTADGSEFESPKKKAKVE

SEQ ID NO: 7090 - protein, 2087 aa, synthetic construct
MPAAKRVKLDGGDKKYSIGLDIGTNSVGWAVITDEYKVPSKKFKVLGNTDRHSIKKNLIGALLFDSGETAEATRLKRTARRRYTRRKNRICYLQEIFSNEMAKVDDSFFHRLEESFLVEEDKKHERHPIFGNIVDEVAYHEKYPTIYHLRKKLVDSTDKADLRLIYLALAHMIKFRGHFLIEGDLNPDNSDVDKLFIQLVQTYNQLFEENPINASGVDAKAILSARLSKSRRLENLIAQLPGEKKNGLFGNLIALSLGLTPNFKSNFDLAEDAKLQLSKDTYDDDLDNLLAQIGDQYADLFLAAKNLSDAILLSDILRVNTEITKAPLSASMIKRYDEHHQDLTLLKALVRQQLPEKYKEIFFDQSKNGYAGYIDGGASQEEFYKFIKPILEKMDGTEELLVKLNREDLLRKQRTFDNGSIPHQIHLGELHAILRRQEDFYPFLKDNREKIEKILTFRIPYYVGPLARGNSRFAWMTRKSEETITPWNFEEVVDKGASAQSFIERMTNFDKNLPNEKVLPKHSLLYEYFTVYNELTKVKYVTEGMRKPAFLSGEQKKAIVDLLFKTNRKVTVKQLKEDYFKKIECFDSVEISGVEDRFNASLGTYHDLLKIIKDKDFLDNEENEDILEDIVLTLTLFEDREMIEERLKTYAHLFDDKVMKQLKRRRYTGWGRLSRKLINGIRDKQSGKTILDFLKSDGFANRNFMQLIHDDSLTFKEDIQKAQVSGQGDSLHEHIANLAGSPAIKKGILQTVKVVDELVKVMGRHKPENIVIEMARENQTTQKGQKNSRERMKRIEEGIKELGSQILKEHPVENTQLQNEKLYLYYLQNGRDMYVDQELDINRLSDYDVDHIVPQSFLKDDSIDNKVLTRSDKARGKSDNVPSEEVVKKMKNYWRQLLNAKLITQRKFDNLTKAERGGLSELDKAGFIKRQLVETRQITKHVAQILDSRMNTKYDENDKLIREVKVITLKSKLVSDFRKDFQFYKVREINNYHHAHDAYLNAVVGTALIKKYPKLESEFVYGDYKVYDVRKMIAKSEQEIGKATAKYFFYSNIMNFFKTEITLANGEIRKRPLIETNGETGEIVWDKGRDFATVRKVLSMPQVNIVKKTEVQTGGFSKESILPKRNSDKLIARKKDWDPKKYGGFDSPTVAYSVLVVAKVEKGKSKKLKSVKELLGITIMERSSFEKNPIDFLEAKGYKEVKKDLIIKLPKYSLFELENGRKRMLASAGELQKGNELALPSKYVNFLYLASHYEKLKGSPEDNEQKQLFVEQHKHYLDEIIEQISEFSKRVILADANLDKVLSAYNKHRDKPIREQAENIIHLFTLTNLGAPAAFKYFDTTIDRKRYTSTKEVLDATLIHQSITGLYETRIDLSQLGGDGGGSSEAAAKGGSGGVPWLMKKPLQLTVLVPLHEYQERLLQQTALPKEQKELLQKLFLKYDALWQHWENQVGHRRIKPHNIATGTLAPRPQKQYPINPKAKPSIQIVIDDLLKQGVLIQQNSTMNTPVYPVPKPDGKWRMVLDYREVNKTIPLIAAQNQHSAGILSSIYRGKYKTTLDLTNGFWAHPITPESYWLTAFTWQGKQYCWTRLPQGFLNSPALFTADVVDLLKEIPNVQAYVDDIYISHDDPQEHLEQLEKIFSILLNAGYVVSLKKSEIAQREVEFLGFNITKEGRGLTDTFKQKLLNITPPKDLKQLQSILGLLNFARNFIPNYSELVKPLYTIVANANGKFISWTEDNSNQLQHIISVLNQADNLEERNPETRLIIKVNSSPSAGYIRYYNEGSKRPIMYVNYIFSKAEAKFTQTEKLLTTMHKGLIKAMDLAMGQEILVYSPIVSMTKIQRTPLPERKALPVRWITWMTYLEDPRIQFHYDKSLPELQQIPNVTEDVIAKTKHPSEFAMVFYTDGSAIKHPDVNKSHSAGMGIAQVQFIPEYKIVHQWSIPLGDHTAQLAEIAAVEFACKKALKISGPVLIVTDSFYVAESANKELPYWKSNGFLNNKKKPLRHVSKWKSIAECLQLKPDIIIMHEKGHQQPMTTLHTEGNNLADKLATQGSYVVHAGKRTADGSEFEKRTADGSEFESPKKKAKVE

SEQ ID NO: 7091 - protein, 2087 aa, synthetic construct
MPAAKRVKLDGGDKKYSIGLDIGTNSVGWAVITDEYKVPSKKFKVLGNTDRHSIKKNLIGALLFDSGETAEATRLKRTARRRYTRRKNRICYLQEIFSNEMAKVDDSFFHRLEESFLVEEDKKHERHPIFGNIVDEVAYHEKYPTIYHLRKKLVDSTDKADLRLIYLALAHMIKFRGHFLIEGDLNPDNSDVDKLFIQLVQTYNQLFEENPINASGVDAKAILSARLSKSRRLENLIAQLPGEKKNGLFGNLIALSLGLTPNFKSNFDLAEDAKLQLSKDTYDDDLDNLLAQIGDQYADLFLAAKNLSDAILLSDILRVNTEITKAPLSASMIKRYDEHHQDLTLLKALVRQQLPEKYKEIFFDQSKNGYAGYIDGGASQEEFYKFIKPILEKMDGTEELLVKLNREDLLRKQRTFDNGSIPHQIHLGELHAILRRQEDFYPFLKDNREKIEKILTFRIPYYVGPLARGNSRFAWMTRKSEETITPWNFEEVVDKGASAQSFIERMTNFDKNLPNEKVLPKHSLLYEYFTVYNELTKVKYVTEGMRKPAFLSGEQKKAIVDLLFKTNRKVTVKQLKEDYFKKIECFDSVEISGVEDRFNASLGTYHDLLKIIKDKDFLDNEENEDILEDIVLTLTLFEDREMIEERLKTYAHLFDDKVMKQLKRRRYTGWGRLSRKLINGIRDKQSGKTILDFLKSDGFANRNFMQLIHDDSLTFKEDIQKAQVSGQGDSLHEHIANLAGSPAIKKGILQTVKVVDELVKVMGRHKPENIVIEMARENQTTQKGQKNSRERMKRIEEGIKELGSQILKEHPVENTQLQNEKLYLYYLQNGRDMYVDQELDINRLSDYDVDHIVPQSFLKDDSIDNKVLTRSDKARGKSDNVPSEEVVKKMKNYWRQLLNAKLITQRKFDNLTKAERGGLSELDKAGFIKRQLVETRQITKHVAQILDSRMNTKYDENDKLIREVKVITLKSKLVSDFRKDFQFYKVREINNYHHAHDAYLNAVVGTALIKKYPKLESEFVYGDYKVYDVRKMIAKSEQEIGKATAKYFFYSNIMNFFKTEITLANGEIRKRPLIETNGETGEIVWDKGRDFATVRKVLSMPQVNIVKKTEVQTGGFSKESILPKRNSDKLIARKKDWDPKKYGGFDSPTVAYSVLVVAKVEKGKSKKLKSVKELLGITIMERSSFEKNPIDFLEAKGYKEVKKDLIIKLPKYSLFELENGRKRMLASAGELQKGNELALPSKYVNFLYLASHYEKLKGSPEDNEQKQLFVEQHKHYLDEIIEQISEFSKRVILADANLDKVLSAYNKHRDKPIREQAENIIHLFTLTNLGAPAAFKYFDTTIDRKRYTSTKEVLDATLIHQSITGLYETRIDLSQLGGDGGGSSEAAAKGGSGGIPWLMKKPLQLTTLVPLQEYEERLLKQTMLTGSYKEKLQSLFLKYDALWQHWENQVGHRRIKPHHIATGTVNPRPQKQYPINPKAKASIQTVINDLLKQGVLIQQNSIMNTPVYPVPKPDGKWRMVLDYREVNKTIPLIAAQNQHSAGILSSIFRGKYKTTLDLSNGFWAHSITPESYWLTAFTWLGQQYCWTRLPQGFLNSPALFNADVVDLLKEVPNVQVYVDDIYISHDDPREHLEQLEKVFSLLLNAGYVVSLKKSEIAQHEVEFLGFNITKEGRGLTETFKQKLLNITPPRDLKQLQSILGLLNFARNFIPNFSELVKPLYNIIATAPGKYITWTTDNSQQLQNIISMLNSAENLEERNPEVRLIMKVNTSPSAGYIRFYNEFAKRPIMYLNYVYTKAEVKFTNTEKLLTTIHKGLIKALDLGMGQEILVYSPIVSMTKIQKTPLPERKALPIRWITWMSYLEDPRIQFHYDKTLPELQQVPTVTDDIIAKIKHPSEFSMVFYTDGSAIKHPNVNKSHNAGMGIAQVQFKPEFTVINTWSIPLGDHTAQLAEVAAVEFACKKALKIDGPVLIVTDSFYVAESVNKELPYWQSNGFFNNKKKPLKHVSKWKSIADCIQLKPDIIIIHEKGHQPTASTFHTEGNNLADKLATQGSYVVNAGKRTADGSEFEKRTADGSEFESPKKKAKVE

SEQ ID NO: 7092 - protein, 2087 aa, synthetic construct
MPAAKRVKLDGGDKKYSIGLDIGTNSVGWAVITDEYKVPSKKFKVLGNTDRHSIKKNLIGALLFDSGETAEATRLKRTARRRYTRRKNRICYLQEIFSNEMAKVDDSFFHRLEESFLVEEDKKHERHPIFGNIVDEVAYHEKYPTIYHLRKKLVDSTDKADLRLIYLALAHMIKFRGHFLIEGDLNPDNSDVDKLFIQLVQTYNQLFEENPINASGVDAKAILSARLSKSRRLENLIAQLPGEKKNGLFGNLIALSLGLTPNFKSNFDLAEDAKLQLSKDTYDDDLDNLLAQIGDQYADLFLAAKNLSDAILLSDILRVNTEITKAPLSASMIKRYDEHHQDLTLLKALVRQQLPEKYKEIFFDQSKNGYAGYIDGGASQEEFYKFIKPILEKMDGTEELLVKLNREDLLRKQRTFDNGSIPHQIHLGELHAILRRQEDFYPFLKDNREKIEKILTFRIPYYVGPLARGNSRFAWMTRKSEETITPWNFEEVVDKGASAQSFIERMTNFDKNLPNEKVLPKHSLLYEYFTVYNELTKVKYVTEGMRKPAFLSGEQKKAIVDLLFKTNRKVTVKQLKEDYFKKIECFDSVEISGVEDRFNASLGTYHDLLKIIKDKDFLDNEENEDILEDIVLTLTLFEDREMIEERLKTYAHLFDDKVMKQLKRRRYTGWGRLSRKLINGIRDKQSGKTILDFLKSDGFANRNFMQLIHDDSLTFKEDIQKAQVSGQGDSLHEHIANLAGSPAIKKGILQTVKVVDELVKVMGRHKPENIVIEMARENQTTQKGQKNSRERMKRIEEGIKELGSQILKEHPVENTQLQNEKLYLYYLQNGRDMYVDQELDINRLSDYDVDHIVPQSFLKDDSIDNKVLTRSDKARGKSDNVPSEEVVKKMKNYWRQLLNAKLITQRKFDNLTKAERGGLSELDKAGFIKRQLVETRQITKHVAQILDSRMNTKYDENDKLIREVKVITLKSKLVSDFRKDFQFYKVREINNYHHAHDAYLNAVVGTALIKKYPKLESEFVYGDYKVYDVRKMIAKSEQEIGKATAKYFFYSNIMNFFKTEITLANGEIRKRPLIETNGETGEIVWDKGRDFATVRKVLSMPQVNIVKKTEVQTGGFSKESILPKRNSDKLIARKKDWDPKKYGGFDSPTVAYSVLVVAKVEKGKSKKLKSVKELLGITIMERSSFEKNPIDFLEAKGYKEVKKDLIIKLPKYSLFELENGRKRMLASAGELQKGNELALPSKYVNFLYLASHYEKLKGSPEDNEQKQLFVEQHKHYLDEIIEQISEFSKRVILADANLDKVLSAYNKHRDKPIREQAENIIHLFTLTNLGAPAAFKYFDTTIDRKRYTSTKEVLDATLIHQSITGLYETRIDLSQLGGDGGGSSEAAAKGGSGGIPWLMKKPLQLTTLVPLQEYEERLLKQTMLTGSYKEKLQSLFLKYDALWQHWENQVGHRRIKPHHIATGTVNPRPQKQYPINPKAKASIQTVINDLLKQGVLIQQNSIMNTPVYPVPKPDGKWRMVLDYREVNKTIPLIAAQNQHSAGILSSIFRGKYKTTLDLSNGFWAHSITPESYWLTAFTWLGQQYCWTRLPQGFLNSPALFNADVVDLLKEVPNVQVYVDDIYISHDDPREHLEQLEKVFSLLLNAGYVVSLKKSEIAQHEVEFLGFNITKEGRGLTETFKQKLLNITPPRDLKQLQSILGKLNFARNFIPNFSELVKPLYNIIATAPGKYITWTTDNSQQLQNIISMLNSAENLEERNPEVRLIMKVNTSPSAGYIRFYNEFAKRPIMYLNYVYTKAEVKFTNTEKLLTTIHKGLIKALDLGMGQEILVYSPIVSMTKIQKTPLPERKALPIRWITWMSYLEDPRIQFHYDKTLPELQQVPTVTDDIIAKIKHPSEFSMVFYTDGSAIKHPNVNKSHNAGMGIAQVQFKPEFTVINTWSIPLGDHTAQLAEVAAVEFACKKALKIDGPVLIVTDSFYVAESVNKELPYWQSNGFFNNKKKPLKHVSKWKSIADCIQLKPDIIIIHEKGHQPTASTFHTEGNNLADKLATQGSYVVNAGKRTADGSEFEKRTADGSEFESPKKKAKVE

SEQ ID NO: 7093 - protein, 2094 aa, synthetic construct
MPAAKRVKLDGGDKKYSIGLDIGTNSVGWAVITDEYKVPSKKFKVLGNTDRHSIKKNLIGALLFDSGETAEATRLKRTARRRYTRRKNRICYLQEIFSNEMAKVDDSFFHRLEESFLVEEDKKHERHPIFGNIVDEVAYHEKYPTIYHLRKKLVDSTDKADLRLIYLALAHMIKFRGHFLIEGDLNPDNSDVDKLFIQLVQTYNQLFEENPINASGVDAKAILSARLSKSRRLENLIAQLPGEKKNGLFGNLIALSLGLTPNFKSNFDLAEDAKLQLSKDTYDDDLDNLLAQIGDQYADLFLAAKNLSDAILLSDILRVNTEITKAPLSASMIKRYDEHHQDLTLLKALVRQQLPEKYKEIFFDQSKNGYAGYIDGGASQEEFYKFIKPILEKMDGTEELLVKLNREDLLRKQRTFDNGSIPHQIHLGELHAILRRQEDFYPFLKDNREKIEKILTFRIPYYVGPLARGNSRFAWMTRKSEETITPWNFEEVVDKGASAQSFIERMTNFDKNLPNEKVLPKHSLLYEYFTVYNELTKVKYVTEGMRKPAFLSGEQKKAIVDLLFKTNRKVTVKQLKEDYFKKIECFDSVEISGVEDRFNASLGTYHDLLKIIKDKDFLDNEENEDILEDIVLTLTLFEDREMIEERLKTYAHLFDDKVMKQLKRRRYTGWGRLSRKLINGIRDKQSGKTILDFLKSDGFANRNFMQLIHDDSLTFKEDIQKAQVSGQGDSLHEHIANLAGSPAIKKGILQTVKVVDELVKVMGRHKPENIVIEMARENQTTQKGQKNSRERMKRIEEGIKELGSQILKEHPVENTQLQNEKLYLYYLQNGRDMYVDQELDINRLSDYDVDHIVPQSFLKDDSIDNKVLTRSDKARGKSDNVPSEEVVKKMKNYWRQLLNAKLITQRKFDNLTKAERGGLSELDKAGFIKRQLVETRQITKHVAQILDSRMNTKYDENDKLIREVKVITLKSKLVSDFRKDFQFYKVREINNYHHAHDAYLNAVVGTALIKKYPKLESEFVYGDYKVYDVRKMIAKSEQEIGKATAKYFFYSNIMNFFKTEITLANGEIRKRPLIETNGETGEIVWDKGRDFATVRKVLSMPQVNIVKKTEVQTGGFSKESILPKRNSDKLIARKKDWDPKKYGGFDSPTVAYSVLVVAKVEKGKSKKLKSVKELLGITIMERSSFEKNPIDFLEAKGYKEVKKDLIIKLPKYSLFELENGRKRMLASAGELQKGNELALPSKYVNFLYLASHYEKLKGSPEDNEQKQLFVEQHKHYLDEIIEQISEFSKRVILADANLDKVLSAYNKHRDKPIREQAENIIHLFTLTNLGAPAAFKYFDTTIDRKRYTSTKEVLDATLIHQSITGLYETRIDLSQLGGDGGGSSEAAAKGGSGGVLNLEEEYRLHEKPVPSSIDPSWLQLFPTVWAERAGMGLANQVPPVVVELRSGASPVAVRQYPMSKEAREGIRPHIQRFLDLGVLVPCQSPWNTPLLPVKKPGTNDYRPVQDLREINKRVQDIHPTVPNPYNLLSSLPPSHTWYSVLDLKDAFFCLKLHPNSQPLFAFEWRDPEKGNTGQLTWTRLPQGFKNSPTLFNEALHRDLAPFRALNPQVVLLQYVDDLLVAAPTYRDCKEGTQKLLQELSKLGYRVSAKKAQLCQKEVTYLGYLLKEGKRWLTPARKATVMKIPPPTTPRQVREFLGKAGFCRLFIPGFASLAAPLYPLTKPSIPFIWTEEHQKAFDRIKEALLSAPALALPDLTKPFTLYVDERAGVARGVLTQTLGPWRRPVAYLSKKLDPVASGWPTCLKAVAAVALLLKDADKLTLGQNVTVIASHSLESIVRQPPDRWMTNARMTHYQSLLLNERVSFAPPAVLNPATLLPVESEATPVHRCSEILAEETGTRRDLKDQPLPGVPAWYTDGSSFIAEGKRRAGAAIVDGKRTVWASSLPEGTSAQKAELVALTQALRLAEGKDINIYTDSRYAFATAHIHGAIYKQRGWLTSAGKDIKNKEEILALLEAIHLPKRVAIIHCPGHQKGNDPVATGNRRADEAAKQAALSTRVLAETTKPAGKRTADGSEFEKRTADGSEFESPKKKAKVE

SEQ ID NO: 7094 - protein, 2096 aa, synthetic construct
MPAAKRVKLDGGDKKYSIGLDIGTNSVGWAVITDEYKVPSKKFKVLGNTDRHSIKKNLIGALLFDSGETAEATRLKRTARRRYTRRKNRICYLQEIFSNEMAKVDDSFFHRLEESFLVEEDKKHERHPIFGNIVDEVAYHEKYPTIYHLRKKLVDSTDKADLRLIYLALAHMIKFRGHFLIEGDLNPDNSDVDKLFIQLVQTYNQLFEENPINASGVDAKAILSARLSKSRRLENLIAQLPGEKKNGLFGNLIALSLGLTPNFKSNFDLAEDAKLQLSKDTYDDDLDNLLAQIGDQYADLFLAAKNLSDAILLSDILRVNTEITKAPLSASMIKRYDEHHQDLTLLKALVRQQLPEKYKEIFFDQSKNGYAGYIDGGASQEEFYKFIKPILEKMDGTEELLVKLNREDLLRKQRTFDNGSIPHQIHLGELHAILRRQEDFYPFLKDNREKIEKILTFRIPYYVGPLARGNSRFAWMTRKSEETITPWNFEEVVDKGASAQSFIERMTNFDKNLPNEKVLPKHSLLYEYFTVYNELTKVKYVTEGMRKPAFLSGEQKKAIVDLLFKTNRKVTVKQLKEDYFKKIECFDSVEISGVEDRFNASLGTYHDLLKIIKDKDFLDNEENEDILEDIVLTLTLFEDREMIEERLKTYAHLFDDKVMKQLKRRRYTGWGRLSRKLINGIRDKQSGKTILDFLKSDGFANRNFMQLIHDDSLTFKEDIQKAQVSGQGDSLHEHIANLAGSPAIKKGILQTVKVVDELVKVMGRHKPENIVIEMARENQTTQKGQKNSRERMKRIEEGIKELGSQILKEHPVENTQLQNEKLYLYYLQNGRDMYVDQELDINRLSDYDVDHIVPQSFLKDDSIDNKVLTRSDKARGKSDNVPSEEVVKKMKNYWRQLLNAKLITQRKFDNLTKAERGGLSELDKAGFIKRQLVETRQITKHVAQILDSRMNTKYDENDKLIREVKVITLKSKLVSDFRKDFQFYKVREINNYHHAHDAYLNAVVGTALIKKYPKLESEFVYGDYKVYDVRKMIAKSEQEIGKATAKYFFYSNIMNFFKTEITLANGEIRKRPLIETNGETGEIVWDKGRDFATVRKVLSMPQVNIVKKTEVQTGGFSKESILPKRNSDKLIARKKDWDPKKYGGFDSPTVAYSVLVVAKVEKGKSKKLKSVKELLGITIMERSSFEKNPIDFLEAKGYKEVKKDLIIKLPKYSLFELENGRKRMLASAGELQKGNELALPSKYVNFLYLASHYEKLKGSPEDNEQKQLFVEQHKHYLDEIIEQISEFSKRVILADANLDKVLSAYNKHRDKPIREQAENIIHLFTLTNLGAPAAFKYFDTTIDRKRYTSTKEVLDATLIHQSITGLYETRIDLSQLGGDGGGSSEAAAKGGSGGTLNIEDEYRLHETSKEPDVPLGSTWLSDFPQAWAETGGMGLAVRQAPLIIPLKATSTPVSIKQYPMSQEARLGIKPHIQRLLDQGILVPCQSPWNTPLLPVKKPGTNDYRPVQDLREVNKRVEDIHPTVPNPYNLLSGLPPSHQWYTVLDLKDAFFCLRLHPTSQPLFAFEWRDPEMGISGQLTWTRLPQGFKNSPTLFDEALHRDLADFRIQHPDLILLQYVDDLLLAATSEQDCQRGTRALLQTLGNLGYRASAKKAQICQKQVKYLGYLLKEGQRWLTEARKETVMGQPTPKTPRQLREFLGTAGFCRLWIPGFAEMAAPLYPLTKTGTLFNWGPDQQKAYQEIKQALLTAPALGLPDLTKPFELFVDEKQGYAKGVLTQKLGPWRRPVAYLSKKLDPVAAGWPPCLRMVAAIAVLTKDAGKLTMGQPLVILAPHAVEALVKQPPDRWLSNARMTHYQAMLLDTDRVQFGPVVALNPATLLPLPEKEAPHDCLEILAETHGTRPDLTDQPIPDADYTWYTDGSSFLQEGQRRAGAAVTTETEVIWARALPAGTSAQRAELIALTQALKMAEGKKLNVYTDSRYAFATAHVHGEIYRRRGLLTSEGREIKNKNEILALLKALFLPKRLSIIHCPGHQKGNSAEARGNRMADQAAREAAMKAVLETSTLLAGKRTADGSEFEKRTADGSEFESPKKKAKVE

SEQ ID NO: 7095 - protein, 2096 aa, synthetic construct
MPAAKRVKLDGGDKKYSIGLDIGTNSVGWAVITDEYKVPSKKFKVLGNTDRHSIKKNLIGALLFDSGETAEATRLKRTARRRYTRRKNRICYLQEIFSNEMAKVDDSFFHRLEESFLVEEDKKHERHPIFGNIVDEVAYHEKYPTIYHLRKKLVDSTDKADLRLIYLALAHMIKFRGHFLIEGDLNPDNSDVDKLFIQLVQTYNQLFEENPINASGVDAKAILSARLSKSRRLENLIAQLPGEKKNGLFGNLIALSLGLTPNFKSNFDLAEDAKLQLSKDTYDDDLDNLLAQIGDQYADLFLAAKNLSDAILLSDILRVNTEITKAPLSASMIKRYDEHHQDLTLLKALVRQQLPEKYKEIFFDQSKNGYAGYIDGGASQEEFYKFIKPILEKMDGTEELLVKLNREDLLRKQRTFDNGSIPHQIHLGELHAILRRQEDFYPFLKDNREKIEKILTFRIPYYVGPLARGNSRFAWMTRKSEETITPWNFEEVVDKGASAQSFIERMTNFDKNLPNEKVLPKHSLLYEYFTVYNELTKVKYVTEGMRKPAFLSGEQKKAIVDLLFKTNRKVTVKQLKEDYFKKIECFDSVEISGVEDRFNASLGTYHDLLKIIKDKDFLDNEENEDILEDIVLTLTLFEDREMIEERLKTYAHLFDDKVMKQLKRRRYTGWGRLSRKLINGIRDKQSGKTILDFLKSDGFANRNFMQLIHDDSLTFKEDIQKAQVSGQGDSLHEHIANLAGSPAIKKGILQTVKVVDELVKVMGRHKPENIVIEMARENQTTQKGQKNSRERMKRIEEGIKELGSQILKEHPVENTQLQNEKLYLYYLQNGRDMYVDQELDINRLSDYDVDHIVPQSFLKDDSIDNKVLTRSDKARGKSDNVPSEEVVKKMKNYWRQLLNAKLITQRKFDNLTKAERGGLSELDKAGFIKRQLVETRQITKHVAQILDSRMNTKYDENDKLIREVKVITLKSKLVSDFRKDFQFYKVREINNYHHAHDAYLNAVVGTALIKKYPKLESEFVYGDYKVYDVRKMIAKSEQEIGKATAKYFFYSNIMNFFKTEITLANGEIRKRPLIETNGETGEIVWDKGRDFATVRKVLSMPQVNIVKKTEVQTGGFSKESILPKRNSDKLIARKKDWDPKKYGGFDSPTVAYSVLVVAKVEKGKSKKLKSVKELLGITIMERSSFEKNPIDFLEAKGYKEVKKDLIIKLPKYSLFELENGRKRMLASAGELQKGNELALPSKYVNFLYLASHYEKLKGSPEDNEQKQLFVEQHKHYLDEIIEQISEFSKRVILADANLDKVLSAYNKHRDKPIREQAENIIHLFTLTNLGAPAAFKYFDTTIDRKRYTSTKEVLDATLIHQSITGLYETRIDLSQLGGDGGGSSEAAAKGGSGGTLNIEDEYRLHETSKEPDVPLGSTWLSDFPQAWAETGGMGLAVRQAPLIIPLKATSTPVSIKQYPMSQEARLGIKPHIQRLLDQGILVPCQSPWNTPLLPVKKPGTNDYRPVQDLREVNKRVEDIHPTVPNPYNLLSGLPPSHQWYTVLDLKDAFFCLRLHPTSQPLFAFEWRDPEMGISGQLTWTRLPQGFKNSPTLFNEALHRDLADFRIQHPDLILLQYVDDLLLAATSEQDCQRGTRALLQTLGNLGYRASAKKAQICQKQVKYLGYLLKEGQRWLTEARKETVMGQPTPKTPRQLREFLGTAGFCRLWIPGFAEMAAPLYPLTKPGTLFNWGPDQQKAYQEIKQALLTAPALGLPDLTKPFELFVDEKQGYAKGVLTQKLGPWRRPVAYLSKKLDPVAAGWPPCLRMVAAIAVLTKDAGKLTMGQPLVILAPHAVEALVKQPPDRWLSNARMTHYQAMLLDTDRVQFGPVVALNPATLLPLPEKEAPHDCLEILAETHGTRPDLTDQPIPDADYTWYTDGSSFLQEGQRRAGAAVTTETEVIWARALPAGTSAQRAELIALTQALKMAEGKKLNVYTDSRYAFATAHVHGEIYRRRGWLTSEGREIKNKNEILALLKALFLPKRLSIIHCPGHQKGNSAEARGNRMADQAAREAAMKAVLETSTLLAGKRTADGSEFEKRTADGSEFESPKKKAKVE

SEQ ID NO: 7096 - protein, 2098 aa, synthetic construct
MPAAKRVKLDGGDKKYSIGLDIGTNSVGWAVITDEYKVPSKKFKVLGNTDRHSIKKNLIGALLFDSGETAEATRLKRTARRRYTRRKNRICYLQEIFSNEMAKVDDSFFHRLEESFLVEEDKKHERHPIFGNIVDEVAYHEKYPTIYHLRKKLVDSTDKADLRLIYLALAHMIKFRGHFLIEGDLNPDNSDVDKLFIQLVQTYNQLFEENPINASGVDAKAILSARLSKSRRLENLIAQLPGEKKNGLFGNLIALSLGLTPNFKSNFDLAEDAKLQLSKDTYDDDLDNLLAQIGDQYADLFLAAKNLSDAILLSDILRVNTEITKAPLSASMIKRYDEHHQDLTLLKALVRQQLPEKYKEIFFDQSKNGYAGYIDGGASQEEFYKFIKPILEKMDGTEELLVKLNREDLLRKQRTFDNGSIPHQIHLGELHAILRRQEDFYPFLKDNREKIEKILTFRIPYYVGPLARGNSRFAWMTRKSEETITPWNFEEVVDKGASAQSFIERMTNFDKNLPNEKVLPKHSLLYEYFTVYNELTKVKYVTEGMRKPAFLSGEQKKAIVDLLFKTNRKVTVKQLKEDYFKKIECFDSVEISGVEDRFNASLGTYHDLLKIIKDKDFLDNEENEDILEDIVLTLTLFEDREMIEERLKTYAHLFDDKVMKQLKRRRYTGWGRLSRKLINGIRDKQSGKTILDFLKSDGFANRNFMQLIHDDSLTFKEDIQKAQVSGQGDSLHEHIANLAGSPAIKKGILQTVKVVDELVKVMGRHKPENIVIEMARENQTTQKGQKNSRERMKRIEEGIKELGSQILKEHPVENTQLQNEKLYLYYLQNGRDMYVDQELDINRLSDYDVDHIVPQSFLKDDSIDNKVLTRSDKARGKSDNVPSEEVVKKMKNYWRQLLNAKLITQRKFDNLTKAERGGLSELDKAGFIKRQLVETRQITKHVAQILDSRMNTKYDENDKLIREVKVITLKSKLVSDFRKDFQFYKVREINNYHHAHDAYLNAVVGTALIKKYPKLESEFVYGDYKVYDVRKMIAKSEQEIGKATAKYFFYSNIMNFFKTEITLANGEIRKRPLIETNGETGEIVWDKGRDFATVRKVLSMPQVNIVKKTEVQTGGFSKESILPKRNSDKLIARKKDWDPKKYGGFDSPTVAYSVLVVAKVEKGKSKKLKSVKELLGITIMERSSFEKNPIDFLEAKGYKEVKKDLIIKLPKYSLFELENGRKRMLASAGELQKGNELALPSKYVNFLYLASHYEKLKGSPEDNEQKQLFVEQHKHYLDEIIEQISEFSKRVILADANLDKVLSAYNKHRDKPIREQAENIIHLFTLTNLGAPAAFKYFDTTIDRKRYTSTKEVLDATLIHQSITGLYETRIDLSQLGGDGGEAAAKGGSGSSGGTAPLEEEYRLFLEAPIQNVTLLEQWKREIPKVWAEINPPGLASTQAPIHVQLLSTALPVRVRQYPITLEAKRSLRETIRKFRAAGILRPVHSPWNTPLLPVRKSGTSEYRMVQDLREVNKRVETIHPTVPNPYTLLSLLPPDRIWYSVLDLKDAFFCIPLAPESQLIFAFEWADAEEGESGQLTWTRLPQGFKNSPTLFNEALNRDLQGFRLDHPSVSLLQYVDDLLIAADTQAACLSATRDLLMTLAELGYRVSGKKAQLCQEEVTYLGFKIHKGSRSLSNSRTQAILQIPVPKTKRQVREFLGTIGYCRLWIPGFAELAQPLYAATRPGNDPLVWGEKEEEAFQSLKLALTQPPALALPSLDKPFQLFVEETSGAAKGVLTQALGPWKRPVAYLSKRLDPVAAGWPRCLRAIAAAALLTREASKLTFGQDIEITSSHNLESLLRSPPDKWLTNARITQYQVLLLDPPRVRFKQTAALNPATLLPETDDTLPIHHCLDTLDSLTSTRPDLTDQPLAQAEATLFTDGSSYIRDGKRYAGAAVVTLDSVIWAEPLPIGTSAQKAELIALTKALEWSKDKSVNIYTDSRYAFATLHVHGMIYRERGWLTAGGKAIKNAPEILALLTAVWLPKRVAVMHCKGHQKDDAPTSTGNRRADEVAREVAIRPLSTQATISAGKRTADGSEFEKRTADGSEFESPKKKAKVE

SEQ ID NO: 7097 - protein, 2102 aa, synthetic construct
MPAAKRVKLDGGDKKYSIGLDIGTNSVGWAVITDEYKVPSKKFKVLGNTDRHSIKKNLIGALLFDSGETAEATRLKRTARRRYTRRKNRICYLQEIFSNEMAKVDDSFFHRLEESFLVEEDKKHERHPIFGNIVDEVAYHEKYPTIYHLRKKLVDSTDKADLRLIYLALAHMIKFRGHFLIEGDLNPDNSDVDKLFIQLVQTYNQLFEENPINASGVDAKAILSARLSKSRRLENLIAQLPGEKKNGLFGNLIALSLGLTPNFKSNFDLAEDAKLQLSKDTYDDDLDNLLAQIGDQYADLFLAAKNLSDAILLSDILRVNTEITKAPLSASMIKRYDEHHQDLTLLKALVRQQLPEKYKEIFFDQSKNGYAGYIDGGASQEEFYKFIKPILEKMDGTEELLVKLNREDLLRKQRTFDNGSIPHQIHLGELHAILRRQEDFYPFLKDNREKIEKILTFRIPYYVGPLARGNSRFAWMTRKSEETITPWNFEEVVDKGASAQSFIERMTNFDKNLPNEKVLPKHSLLYEYFTVYNELTKVKYVTEGMRKPAFLSGEQKKAIVDLLFKTNRKVTVKQLKEDYFKKIECFDSVEISGVEDRFNASLGTYHDLLKIIKDKDFLDNEENEDILEDIVLTLTLFEDREMIEERLKTYAHLFDDKVMKQLKRRRYTGWGRLSRKLINGIRDKQSGKTILDFLKSDGFANRNFMQLIHDDSLTFKEDIQKAQVSGQGDSLHEHIANLAGSPAIKKGILQTVKVVDELVKVMGRHKPENIVIEMARENQTTQKGQKNSRERMKRIEEGIKELGSQILKEHPVENTQLQNEKLYLYYLQNGRDMYVDQELDINRLSDYDVDHIVPQSFLKDDSIDNKVLTRSDKARGKSDNVPSEEVVKKMKNYWRQLLNAKLITQRKFDNLTKAERGGLSELDKAGFIKRQLVETRQITKHVAQILDSRMNTKYDENDKLIREVKVITLKSKLVSDFRKDFQFYKVREINNYHHAHDAYLNAVVGTALIKKYPKLESEFVYGDYKVYDVRKMIAKSEQEIGKATAKYFFYSNIMNFFKTEITLANGEIRKRPLIETNGETGEIVWDKGRDFATVRKVLSMPQVNIVKKTEVQTGGFSKESILPKRNSDKLIARKKDWDPKKYGGFDSPTVAYSVLVVAKVEKGKSKKLKSVKELLGITIMERSSFEKNPIDFLEAKGYKEVKKDLIIKLPKYSLFELENGRKRMLASAGELQKGNELALPSKYVNFLYLASHYEKLKGSPEDNEQKQLFVEQHKHYLDEIIEQISEFSKRVILADANLDKVLSAYNKHRDKPIREQAENIIHLFTLTNLGAPAAFKYFDTTIDRKRYTSTKEVLDATLIHQSITGLYETRIDLSQLGGDGGEAAAKGGSGSSGGTVSLQDEHRLFDIPVTTSLPDVWLQDFPQAWAETGGLGRAKCQAPIIIDLKPTAVPVSIKQYPMSLEAHMGIRQHIIKFLELGVLRPCRSPWNTPLLPVKKPGTQDYRPVQDLREINKRTVDIHPTVPNPYNLLSTLKPDYSWYTVLDLKDAFFCLPLAPQSQELFAFEWKDPERGISGQLTWTRLPQGFKNSPTLFNEALHRDLTDFRTQHPEVTLLQYVDDLLLAAPTKKACTQGTRHLLQELGEKGYRASAKKAQICQTKVTYLGYILSEGKRWLTPGRIETVARIPPPRNPREVREFLGTAGFCRLWIPGFAELAAPLYALTKPSTPFTWQTEHQLAFEALKKALLSAPALGLPDTSKPFTLFLDERQGIAKGVLTQKLGPWKRPVAYLSKKLDPVAAGWPPCLRIMAATAMLVKDSAKLTLGQPLTVITPHTLEAIVRQPPDRWITNARLTHYQALLLDTDRVQFGPPVTLNPATLLPVPENQPSPHDCRQVLAETHGTREDLKDQELPDADHTWYTDGSSYLDSGTRRAGAAVVDGHNTIWAQSLPPGTSAQKAELIALTKALELSKGKKANIYTDSRYAFATAHTHGSIYERRGWLTSEGKEIKNKAEIIALLKALFLPQEVAIIHCPGHQKGQDPVAVGNRQADRVARQAAMAEVLTLATEPDNTSHITAGKRTADGSEFEKRTADGSEFESPKKKAKVE

SEQ ID NO: 7098 - protein, 2218 aa, synthetic construct
MPAAKRVKLDGGDKKYSIGLDIGTNSVGWAVITDEYKVPSKKFKVLGNTDRHSIKKNLIGALLFDSGETAEATRLKRTARRRYTRRKNRICYLQEIFSNEMAKVDDSFFHRLEESFLVEEDKKHERHPIFGNIVDEVAYHEKYPTIYHLRKKLVDSTDKADLRLIYLALAHMIKFRGHFLIEGDLNPDNSDVDKLFIQLVQTYNQLFEENPINASGVDAKAILSARLSKSRRLENLIAQLPGEKKNGLFGNLIALSLGLTPNFKSNFDLAEDAKLQLSKDTYDDDLDNLLAQIGDQYADLFLAAKNLSDAILLSDILRVNTEITKAPLSASMIKRYDEHHQDLTLLKALVRQQLPEKYKEIFFDQSKNGYAGYIDGGASQEEFYKFIKPILEKMDGTEELLVKLNREDLLRKQRTFDNGSIPHQIHLGELHAILRRQEDFYPFLKDNREKIEKILTFRIPYYVGPLARGNSRFAWMTRKSEETITPWNFEEVVDKGASAQSFIERMTNFDKNLPNEKVLPKHSLLYEYFTVYNELTKVKYVTEGMRKPAFLSGEQKKAIVDLLFKTNRKVTVKQLKEDYFKKIECFDSVEISGVEDRFNASLGTYHDLLKIIKDKDFLDNEENEDILEDIVLTLTLFEDREMIEERLKTYAHLFDDKVMKQLKRRRYTGWGRLSRKLINGIRDKQSGKTILDFLKSDGFANRNFMQLIHDDSLTFKEDIQKAQVSGQGDSLHEHIANLAGSPAIKKGILQTVKVVDELVKVMGRHKPENIVIEMARENQTTQKGQKNSRERMKRIEEGIKELGSQILKEHPVENTQLQNEKLYLYYLQNGRDMYVDQELDINRLSDYDVDHIVPQSFLKDDSIDNKVLTRSDKARGKSDNVPSEEVVKKMKNYWRQLLNAKLITQRKFDNLTKAERGGLSELDKAGFIKRQLVETRQITKHVAQILDSRMNTKYDENDKLIREVKVITLKSKLVSDFRKDFQFYKVREINNYHHAHDAYLNAVVGTALIKKYPKLESEFVYGDYKVYDVRKMIAKSEQEIGKATAKYFFYSNIMNFFKTEITLANGEIRKRPLIETNGETGEIVWDKGRDFATVRKVLSMPQVNIVKKTEVQTGGFSKESILPKRNSDKLIARKKDWDPKKYGGFDSPTVAYSVLVVAKVEKGKSKKLKSVKELLGITIMERSSFEKNPIDFLEAKGYKEVKKDLIIKLPKYSLFELENGRKRMLASAGELQKGNELALPSKYVNFLYLASHYEKLKGSPEDNEQKQLFVEQHKHYLDEIIEQISEFSKRVILADANLDKVLSAYNKHRDKPIREQAENIIHLFTLTNLGAPAAFKYFDTTIDRKRYTSTKEVLDATLIHQSITGLYETRIDLSQLGGDGGEAAAKGGSGSSGGTLGDQGSRGSDPLPEPRVTLTVEGIPTEFLVNTGAEHSVLTKPMGKMGSKRTVVAGATGSKVYPWTTKRLLKIGQKQVTHSFLVIPECPAPLLGRDLLTKLKAQIQFSTEGPQVTWEDRPAMCLVLNLEEEYRLHEKPVPPSIDPSWLQLFPMVWAEKAGMGLANQVPPVVVELKSDASPVAVRQYPMSKEAREGIRPHIQRFLDLGILVPCQSPWNTPLLPVKKPGTNDYRPVQDLREVNKRVQDIHPTVPNPYNLLSSLPPSHTWYSVLDLKDAFFCLKLHPNSQPLFAFEWRDPEKGNTGQLTWTRLPQGFKNSPTLFNEALHRDLASFRALNPQVVMLQYVDDLLVAAPTYRDCKEGTRRLLQELSKLGYRVSAKKAQLCREEVTYLGYLLKGGKRWLTPARKATVMKIPTPTTPRQVREFLGTAGFCRLWIPGFASLAAPLYPLTRPKVPFTWTEAHQEAFGRIKEALLSAPALALPDLTKPFALYVDEKEGVARGVLTQTLGPWRRPVAYLSKKLDPVASGWPTCLKAIAAVALLLKDADKLTLGQNVLVIAPHNLESIVRQPPDRWMTNARMTHYQSLLLNERVSFAPPAILNPATLLPVESDDTPIHICSEILAEETGTRPDLRDQPLPGVPAWYTDGSSFIMDGRRQAGAAIVDNKRTVWASNLPEGTSAQKAELIALTQALRLAEGKSINIYTDSRYAFATAHVHGAIYKQRGWLTSAGKDIKNKEEILALLEAIHLPKRVAIIHCPGHQRGTDPVATGNRKADEAAKQAAQSTRILTETTKNAGKRTADGSEFEKRTADGSEFESPKKKAKVE

SEQ ID NO: 7099 - protein, 2218 aa, synthetic construct
MPAAKRVKLDGGDKKYSIGLDIGTNSVGWAVITDEYKVPSKKFKVLGNTDRHSIKKNLIGALLFDSGETAEATRLKRTARRRYTRRKNRICYLQEIFSNEMAKVDDSFFHRLEESFLVEEDKKHERHPIFGNIVDEVAYHEKYPTIYHLRKKLVDSTDKADLRLIYLALAHMIKFRGHFLIEGDLNPDNSDVDKLFIQLVQTYNQLFEENPINASGVDAKAILSARLSKSRRLENLIAQLPGEKKNGLFGNLIALSLGLTPNFKSNFDLAEDAKLQLSKDTYDDDLDNLLAQIGDQYADLFLAAKNLSDAILLSDILRVNTEITKAPLSASMIKRYDEHHQDLTLLKALVRQQLPEKYKEIFFDQSKNGYAGYIDGGASQEEFYKFIKPILEKMDGTEELLVKLNREDLLRKQRTFDNGSIPHQIHLGELHAILRRQEDFYPFLKDNREKIEKILTFRIPYYVGPLARGNSRFAWMTRKSEETITPWNFEEVVDKGASAQSFIERMTNFDKNLPNEKVLPKHSLLYEYFTVYNELTKVKYVTEGMRKPAFLSGEQKKAIVDLLFKTNRKVTVKQLKEDYFKKIECFDSVEISGVEDRFNASLGTYHDLLKIIKDKDFLDNEENEDILEDIVLTLTLFEDREMIEERLKTYAHLFDDKVMKQLKRRRYTGWGRLSRKLINGIRDKQSGKTILDFLKSDGFANRNFMQLIHDDSLTFKEDIQKAQVSGQGDSLHEHIANLAGSPAIKKGILQTVKVVDELVKVMGRHKPENIVIEMARENQTTQKGQKNSRERMKRIEEGIKELGSQILKEHPVENTQLQNEKLYLYYLQNGRDMYVDQELDINRLSDYDVDHIVPQSFLKDDSIDNKVLTRSDKARGKSDNVPSEEVVKKMKNYWRQLLNAKLITQRKFDNLTKAERGGLSELDKAGFIKRQLVETRQITKHVAQILDSRMNTKYDENDKLIREVKVITLKSKLVSDFRKDFQFYKVREINNYHHAHDAYLNAVVGTALIKKYPKLESEFVYGDYKVYDVRKMIAKSEQEIGKATAKYFFYSNIMNFFKTEITLANGEIRKRPLIETNGETGEIVWDKGRDFATVRKVLSMPQVNIVKKTEVQTGGFSKESILPKRNSDKLIARKKDWDPKKYGGFDSPTVAYSVLVVAKVEKGKSKKLKSVKELLGITIMERSSFEKNPIDFLEAKGYKEVKKDLIIKLPKYSLFELENGRKRMLASAGELQKGNELALPSKYVNFLYLASHYEKLKGSPEDNEQKQLFVEQHKHYLDEIIEQISEFSKRVILADANLDKVLSAYNKHRDKPIREQAENIIHLFTLTNLGAPAAFKYFDTTIDRKRYTSTKEVLDATLIHQSITGLYETRIDLSQLGGDGGEAAAKGGSGSSGGTLGDQGSRGSDPLPEPRVTLTVEGIPTEFLVNTGAEHSVLTKPMGKMGSKRTVVAGATGSKVYPWTTKRLLKIGQKQVTHSFLVIPECPAPLLGRDLLTKLKAQIQFSTEGPQVTWEDRPAMCLVLNLEEEYRLHEKPVPPSIDPSWLQLFPMVWAEKAGMGLANQVPPVVVELKSDASPVAVRQYPMSKEAREGIRPHIQRFLDLGILVPCQSPWNTPLLPVKKPGTNDYRPVQDLREVNKRVQDIHPTVPNPYNLLSSLPPSHTWYSVLDLKDAFFCLKLHPNSQPLFAFEWRDPEKGNTGQLTWTRLPQGFKNSPTLFNEALHRDLASFRALNPQVVMLQYVDDLLVAAPTYRDCKEGTRRLLQELSKLGYRVSAKKAQLCREEVTYLGYLLKGGKRWLTPARKATVMKIPTPTTPRQVREFLGKAGFCRLFIPGFASLAAPLYPLTRPKVPFTWTEAHQEAFGRIKEALLSAPALALPDLTKPFALYVDEKEGVARGVLTQTLGPWRRPVAYLSKKLDPVASGWPTCLKAIAAVALLLKDADKLTLGQNVLVIAPHNLESIVRQPPDRWMTNARMTHYQSLLLNERVSFAPPAILNPATLLPVESDDTPIHICSEILAEETGTRPDLRDQPLPGVPAWYTDGSSFIMDGRRQAGAAIVDNKRTVWASNLPEGTSAQKAELIALTQALRLAEGKSINIYTDSRYAFATAHVHGAIYKQRGWLTSAGKDIKNKEEILALLEAIHLPKRVAIIHCPGHQRGTDPVATGNRKADEAAKQAAQSTRILTETTKNAGKRTADGSEFEKRTADGSEFESPKKKAKVE

SEQ ID NO: 7100 - protein, 2096 aa, synthetic construct
MPAAKRVKLDGGDKKYSIGLDIGTNSVGWAVITDEYKVPSKKFKVLGNTDRHSIKKNLIGALLFDSGETAEATRLKRTARRRYTRRKNRICYLQEIFSNEMAKVDDSFFHRLEESFLVEEDKKHERHPIFGNIVDEVAYHEKYPTIYHLRKKLVDSTDKADLRLIYLALAHMIKFRGHFLIEGDLNPDNSDVDKLFIQLVQTYNQLFEENPINASGVDAKAILSARLSKSRRLENLIAQLPGEKKNGLFGNLIALSLGLTPNFKSNFDLAEDAKLQLSKDTYDDDLDNLLAQIGDQYADLFLAAKNLSDAILLSDILRVNTEITKAPLSASMIKRYDEHHQDLTLLKALVRQQLPEKYKEIFFDQSKNGYAGYIDGGASQEEFYKFIKPILEKMDGTEELLVKLNREDLLRKQRTFDNGSIPHQIHLGELHAILRRQEDFYPFLKDNREKIEKILTFRIPYYVGPLARGNSRFAWMTRKSEETITPWNFEEVVDKGASAQSFIERMTNFDKNLPNEKVLPKHSLLYEYFTVYNELTKVKYVTEGMRKPAFLSGEQKKAIVDLLFKTNRKVTVKQLKEDYFKKIECFDSVEISGVEDRFNASLGTYHDLLKIIKDKDFLDNEENEDILEDIVLTLTLFEDREMIEERLKTYAHLFDDKVMKQLKRRRYTGWGRLSRKLINGIRDKQSGKTILDFLKSDGFANRNFMQLIHDDSLTFKEDIQKAQVSGQGDSLHEHIANLAGSPAIKKGILQTVKVVDELVKVMGRHKPENIVIEMARENQTTQKGQKNSRERMKRIEEGIKELGSQILKEHPVENTQLQNEKLYLYYLQNGRDMYVDQELDINRLSDYDVDHIVPQSFLKDDSIDNKVLTRSDKARGKSDNVPSEEVVKKMKNYWRQLLNAKLITQRKFDNLTKAERGGLSELDKAGFIKRQLVETRQITKHVAQILDSRMNTKYDENDKLIREVKVITLKSKLVSDFRKDFQFYKVREINNYHHAHDAYLNAVVGTALIKKYPKLESEFVYGDYKVYDVRKMIAKSEQEIGKATAKYFFYSNIMNFFKTEITLANGEIRKRPLIETNGETGEIVWDKGRDFATVRKVLSMPQVNIVKKTEVQTGGFSKESILPKRNSDKLIARKKDWDPKKYGGFDSPTVAYSVLVVAKVEKGKSKKLKSVKELLGITIMERSSFEKNPIDFLEAKGYKEVKKDLIIKLPKYSLFELENGRKRMLASAGELQKGNELALPSKYVNFLYLASHYEKLKGSPEDNEQKQLFVEQHKHYLDEIIEQISEFSKRVILADANLDKVLSAYNKHRDKPIREQAENIIHLFTLTNLGAPAAFKYFDTTIDRKRYTSTKEVLDATLIHQSITGLYETRIDLSQLGGDGGEAAAKGGSGSSGGTLNLEDEYRLYETSAEPEVSPGSTWLSDFPQAWAETGGMGLAVRQAPLIIPLKATSTPVSIKQYPMSQEAKLGIKPHIQRLLDQGILVPCQSPWNTPLLPVKKPGTNDYRPVQDLREVNKRVEDIHPTVPNPYNLLSGLPPSHRWYTVLDLKDAFFCLRLHPTSQPLFAFEWRDPGMGISGQLTWTRLPQGFKNSPTLFNEALHRDLADFRIQHPDLILLQYVDDILLAATSELDCQQGTRALLLTLGNLGYRASAKKAQLCQKQVKYLGYLLKEGQRWLTEARKETVMGQPTPKTPRQLREFLGKAGFCRLFIPGFAEMAAPLYPLTKPGTLFNWGPDQQKAYQEIKQALLTAPALGLPDLTKPFELFVDEKQGYAKGVLTQKLGPWRRPVAYLSKKLDPVAAGWPPCLRMVAAIAVLRKDAGKLTMGQPLVILAPHAVEALVKQPPDRWLSNARMTHYQAMLLDTDRVQFGPVVALNPATLLPLPEEGAPHDCLEILAETHGTRPDLTDQPIPDADHTWYTDGSSFLQEGQRKAGAAVTTETEVIWARALPAGTSAQRAELIALTQALKMAEGKRLNVYTDSRYAFATAHIHGEIYRRRGWLTSEGREIKNKSEILALLKALFLPKRLSIIHCLGHQKGDSAEARGNRLADQAAREAAIKTPPDTSTLLAGKRTADGSEFEKRTADGSEFESPKKKAKVE

SEQ ID NO: 7101 - protein, 2096 aa, synthetic construct
MPAAKRVKLDGGDKKYSIGLDIGTNSVGWAVITDEYKVPSKKFKVLGNTDRHSIKKNLIGALLFDSGETAEATRLKRTARRRYTRRKNRICYLQEIFSNEMAKVDDSFFHRLEESFLVEEDKKHERHPIFGNIVDEVAYHEKYPTIYHLRKKLVDSTDKADLRLIYLALAHMIKFRGHFLIEGDLNPDNSDVDKLFIQLVQTYNQLFEENPINASGVDAKAILSARLSKSRRLENLIAQLPGEKKNGLFGNLIALSLGLTPNFKSNFDLAEDAKLQLSKDTYDDDLDNLLAQIGDQYADLFLAAKNLSDAILLSDILRVNTEITKAPLSASMIKRYDEHHQDLTLLKALVRQQLPEKYKEIFFDQSKNGYAGYIDGGASQEEFYKFIKPILEKMDGTEELLVKLNREDLLRKQRTFDNGSIPHQIHLGELHAILRRQEDFYPFLKDNREKIEKILTFRIPYYVGPLARGNSRFAWMTRKSEETITPWNFEEVVDKGASAQSFIERMTNFDKNLPNEKVLPKHSLLYEYFTVYNELTKVKYVTEGMRKPAFLSGEQKKAIVDLLFKTNRKVTVKQLKEDYFKKIECFDSVEISGVEDRFNASLGTYHDLLKIIKDKDFLDNEENEDILEDIVLTLTLFEDREMIEERLKTYAHLFDDKVMKQLKRRRYTGWGRLSRKLINGIRDKQSGKTILDFLKSDGFANRNFMQLIHDDSLTFKEDIQKAQVSGQGDSLHEHIANLAGSPAIKKGILQTVKVVDELVKVMGRHKPENIVIEMARENQTTQKGQKNSRERMKRIEEGIKELGSQILKEHPVENTQLQNEKLYLYYLQNGRDMYVDQELDINRLSDYDVDHIVPQSFLKDDSIDNKVLTRSDKARGKSDNVPSEEVVKKMKNYWRQLLNAKLITQRKFDNLTKAERGGLSELDKAGFIKRQLVETRQITKHVAQILDSRMNTKYDENDKLIREVKVITLKSKLVSDFRKDFQFYKVREINNYHHAHDAYLNAVVGTALIKKYPKLESEFVYGDYKVYDVRKMIAKSEQEIGKATAKYFFYSNIMNFFKTEITLANGEIRKRPLIETNGETGEIVWDKGRDFATVRKVLSMPQVNIVKKTEVQTGGFSKESILPKRNSDKLIARKKDWDPKKYGGFDSPTVAYSVLVVAKVEKGKSKKLKSVKELLGITIMERSSFEKNPIDFLEAKGYKEVKKDLIIKLPKYSLFELENGRKRMLASAGELQKGNELALPSKYVNFLYLASHYEKLKGSPEDNEQKQLFVEQHKHYLDEIIEQISEFSKRVILADANLDKVLSAYNKHRDKPIREQAENIIHLFTLTNLGAPAAFKYFDTTIDRKRYTSTKEVLDATLIHQSITGLYETRIDLSQLGGDGGEAAAKGGSGSSGGTLNIEDEYRLHETSKGPDVPLGSTWLSDFPQAWAETGGMGLAVRQAPLIIPLKATSTPVSIKQYPMSQEARLGIKPHIQRLLDQGILVPCQSPWNTPLLPVKKPGTNDYRPVQDLREVNKRVEDIHPTVPNPYNLLSGLPPSHQWYTVLDLKDAFFCLRLHPTSQSLFAFEWRDPEMGISGQLTWTRLPQGFKNSPTLFDEALHRDLADFRIQHPDLILLQYVDDLLLAATSELDCQQGTRALLQTLGDLGYRASAKKAQICQKQVKYLGYLLKEGQRWLTEARKETVMGQPTPKTPRQLREFLGTAGFCRLWIPGFAEMAAPLYPLTKTGTLFEWGPDQQKAYQEIKQALLTAPALGLPDLTKPFELFVDEKQGYAKGVLTQKLGPWRRPVAYLSKKLDPVAAGWPPCLRMVAAIAVLTKDAGKLTMGQPLVILAPHAVEALVKQPPDRWLSNARMTHYQALLLDTDRVQFGPIVALNPATLLPLPEEGLQHDCLDILAEAHGTRPDLTDQPLPDADHTWYTDGSSFLQEGQRKAGAAVTTETEVVWAKALPAGTSAQRAELIALTQALKMAEGKKLNVYTDSRYAFATAHIHGEIYRRRGLLTSEGKEIKNKDEILALLKALFLPKRLSIIHCPGHQKGNRAEARGNRMADQAAREVATRETPETSTLLAGKRTADGSEFEKRTADGSEFESPKKKAKVE

SEQ ID NO: 7102 - protein, 2087 aa, synthetic construct
MPAAKRVKLDGGDKKYSIGLDIGTNSVGWAVITDEYKVPSKKFKVLGNTDRHSIKKNLIGALLFDSGETAEATRLKRTARRRYTRRKNRICYLQEIFSNEMAKVDDSFFHRLEESFLVEEDKKHERHPIFGNIVDEVAYHEKYPTIYHLRKKLVDSTDKADLRLIYLALAHMIKFRGHFLIEGDLNPDNSDVDKLFIQLVQTYNQLFEENPINASGVDAKAILSARLSKSRRLENLIAQLPGEKKNGLFGNLIALSLGLTPNFKSNFDLAEDAKLQLSKDTYDDDLDNLLAQIGDQYADLFLAAKNLSDAILLSDILRVNTEITKAPLSASMIKRYDEHHQDLTLLKALVRQQLPEKYKEIFFDQSKNGYAGYIDGGASQEEFYKFIKPILEKMDGTEELLVKLNREDLLRKQRTFDNGSIPHQIHLGELHAILRRQEDFYPFLKDNREKIEKILTFRIPYYVGPLARGNSRFAWMTRKSEETITPWNFEEVVDKGASAQSFIERMTNFDKNLPNEKVLPKHSLLYEYFTVYNELTKVKYVTEGMRKPAFLSGEQKKAIVDLLFKTNRKVTVKQLKEDYFKKIECFDSVEISGVEDRFNASLGTYHDLLKIIKDKDFLDNEENEDILEDIVLTLTLFEDREMIEERLKTYAHLFDDKVMKQLKRRRYTGWGRLSRKLINGIRDKQSGKTILDFLKSDGFANRNFMQLIHDDSLTFKEDIQKAQVSGQGDSLHEHIANLAGSPAIKKGILQTVKVVDELVKVMGRHKPENIVIEMARENQTTQKGQKNSRERMKRIEEGIKELGSQILKEHPVENTQLQNEKLYLYYLQNGRDMYVDQELDINRLSDYDVDHIVPQSFLKDDSIDNKVLTRSDKARGKSDNVPSEEVVKKMKNYWRQLLNAKLITQRKFDNLTKAERGGLSELDKAGFIKRQLVETRQITKHVAQILDSRMNTKYDENDKLIREVKVITLKSKLVSDFRKDFQFYKVREINNYHHAHDAYLNAVVGTALIKKYPKLESEFVYGDYKVYDVRKMIAKSEQEIGKATAKYFFYSNIMNFFKTEITLANGEIRKRPLIETNGETGEIVWDKGRDFATVRKVLSMPQVNIVKKTEVQTGGFSKESILPKRNSDKLIARKKDWDPKKYGGFDSPTVAYSVLVVAKVEKGKSKKLKSVKELLGITIMERSSFEKNPIDFLEAKGYKEVKKDLIIKLPKYSLFELENGRKRMLASAGELQKGNELALPSKYVNFLYLASHYEKLKGSPEDNEQKQLFVEQHKHYLDEIIEQISEFSKRVILADANLDKVLSAYNKHRDKPIREQAENIIHLFTLTNLGAPAAFKYFDTTIDRKRYTSTKEVLDATLIHQSITGLYETRIDLSQLGGDGGEAAAKGGSGSSGGIPWLMKKPLQLTTLVPLQEYEERLLKQTMLTGSYKEKLQSLFLKYDALWQHWENQVGHRRIKPHHIATGTVNPRPQKQYPINPKAKASIQTVINDLLKQGVLIQQNSIMNTPVYPVPKPDGKWRMVLDYREVNKTIPLIAAQNQHSAGILSSIFRGKYKTTLDLSNGFWAHSITPESYWLTAFTWLGQQYCWTRLPQGFLNSPALFNADVVDLLKEVPNVQVYVDDIYISHDDPREHLEQLEKVFSLLLNAGYVVSLKKSEIAQHEVEFLGFNITKEGRGLTETFKQKLLNITPPRDLKQLQSILGLLNFARNFIPNFSELVKPLYNIIATAPGKYITWTTDNSQQLQNIISMLNSAENLEERNPEVRLIMKVNTSPSAGYIRFYNEFAKRPIMYLNYVYTKAEVKFTNTEKLLTTIHKGLIKALDLGMGQEILVYSPIVSMTKIQKTPLPERKALPIRWITWMSYLEDPRIQFHYDKTLPELQQVPTVTDDIIAKIKHPSEFSMVFYTDGSAIKHPNVNKSHNAGMGIAQVQFKPEFTVINTWSIPLGDHTAQLAEVAAVEFACKKALKIDGPVLIVTDSFYVAESVNKELPYWQSNGFFNNKKKPLKHVSKWKSIADCIQLKPDIIIIHEKGHQPTASTFHTEGNNLADKLATQGSYVVNAGKRTADGSEFEKRTADGSEFESPKKKAKVE

SEQ ID NO: 7103 - protein, 2096 aa, synthetic construct; identical to SEQ ID NO: 4523

SEQ ID NO: 7104 - protein, 2098 aa, synthetic construct
MPAAKRVKLDGGDKKYSIGLDIGTNSVGWAVITDEYKVPSKKFKVLGNTDRHSIKKNLIGALLFDSGETAEATRLKRTARRRYTRRKNRICYLQEIFSNEMAKVDDSFFHRLEESFLVEEDKKHERHPIFGNIVDEVAYHEKYPTIYHLRKKLVDSTDKADLRLIYLALAHMIKFRGHFLIEGDLNPDNSDVDKLFIQLVQTYNQLFEENPINASGVDAKAILSARLSKSRRLENLIAQLPGEKKNGLFGNLIALSLGLTPNFKSNFDLAEDAKLQLSKDTYDDDLDNLLAQIGDQYADLFLAAKNLSDAILLSDILRVNTEITKAPLSASMIKRYDEHHQDLTLLKALVRQQLPEKYKEIFFDQSKNGYAGYIDGGASQEEFYKFIKPILEKMDGTEELLVKLNREDLLRKQRTFDNGSIPHQIHLGELHAILRRQEDFYPFLKDNREKIEKILTFRIPYYVGPLARGNSRFAWMTRKSEETITPWNFEEVVDKGASAQSFIERMTNFDKNLPNEKVLPKHSLLYEYFTVYNELTKVKYVTEGMRKPAFLSGEQKKAIVDLLFKTNRKVTVKQLKEDYFKKIECFDSVEISGVEDRFNASLGTYHDLLKIIKDKDFLDNEENEDILEDIVLTLTLFEDREMIEERLKTYAHLFDDKVMKQLKRRRYTGWGRLSRKLINGIRDKQSGKTILDFLKSDGFANRNFMQLIHDDSLTFKEDIQKAQVSGQGDSLHEHIANLAGSPAIKKGILQTVKVVDELVKVMGRHKPENIVIEMARENQTTQKGQKNSRERMKRIEEGIKELGSQILKEHPVENTQLQNEKLYLYYLQNGRDMYVDQELDINRLSDYDVDHIVPQSFLKDDSIDNKVLTRSDKARGKSDNVPSEEVVKKMKNYWRQLLNAKLITQRKFDNLTKAERGGLSELDKAGFIKRQLVETRQITKHVAQILDSRMNTKYDENDKLIREVKVITLKSKLVSDFRKDFQFYKVREINNYHHAHDAYLNAVVGTALIKKYPKLESEFVYGDYKVYDVRKMIAKSEQEIGKATAKYFFYSNIMNFFKTEITLANGEIRKRPLIETNGETGEIVWDKGRDFATVRKVLSMPQVNIVKKTEVQTGGFSKESILPKRNSDKLIARKKDWDPKKYGGFDSPTVAYSVLVVAKVEKGKSKKLKSVKELLGITIMERSSFEKNPIDFLEAKGYKEVKKDLIIKLPKYSLFELENGRKRMLASAGELQKGNELALPSKYVNFLYLASHYEKLKGSPEDNEQKQLFVEQHKHYLDEIIEQISEFSKRVILADANLDKVLSAYNKHRDKPIREQAENIIHLFTLTNLGAPAAFKYFDTTIDRKRYTSTKEVLDATLIHQSITGLYETRIDLSQLGGDGGEAAAKGSSGGSGGTAPLEEEYRLFLEAPIQNVTLLEQWKREIPKVWAEINPPGLASTQAPIHVQLLSTALPVRVRQYPITLEAKRSLRETIRKFRAAGILRPVHSPWNTPLLPVRKSGTSEYRMVQDLREVNKRVETIHPTVPNPYTLLSLLPPDRIWYSVLDLKDAFFCIPLAPESQLIFAFEWADAEEGESGQLTWTRLPQGFKNSPTLFNEALNRDLQGFRLDHPSVSLLQYVDDLLIAADTQAACLSATRDLLMTLAELGYRVSGKKAQLCQEEVTYLGFKIHKGSRSLSNSRTQAILQIPVPKTKRQVREFLGTIGYCRLWIPGFAELAQPLYAATRPGNDPLVWGEKEEEAFQSLKLALTQPPALALPSLDKPFQLFVEETSGAAKGVLTQALGPWKRPVAYLSKRLDPVAAGWPRCLRAIAAAALLTREASKLTFGQDIEITSSHNLESLLRSPPDKWLTNARITQYQVLLLDPPRVRFKQTAALNPATLLPETDDTLPIHHCLDTLDSLTSTRPDLTDQPLAQAEATLFTDGSSYIRDGKRYAGAAVVTLDSVIWAEPLPIGTSAQKAELIALTKALEWSKDKSVNIYTDSRYAFATLHVHGMIYRERGWLTAGGKAIKNAPEILALLTAVWLPKRVAVMHCKGHQKDDAPTSTGNRRADEVAREVAIRPLSTQATISAGKRTADGSEFEKRTADGSEFESPKKKAKVE

SEQ ID NO: 7105 - protein, 2098 aa, synthetic construct
MPAAKRVKLDGGDKKYSIGLDIGTNSVGWAVITDEYKVPSKKFKVLGNTDRHSIKKNLIGALLFDSGETAEATRLKRTARRRYTRRKNRICYLQEIFSNEMAKVDDSFFHRLEESFLVEEDKKHERHPIFGNIVDEVAYHEKYPTIYHLRKKLVDSTDKADLRLIYLALAHMIKFRGHFLIEGDLNPDNSDVDKLFIQLVQTYNQLFEENPINASGVDAKAILSARLSKSRRLENLIAQLPGEKKNGLFGNLIALSLGLTPNFKSNFDLAEDAKLQLSKDTYDDDLDNLLAQIGDQYADLFLAAKNLSDAILLSDILRVNTEITKAPLSASMIKRYDEHHQDLTLLKALVRQQLPEKYKEIFFDQSKNGYAGYIDGGASQEEFYKFIKPILEKMDGTEELLVKLNREDLLRKQRTFDNGSIPHQIHLGELHAILRRQEDFYPFLKDNREKIEKILTFRIPYYVGPLARGNSRFAWMTRKSEETITPWNFEEVVDKGASAQSFIERMTNFDKNLPNEKVLPKHSLLYEYFTVYNELTKVKYVTEGMRKPAFLSGEQKKAIVDLLFKTNRKVTVKQLKEDYFKKIECFDSVEISGVEDRFNASLGTYHDLLKIIKDKDFLDNEENEDILEDIVLTLTLFEDREMIEERLKTYAHLFDDKVMKQLKRRRYTGWGRLSRKLINGIRDKQSGKTILDFLKSDGFANRNFMQLIHDDSLTFKEDIQKAQVSGQGDSLHEHIANLAGSPAIKKGILQTVKVVDELVKVMGRHKPENIVIEMARENQTTQKGQKNSRERMKRIEEGIKELGSQILKEHPVENTQLQNEKLYLYYLQNGRDMYVDQELDINRLSDYDVDHIVPQSFLKDDSIDNKVLTRSDKARGKSDNVPSEEVVKKMKNYWRQLLNAKLITQRKFDNLTKAERGGLSELDKAGFIKRQLVETRQITKHVAQILDSRMNTKYDENDKLIREVKVITLKSKLVSDFRKDFQFYKVREINNYHHAHDAYLNAVVGTALIKKYPKLESEFVYGDYKVYDVRKMIAKSEQEIGKATAKYFFYSNIMNFFKTEITLANGEIRKRPLIETNGETGEIVWDKGRDFATVRKVLSMPQVNIVKKTEVQTGGFSKESILPKRNSDKLIARKKDWDPKKYGGFDSPTVAYSVLVVAKVEKGKSKKLKSVKELLGITIMERSSFEKNPIDFLEAKGYKEVKKDLIIKLPKYSLFELENGRKRMLASAGELQKGNELALPSKYVNFLYLASHYEKLKGSPEDNEQKQLFVEQHKHYLDEIIEQISEFSKRVILADANLDKVLSAYNKHRDKPIREQAENIIHLFTLTNLGAPAAFKYFDTTIDRKRYTSTKEVLDATLIHQSITGLYETRIDLSQLGGDGGEAAAKGSSGGSGGTAPLEEEYRLFLEAPIQNVTLLEQWKREIPKVWAEINPPGLASTQAPIHVQLLSTALPVRVRQYPITLEAKRSLRETIRKFRAAGILRPVHSPWNTPLLPVRKSGTSEYRMVQDLREVNKRVETIHPTVPNPYTLLSLLPPDRIWYSVLDLKDAFFCIPLAPESQLIFAFEWADAEEGESGQLTWTRLPQGFKNSPTLFNEALNRDLQGFRLDHPSVSLLQYVDDLLIAADTQAACLSATRDLLMTLAELGYRVSGKKAQLCQEEVTYLGFKIHKGSRSLSNSRTQAILQIPVPKTKRQVREFLGKIGYCRLFIPGFAELAQPLYAATRPGNDPLVWGEKEEEAFQSLKLALTQPPALALPSLDKPFQLFVEETSGAAKGVLTQALGPWKRPVAYLSKRLDPVAAGWPRCLRAIAAAALLTREASKLTFGQDIEITSSHNLESLLRSPPDKWLTNARITQYQVLLLDPPRVRFKQTAALNPATLLPETDDTLPIHHCLDTLDSLTSTRPDLTDQPLAQAEATLFTDGSSYIRDGKRYAGAAVVTLDSVIWAEPLPIGTSAQKAELIALTKALEWSKDKSVNIYTDSRYAFATLHVHGMIYRERGWLTAGGKAIKNAPEILALLTAVWLPKRVAVMHCKGHQKDDAPTSTGNRRADEVAREVAIRPLSTQATISAGKRTADGSEFEKRTADGSEFESPKKKAKVE

SEQ ID NO: 7106 - protein, 2102 aa, synthetic construct
MPAAKRVKLDGGDKKYSIGLDIGTNSVGWAVITDEYKVPSKKFKVLGNTDRHSIKKNLIGALLFDSGETAEATRLKRTARRRYTRRKNRICYLQEIFSNEMAKVDDSFFHRLEESFLVEEDKKHERHPIFGNIVDEVAYHEKYPTIYHLRKKLVDSTDKADLRLIYLALAHMIKFRGHFLIEGDLNPDNSDVDKLFIQLVQTYNQLFEENPINASGVDAKAILSARLSKSRRLENLIAQLPGEKKNGLFGNLIALSLGLTPNFKSNFDLAEDAKLQLSKDTYDDDLDNLLAQIGDQYADLFLAAKNLSDAILLSDILRVNTEITKAPLSASMIKRYDEHHQDLTLLKALVRQQLPEKYKEIFFDQSKNGYAGYIDGGASQEEFYKFIKPILEKMDGTEELLVKLNREDLLRKQRTFDNGSIPHQIHLGELHAILRRQEDFYPFLKDNREKIEKILTFRIPYYVGPLARGNSRFAWMTRKSEETITPWNFEEVVDKGASAQSFIERMTNFDKNLPNEKVLPKHSLLYEYFTVYNELTKVKYVTEGMRKPAFLSGEQKKAIVDLLFKTNRKVTVKQLKEDYFKKIECFDSVEISGVEDRFNASLGTYHDLLKIIKDKDFLDNEENEDILEDIVLTLTLFEDREMIEERLKTYAHLFDDKVMKQLKRRRYTGWGRLSRKLINGIRDKQSGKTILDFLKSDGFANRNFMQLIHDDSLTFKEDIQKAQVSGQGDSLHEHIANLAGSPAIKKGILQTVKVVDELVKVMGRHKPENIVIEMARENQTTQKGQKNSRERMKRIEEGIKELGSQILKEHPVENTQLQNEKLYLYYLQNGRDMYVDQELDINRLSDYDVDHIVPQSFLKDDSIDNKVLTRSDKARGKSDNVPSEEVVKKMKNYWRQLLNAKLITQRKFDNLTKAERGGLSELDKAGFIKRQLVETRQITKHVAQILDSRMNTKYDENDKLIREVKVITLKSKLVSDFRKDFQFYKVREINNYHHAHDAYLNAVVGTALIKKYPKLESEFVYGDYKVYDVRKMIAKSEQEIGKATAKYFFYSNIMNFFKTEITLANGEIRKRPLIETNGETGEIVWDKGRDFATVRKVLSMPQVNIVKKTEVQTGGFSKESILPKRNSDKLIARKKDWDPKKYGGFDSPTVAYSVLVVAKVEKGKSKKLKSVKELLGITIMERSSFEKNPIDFLEAKGYKEVKKDLIIKLPKYSLFELENGRKRMLASAGELQKGNELALPSKYVNFLYLASHYEKLKGSPEDNEQKQLFVEQHKHYLDEIIEQISEFSKRVILADANLDKVLSAYNKHRDKPIREQAENIIHLFTLTNLGAPAAFKYFDTTIDRKRYTSTKEVLDATLIHQSITGLYETRIDLSQLGGDGGEAAAKGSSGGSGGTVSLQDEHRLFDIPVTTSLPDVWLQDFPQAWAETGGLGRAKCQAPIIIDLKPTAVPVSIKQYPMSLEAHMGIRQHIIKFLELGVLRPCRSPWNTPLLPVKKPGTQDYRPVQDLREINKRTVDIHPTVPNPYNLLSTLKPDYSWYTVLDLKDAFFCLPLAPQSQELFAFEWKDPERGISGQLTWTRLPQGFKNSPTLFNEALHRDLTDFRTQHPEVTLLQYVDDLLLAAPTKKACTQGTRHLLQELGEKGYRASAKKAQICQTKVTYLGYILSEGKRWLTPGRIETVARIPPPRNPREVREFLGKAGFCRLFIPGFAELAAPLYALTKPSTPFTWQTEHQLAFEALKKALLSAPALGLPDTSKPFTLFLDERQGIAKGVLTQKLGPWKRPVAYLSKKLDPVAAGWPPCLRIMAATAMLVKDSAKLTLGQPLTVITPHTLEAIVRQPPDRWITNARLTHYQALLLDTDRVQFGPPVTLNPATLLPVPENQPSPHDCRQVLAETHGTREDLKDQELPDADHTWYTDGSSYLDSGTRRAGAAVVDGHNTIWAQSLPPGTSAQKAELIALTKALELSKGKKANIYTDSRYAFATAHTHGSIYERRGWLTSEGKEIKNKAEIIALLKALFLPQEVAIIHCPGHQKGQDPVAVGNRQADRVARQAAMAEVLTLATEPDNTSHITAGKRTADGSEFEKRTADGSEFESPKKKAKVE

SEQ ID NO: 7107 - protein, 2087 aa, synthetic construct
MPAAKRVKLDGGDKKYSIGLDIGTNSVGWAVITDEYKVPSKKFKVLGNTDRHSIKKNLIGALLFDSGETAEATRLKRTARRRYTRRKNRICYLQEIFSNEMAKVDDSFFHRLEESFLVEEDKKHERHPIFGNIVDEVAYHEKYPTIYHLRKKLVDSTDKADLRLIYLALAHMIKFRGHFLIEGDLNPDNSDVDKLFIQLVQTYNQLFEENPINASGVDAKAILSARLSKSRRLENLIAQLPGEKKNGLFGNLIALSLGLTPNFKSNFDLAEDAKLQLSKDTYDDDLDNLLAQIGDQYADLFLAAKNLSDAILLSDILRVNTEITKAPLSASMIKRYDEHHQDLTLLKALVRQQLPEKYKEIFFDQSKNGYAGYIDGGASQEEFYKFIKPILEKMDGTEELLVKLNREDLLRKQRTFDNGSIPHQIHLGELHAILRRQEDFYPFLKDNREKIEKILTFRIPYYVGPLARGNSRFAWMTRKSEETITPWNFEEVVDKGASAQSFIERMTNFDKNLPNEKVLPKHSLLYEYFTVYNELTKVKYVTEGMRKPAFLSGEQKKAIVDLLFKTNRKVTVKQLKEDYFKKIECFDSVEISGVEDRFNASLGTYHDLLKIIKDKDFLDNEENEDILEDIVLTLTLFEDREMIEERLKTYAHLFDDKVMKQLKRRRYTGWGRLSRKLINGIRDKQSGKTILDFLKSDGFANRNFMQLIHDDSLTFKEDIQKAQVSGQGDSLHEHIANLAGSPAIKKGILQTVKVVDELVKVMGRHKPENIVIEMARENQTTQKGQKNSRERMKRIEEGIKELGSQILKEHPVENTQLQNEKLYLYYLQNGRDMYVDQELDINRLSDYDVDHIVPQSFLKDDSIDNKVLTRSDKARGKSDNVPSEEVVKKMKNYWRQLLNAKLITQRKFDNLTKAERGGLSELDKAGFIKRQLVETRQITKHVAQILDSRMNTKYDENDKLIREVKVITLKSKLVSDFRKDFQFYKVREINNYHHAHDAYLNAVVGTALIKKYPKLESEFVYGDYKVYDVRKMIAKSEQEIGKATAKYFFYSNIMNFFKTEITLANGEIRKRPLIETNGETGEIVWDKGRDFATVRKVLSMPQVNIVKKTEVQTGGFSKESILPKRNSDKLIARKKDWDPKKYGGFDSPTVAYSVLVVAKVEKGKSKKLKSVKELLGITIMERSSFEKNPIDFLEAKGYKEVKKDLIIKLPKYSLFELENGRKRMLASAGELQKGNELALPSKYVNFLYLASHYEKLKGSPEDNEQKQLFVEQHKHYLDEIIEQISEFSKRVILADANLDKVLSAYNKHRDKPIREQAENIIHLFTLTNLGAPAAFKYFDTTIDRKRYTSTKEVLDATLIHQSITGLYETRIDLSQLGGDGGEAAAKGSSGGSGGVPWILKKPLELTIKLDLEEQQGTLLNNSILSKKGKEELKQLFEKYSALWQSWENQVGHRRIRPHKIATGTVKPTPQKQYHINPKAKPDIQIVINDLLKQGVLIQKESTMNTPVYPVPKPNGRWRMVLDYRAVNKVTPLIAVQNQHSYGILGSLFKGRYKTTIDLSNGFWAHPIVPEDYWITAFTWQGKQYCWTVLPQGFLNSPGLFTGDVVDLLQGIPNVEVYVDDVYISHDSEKEHLEYLDILFNRLKEAGYIISLKKSNIANSIVDFLGFQITNEGRGLTDTFKEKLENITAPTTLKQLQSILGLLNFARNFIPDFTELIAPLYALIPKSTKNYVPWQIEHSTTLETLITKLNGAEYLQGRKGDKTLIMKVNASYTTGYIRYYNEGEKKPISYVSIVFSKTELKFTELEKLLTTVHKGLLKALDLSMGQNIHVYSPIVSMQNIQKTPQTAKKALASRWLSWLSYLEDPRIRFFYDPQMPALKDLPAVDTGKDNKKHPSNFQHIFYTDGSAITSPTKEGHLNAGMGIVYFINKDGNLQKQQEWSISLGNHTAQFAEIAAFEFALKKCLPLGGNILVVTDSNYVAKAYNEELDVWASNGFVNNRKKPLKHISKWKSVADLKRLRPDVVVTHEPGHQKLDSSPHAYGNNLADQLATQASFKVHAGKRTADGSEFEKRTADGSEFESPKKKAKVE

SEQ ID NO: 7108 - protein, 2087 aa, synthetic construct
MPAAKRVKLDGGDKKYSIGLDIGTNSVGWAVITDEYKVPSKKFKVLGNTDRHSIKKNLIGALLFDSGETAEATRLKRTARRRYTRRKNRICYLQEIFSNEMAKVDDSFFHRLEESFLVEEDKKHERHPIFGNIVDEVAYHEKYPTIYHLRKKLVDSTDKADLRLIYLALAHMIKFRGHFLIEGDLNPDNSDVDKLFIQLVQTYNQLFEENPINASGVDAKAILSARLSKSRRLENLIAQLPGEKKNGLFGNLIALSLGLTPNFKSNFDLAEDAKLQLSKDTYDDDLDNLLAQIGDQYADLFLAAKNLSDAILLSDILRVNTEITKAPLSASMIKRYDEHHQDLTLLKALVRQQLPEKYKEIFFDQSKNGYAGYIDGGASQEEFYKFIKPILEKMDGTEELLVKLNREDLLRKQRTFDNGSIPHQIHLGELHAILRRQEDFYPFLKDNREKIEKILTFRIPYYVGPLARGNSRFAWMTRKSEETITPWNFEEVVDKGASAQSFIERMTNFDKNLPNEKVLPKHSLLYEYFTVYNELTKVKYVTEGMRKPAFLSGEQKKAIVDLLFKTNRKVTVKQLKEDYFKKIECFDSVEISGVEDRFNASLGTYHDLLKIIKDKDFLDNEENEDILEDIVLTLTLFEDREMIEERLKTYAHLFDDKVMKQLKRRRYTGWGRLSRKLINGIRDKQSGKTILDFLKSDGFANRNFMQLIHDDSLTFKEDIQKAQVSGQGDSLHEHIANLAGSPAIKKGILQTVKVVDELVKVMGRHKPENIVIEMARENQTTQKGQKNSRERMKRIEEGIKELGSQILKEHPVENTQLQNEKLYLYYLQNGRDMYVDQELDINRLSDYDVDHIVPQSFLKDDSIDNKVLTRSDKARGKSDNVPSEEVVKKMKNYWRQLLNAKLITQRKFDNLTKAERGGLSELDKAGFIKRQLVETRQITKHVAQILDSRMNTKYDENDKLIREVKVITLKSKLVSDFRKDFQFYKVREINNYHHAHDAYLNAVVGTALIKKYPKLESEFVYGDYKVYDVRKMIAKSEQEIGKATAKYFFYSNIMNFFKTEITLANGEIRKRPLIETNGETGEIVWDKGRDFATVRKVLSMPQVNIVKKTEVQTGGFSKESILPKRNSDKLIARKKDWDPKKYGGFDSPTVAYSVLVVAKVEKGKSKKLKSVKELLGITIMERSSFEKNPIDFLEAKGYKEVKKDLIIKLPKYSLFELENGRKRMLASAGELQKGNELALPSKYVNFLYLASHYEKLKGSPEDNEQKQLFVEQHKHYLDEIIEQISEFSKRVILADANLDKVLSAYNKHRDKPIREQAENIIHLFTLTNLGAPAAFKYFDTTIDRKRYTSTKEVLDATLIHQSITGLYETRIDLSQLGGDGGEAAAKGSSGGSGGVPWILKKPLELTIKLDLEEQQGTLLNNSILSKKGKEELKQLFEKYSALWQSWENQVGHRRIRPHKIATGTVKPTPQKQYHINPKAKPDIQIVINDLLKQGVLIQKESTMNTPVYPVPKPNGRWRMVLDYRAVNKVTPLIAVQNQHSYGILGSLFKGRYKTTIDLSNGFWAHPIVPEDYWITAFTWQGKQYCWTVLPQGFLNSPGLFNGDVVDLLQGIPNVEVYVDDVYISHDSEKEHLEYLDILFNRLKEAGYIISLKKSNIANSIVDFLGFQITNEGRGLTDTFKEKLENITAPTTLKQLQSILGKLNFARNFIPDFTELIAPLYALIPKSPKNYVPWQIEHSTTLETLITKLNGAEYLQGRKGDKTLIMKVNASYTTGYIRYYNEGEKKPISYVSIVFSKTELKFTELEKLLTTVHKGLLKALDLSMGQNIHVYSPIVSMQNIQKTPQTAKKALASRWLSWLSYLEDPRIRFFYDPQMPALKDLPAVDTGKDNKKHPSNFQHIFYTDGSAITSPTKEGHLNAGMGIVYFINKDGNLQKQQEWSISLGNHTAQFAEIAAFEFALKKCLPLGGNILVVTDSNYVAKAYNEELDVWASNGFVNNRKKPLKHISKWKSVADLKRLRPDVVVTHEPGHQKLDSSPHAYGNNLADQLATQASFKVHAGKRTADGSEFEKRTADGSEFESPKKKAKVE

SEQ ID NO: 7109 - protein, 2094 aa, synthetic construct
MPAAKRVKLDGGDKKYSIGLDIGTNSVGWAVITDEYKVPSKKFKVLGNTDRHSIKKNLIGALLFDSGETAEATRLKRTARRRYTRRKNRICYLQEIFSNEMAKVDDSFFHRLEESFLVEEDKKHERHPIFGNIVDEVAYHEKYPTIYHLRKKLVDSTDKADLRLIYLALAHMIKFRGHFLIEGDLNPDNSDVDKLFIQLVQTYNQLFEENPINASGVDAKAILSARLSKSRRLENLIAQLPGEKKNGLFGNLIALSLGLTPNFKSNFDLAEDAKLQLSKDTYDDDLDNLLAQIGDQYADLFLAAKNLSDAILLSDILRVNTEITKAPLSASMIKRYDEHHQDLTLLKALVRQQLPEKYKEIFFDQSKNGYAGYIDGGASQEEFYKFIKPILEKMDGTEELLVKLNREDLLRKQRTFDNGSIPHQIHLGELHAILRRQEDFYPFLKDNREKIEKILTFRIPYYVGPLARGNSRFAWMTRKSEETITPWNFEEVVDKGASAQSFIERMTNFDKNLPNEKVLPKHSLLYEYFTVYNELTKVKYVTEGMRKPAFLSGEQKKAIVDLLFKTNRKVTVKQLKEDYFKKIECFDSVEISGVEDRFNASLGTYHDLLKIIKDKDFLDNEENEDILEDIVLTLTLFEDREMIEERLKTYAHLFDDKVMKQLKRRRYTGWGRLSRKLINGIRDKQSGKTILDFLKSDGFANRNFMQLIHDDSLTFKEDIQKAQVSGQGDSLHEHIANLAGSPAIKKGILQTVKVVDELVKVMGRHKPENIVIEMARENQTTQKGQKNSRERMKRIEEGIKELGSQILKEHPVENTQLQNEKLYLYYLQNGRDMYVDQELDINRLSDYDVDHIVPQSFLKDDSIDNKVLTRSDKARGKSDNVPSEEVVKKMKNYWRQLLNAKLITQRKFDNLTKAERGGLSELDKAGFIKRQLVETRQITKHVAQILDSRMNTKYDENDKLIREVKVITLKSKLVSDFRKDFQFYKVREINNYHHAHDAYLNAVVGTALIKKYPKLESEFVYGDYKVYDVRKMIAKSEQEIGKATAKYFFYSNIMNFFKTEITLANGEIRKRPLIETNGETGEIVWDKGRDFATVRKVLSMPQVNIVKKTEVQTGGFSKESILPKRNSDKLIARKKDWDPKKYGGFDSPTVAYSVLVVAKVEKGKSKKLKSVKELLGITIMERSSFEKNPIDFLEAKGYKEVKKDLIIKLPKYSLFELENGRKRMLASAGELQKGNELALPSKYVNFLYLASHYEKLKGSPEDNEQKQLFVEQHKHYLDEIIEQISEFSKRVILADANLDKVLSAYNKHRDKPIREQAENIIHLFTLTNLGAPAAFKYFDTTIDRKRYTSTKEVLDATLIHQSITGLYETRIDLSQLGGDGGEAAAKGSSGGSGGVLNLEEEYRLHEKPVPSSIDPSWLQLFPTVWAERAGMGLANQVPPVVVELRSGASPVAVRQYPMSKEAREGIRPHIQKFLDLGVLVPCRSPWNTPLLPVKKPGTNDYRPVQDLREINKRVQDIHPTVPNPYNLLSSLPPSYTWYSVLDLKDAFFCLRLHPNSQPLFAFEWKDPEKGNTGQLTWTRLPQGFKNSPTLFNEALHRDLAPFRALNPQVVLLQYVDDLLVAAPTYEDCKKGTQKLLQELSKLGYRVSAKKAQLCQREVTYLGYLLKEGKRWLTPARKATVMKIPVPTTPRQVREFLGTAGFCRLWIPGFASLAAPLYPLTKPSIPFIWTEEHQQAFDHIKKALLSAPALALPDLTKPFTLYIDERAGVARGVLTQTLGPWRRPVAYLSKKLDPVASGWPTCLKAVAAVALLLKDADKLTLGQNVTVIASHSLESIVRQPPDRWMTNARMTHYQSLLLNERVSFAPPAVLNPATLLPVESEATPVHRCSEILAEETGTRRDLEDQPLPGVPTWYTDGSSFITEGKRRAGAPIVDGKRTVWASSLPEGTSAQKAELVALTQALRLAEGKNINIYTDSRYAFATAHIHGAIYKQRGWLTSAGKDIKNKEEILALLEAIHLPRRVAIIHCPGHQRGSNPVATGNRRADEAAKQAALSTRVLAGTTKPAGKRTADGSEFEKRTADGSEFESPKKKAKVE

SEQ ID NO: 7110 - protein, 2127 aa, synthetic construct
MPAAKRVKLDGGDKKYSIGLDIGTNSVGWAVITDEYKVPSKKFKVLGNTDRHSIKKNLIGALLFDSGETAEATRLKRTARRRYTRRKNRICYLQEIFSNEMAKVDDSFFHRLEESFLVEEDKKHERHPIFGNIVDEVAYHEKYPTIYHLRKKLVDSTDKADLRLIYLALAHMIKFRGHFLIEGDLNPDNSDVDKLFIQLVQTYNQLFEENPINASGVDAKAILSARLSKSRRLENLIAQLPGEKKNGLFGNLIALSLGLTPNFKSNFDLAEDAKLQLSKDTYDDDLDNLLAQIGDQYADLFLAAKNLSDAILLSDILRVNTEITKAPLSASMIKRYDEHHQDLTLLKALVRQQLPEKYKEIFFDQSKNGYAGYIDGGASQEEFYKFIKPILEKMDGTEELLVKLNREDLLRKQRTFDNGSIPHQIHLGELHAILRRQEDFYPFLKDNREKIEKILTFRIPYYVGPLARGNSRFAWMTRKSEETITPWNFEEVVDKGASAQSFIERMTNFDKNLPNEKVLPKHSLLYEYFTVYNELTKVKYVTEGMRKPAFLSGEQKKAIVDLLFKTNRKVTVKQLKEDYFKKIECFDSVEISGVEDRFNASLGTYHDLLKIIKDKDFLDNEENEDILEDIVLTLTLFEDREMIEERLKTYAHLFDDKVMKQLKRRRYTGWGRLSRKLINGIRDKQSGKTILDFLKSDGFANRNFMQLIHDDSLTFKEDIQKAQVSGQGDSLHEHIANLAGSPAIKKGILQTVKVVDELVKVMGRHKPENIVIEMARENQTTQKGQKNSRERMKRIEEGIKELGSQILKEHPVENTQLQNEKLYLYYLQNGRDMYVDQELDINRLSDYDVDHIVPQSFLKDDSIDNKVLTRSDKARGKSDNVPSEEVVKKMKNYWRQLLNAKLITQRKFDNLTKAERGGLSELDKAGFIKRQLVETRQITKHVAQILDSRMNTKYDENDKLIREVKVITLKSKLVSDFRKDFQFYKVREINNYHHAHDAYLNAVVGTALIKKYPKLESEFVYGDYKVYDVRKMIAKSEQEIGKATAKYFFYSNIMNFFKTEITLANGEIRKRPLIETNGETGEIVWDKGRDFATVRKVLSMPQVNIVKKTEVQTGGFSKESILPKRNSDKLIARKKDWDPKKYGGFDSPTVAYSVLVVAKVEKGKSKKLKSVKELLGITIMERSSFEKNPIDFLEAKGYKEVKKDLIIKLPKYSLFELENGRKRMLASAGELQKGNELALPSKYVNFLYLASHYEKLKGSPEDNEQKQLFVEQHKHYLDEIIEQISEFSKRVILADANLDKVLSAYNKHRDKPIREQAENIIHLFTLTNLGAPAAFKYFDTTIDRKRYTSTKEVLDATLIHQSITGLYETRIDLSQLGGDGGEAAAKGSSGGSGGLLGRDLLTKLKAQIQFSTEGPQVTWEDRPAMCLVLNLEEEYRLHEKPVPPSIDPSWLQLFPMVWAEKAGMGLANQVPPVVVELKSDASPVAVRQYPMSKEAREGIRPHIQRFLDLGILVPCQSPWNTPLLPVKKPGTNDYRPVQDLREVNKRVQDIHPTVPNPYNLLSSLPPSHTWYSVLDLKDAFFCLKLHPNSQPLFAFEWRDPEKGNTGQLTWTRLPQGFKNSPTLFNEALHRDLASFRALNPQVVMLQYVDDLLVAAPTYRDCKEGTRRLLQELSKLGYRVSAKKAQLCREEVTYLGYLLKGGKRWLTPARKATVMKIPTPTTPRQVREFLGTAGFCRLWIPGFASLAAPLYPLTRPKVPFTWTEAHQEAFGRIKEALLSAPALALPDLTKPFALYVDEKEGVARGVLTQTLGPWRRPVAYLSKKLDPVASGWPTCLKAIAAVALLLKDADKLTLGQNVLVIAPHNLESIVRQPPDRWMTNARMTHYQSLLLNERVSFAPPAILNPATLLPVESDDTPIHICSEILAEETGTRPDLRDQPLPGVPAWYTDGSSFIMDGRRQAGAAIVDNKRTVWASNLPEGTSAQKAELIALTQALRLAEGKSINIYTDSRYAFATAHVHGAIYKQRGWLTSAGKDIKNKEEILALLEAIHLPKRVAIIHCPGHQRGTDPVATGNRKADEAAKQAAQSTRILTETTKNAGKRTADGSEFEKRTADGSEFESPKKKAKVE

SEQ ID NO: 7111 - protein, 2218 aa, synthetic construct
MPAAKRVKLDGGDKKYSIGLDIGTNSVGWAVITDEYKVPSKKFKVLGNTDRHSIKKNLIGALLFDSGETAEATRLKRTARRRYTRRKNRICYLQEIFSNEMAKVDDSFFHRLEESFLVEEDKKHERHPIFGNIVDEVAYHEKYPTIYHLRKKLVDSTDKADLRLIYLALAHMIKFRGHFLIEGDLNPDNSDVDKLFIQLVQTYNQLFEENPINASGVDAKAILSARLSKSRRLENLIAQLPGEKKNGLFGNLIALSLGLTPNFKSNFDLAEDAKLQLSKDTYDDDLDNLLAQIGDQYADLFLAAKNLSDAILLSDILRVNTEITKAPLSASMIKRYDEHHQDLTLLKALVRQQLPEKYKEIFFDQSKNGYAGYIDGGASQEEFYKFIKPILEKMDGTEELLVKLNREDLLRKQRTFDNGSIPHQIHLGELHAILRRQEDFYPFLKDNREKIEKILTFRIPYYVGPLARGNSRFAWMTRKSEETITPWNFEEVVDKGASAQSFIERMTNFDKNLPNEKVLPKHSLLYEYFTVYNELTKVKYVTEGMRKPAFLSGEQKKAIVDLLFKTNRKVTVKQLKEDYFKKIECFDSVEISGVEDRFNASLGTYHDLLKIIKDKDFLDNEENEDILEDIVLTLTLFEDREMIEERLKTYAHLFDDKVMKQLKRRRYTGWGRLSRKLINGIRDKQSGKTILDFLKSDGFANRNFMQLIHDDSLTFKEDIQKAQVSGQGDSLHEHIANLAGSPAIKKGILQTVKVVDELVKVMGRHKPENIVIEMARENQTTQKGQKNSRERMKRIEEGIKELGSQILKEHPVENTQLQNEKLYLYYLQNGRDMYVDQELDINRLSDYDVDHIVPQSFLKDDSIDNKVLTRSDKARGKSDNVPSEEVVKKMKNYWRQLLNAKLITQRKFDNLTKAERGGLSELDKAGFIKRQLVETRQITKHVAQILDSRMNTKYDENDKLIREVKVITLKSKLVSDFRKDFQFYKVREINNYHHAHDAYLNAVVGTALIKKYPKLESEFVYGDYKVYDVRKMIAKSEQEIGKATAKYFFYSNIMNFFKTEITLANGEIRKRPLIETNGETGEIVWDKGRDFATVRKVLSMPQVNIVKKTEVQTGGFSKESILPKRNSDKLIARKKDWDPKKYGGFDSPTVAYSVLVVAKVEKGKSKKLKSVKELLGITIMERSSFEKNPIDFLEAKGYKEVKKDLIIKLPKYSLFELENGRKRMLASAGELQKGNELALPSKYVNFLYLASHYEKLKGSPEDNEQKQLFVEQHKHYLDEIIEQISEFSKRVILADANLDKVLSAYNKHRDKPIREQAENIIHLFTLTNLGAPAAFKYFDTTIDRKRYTSTKEVLDATLIHQSITGLYETRIDLSQLGGDGGEAAAKGSSGGSGGTLGDQGSRGSDPLPEPRVTLTVEGIPTEFLVNTGAEHSVLTKPMGKMGSKRTVVAGATGSKVYPWTTKRLLKIGQKQVTHSFLVIPECPAPLLGRDLLTKLKAQIQFSTEGPQVTWEDRPAMCLVLNLEEEYRLHEKPVPPSIDPSWLQLFPMVWAEKAGMGLANQVPPVVVELKSDASPVAVRQYPMSKEAREGIRPHIQRFLDLGILVPCQSPWNTPLLPVKKPGTNDYRPVQDLREVNKRVQDIHPTVPNPYNLLSSLPPSHTWYSVLDLKDAFFCLKLHPNSQPLFAFEWRDPEKGNTGQLTWTRLPQGFKNSPTLFNEALHRDLASFRALNPQVVMLQYVDDLLVAAPTYRDCKEGTRRLLQELSKLGYRVSAKKAQLCREEVTYLGYLLKGGKRWLTPARKATVMKIPTPTTPRQVREFLGTAGFCRLWIPGFASLAAPLYPLTRPKVPFTWTEAHQEAFGRIKEALLSAPALALPDLTKPFALYVDEKEGVARGVLTQTLGPWRRPVAYLSKKLDPVASGWPTCLKAIAAVALLLKDADKLTLGQNVLVIAPHNLESIVRQPPDRWMTNARMTHYQSLLLNERVSFAPPAILNPATLLPVESDDTPIHICSEILAEETGTRPDLRDQPLPGVPAWYTDGSSFIMDGRRQAGAAIVDNKRTVWASNLPEGTSAQKAELIALTQALRLAEGKSINIYTDSRYAFATAHVHGAIYKQRGWLTSAGKDIKNKEEILALLEAIHLPKRVAIIHCPGHQRGTDPVATGNRKADEAAKQAAQSTRILTETTKNAGKRTADGSEFEKRTADGSEFESPKKKAKVE

SEQ ID NO: 7112 - protein, 2218 aa, synthetic construct
MPAAKRVKLDGGDKKYSIGLDIGTNSVGWAVITDEYKVPSKKFKVLGNTDRHSIKKNLIGALLFDSGETAEATRLKRTARRRYTRRKNRICYLQEIFSNEMAKVDDSFFHRLEESFLVEEDKKHERHPIFGNIVDEVAYHEKYPTIYHLRKKLVDSTDKADLRLIYLALAHMIKFRGHFLIEGDLNPDNSDVDKLFIQLVQTYNQLFEENPINASGVDAKAILSARLSKSRRLENLIAQLPGEKKNGLFGNLIALSLGLTPNFKSNFDLAEDAKLQLSKDTYDDDLDNLLAQIGDQYADLFLAAKNLSDAILLSDILRVNTEITKAPLSASMIKRYDEHHQDLTLLKALVRQQLPEKYKEIFFDQSKNGYAGYIDGGASQEEFYKFIKPILEKMDGTEELLVKLNREDLLRKQRTFDNGSIPHQIHLGELHAILRRQEDFYPFLKDNREKIEKILTFRIPYYVGPLARGNSRFAWMTRKSEETITPWNFEEVVDKGASAQSFIERMTNFDKNLPNEKVLPKHSLLYEYFTVYNELTKVKYVTEGMRKPAFLSGEQKKAIVDLLFKTNRKVTVKQLKEDYFKKIECFDSVEISGVEDRFNASLGTYHDLLKIIKDKDFLDNEENEDILEDIVLTLTLFEDREMIEERLKTYAHLFDDKVMKQLKRRRYTGWGRLSRKLINGIRDKQSGKTILDFLKSDGFANRNFMQLIHDDSLTFKEDIQKAQVSGQGDSLHEHIANLAGSPAIKKGILQTVKVVDELVKVMGRHKPENIVIEMARENQTTQKGQKNSRERMKRIEEGIKELGSQILKEHPVENTQLQNEKLYLYYLQNGRDMYVDQELDINRLSDYDVDHIVPQSFLKDDSIDNKVLTRSDKARGKSDNVPSEEVVKKMKNYWRQLLNAKLITQRKFDNLTKAERGGLSELDKAGFIKRQLVETRQITKHVAQILDSRMNTKYDENDKLIREVKVITLKSKLVSDFRKDFQFYKVREINNYHHAHDAYLNAVVGTALIKKYPKLESEFVYGDYKVYDVRKMIAKSEQEIGKATAKYFFYSNIMNFFKTEITLANGEIRKRPLIETNGETGEIVWDKGRDFATVRKVLSMPQVNIVKKTEVQTGGFSKESILPKRNSDKLIARKKDWDPKKYGGFDSPTVAYSVLVVAKVEKGKSKKLKSVKELLGITIMERSSFEKNPIDFLEAKGYKEVKKDLIIKLPKYSLFELENGRKRMLASAGELQKGNELALPSKYVNFLYLASHYEKLKGSPEDNEQKQLFVEQHKHYLDEIIEQISEFSKRVILADANLDKVLSAYNKHRDKPIREQAENIIHLFTLTNLGAPAAFKYFDTTIDRKRYTSTKEVLDATLIHQSITGLYETRIDLSQLGGDGGEAAAKGSSGGSGGTLGDQGSRGSDPLPEPRVTLTVEGIPTEFLVNTGAEHSVLTKPMGKMGSKRTVVAGATGSKVYPWTTKRLLKIGQKQVTHSFLVIPECPAPLLGRDLLTKLKAQIQFSTEGPQVTWEDRPAMCLVLNLEEEYRLHEKPVPPSIDPSWLQLFPMVWAEKAGMGLANQVPPVVVELKSDASPVAVRQYPMSKEAREGIRPHIQRFLDLGILVPCQSPWNTPLLPVKKPGTNDYRPVQDLREVNKRVQDIHPTVPNPYNLLSSLPPSHTWYSVLDLKDAFFCLKLHPNSQPLFAFEWRDPEKGNTGQLTWTRLPQGFKNSPTLFNEALHRDLASFRALNPQVVMLQYVDDLLVAAPTYRDCKEGTRRLLQELSKLGYRVSAKKAQLCREEVTYLGYLLKGGKRWLTPARKATVMKIPTPTTPRQVREFLGKAGFCRLFIPGFASLAAPLYPLTRPKVPFTWTEAHQEAFGRIKEALLSAPALALPDLTKPFALYVDEKEGVARGVLTQTLGPWRRPVAYLSKKLDPVASGWPTCLKAIAAVALLLKDADKLTLGQNVLVIAPHNLESIVRQPPDRWMTNARMTHYQSLLLNERVSFAPPAILNPATLLPVESDDTPIHICSEILAEETGTRPDLRDQPLPGVPAWYTDGSSFIMDGRRQAGAAIVDNKRTVWASNLPEGTSAQKAELIALTQALRLAEGKSINIYTDSRYAFATAHVHGAIYKQRGWLTSAGKDIKNKEEILALLEAIHLPKRVAIIHCPGHQRGTDPVATGNRKADEAAKQAAQSTRILTETTKNAGKRTADGSEFEKRTADGSEFESPKKKAKVE

SEQ ID NO: 7113 - protein, 2096 aa, synthetic construct
MPAAKRVKLDGGDKKYSIGLDIGTNSVGWAVITDEYKVPSKKFKVLGNTDRHSIKKNLIGALLFDSGETAEATRLKRTARRRYTRRKNRICYLQEIFSNEMAKVDDSFFHRLEESFLVEEDKKHERHPIFGNIVDEVAYHEKYPTIYHLRKKLVDSTDKADLRLIYLALAHMIKFRGHFLIEGDLNPDNSDVDKLFIQLVQTYNQLFEENPINASGVDAKAILSARLSKSRRLENLIAQLPGEKKNGLFGNLIALSLGLTPNFKSNFDLAEDAKLQLSKDTYDDDLDNLLAQIGDQYADLFLAAKNLSDAILLSDILRVNTEITKAPLSASMIKRYDEHHQDLTLLKALVRQQLPEKYKEIFFDQSKNGYAGYIDGGASQEEFYKFIKPILEKMDGTEELLVKLNREDLLRKQRTFDNGSIPHQIHLGELHAILRRQEDFYPFLKDNREKIEKILTFRIPYYVGPLARGNSRFAWMTRKSEETITPWNFEEVVDKGASAQSFIERMTNFDKNLPNEKVLPKHSLLYEYFTVYNELTKVKYVTEGMRKPAFLSGEQKKAIVDLLFKTNRKVTVKQLKEDYFKKIECFDSVEISGVEDRFNASLGTYHDLLKIIKDKDFLDNEENEDILEDIVLTLTLFEDREMIEERLKTYAHLFDDKVMKQLKRRRYTGWGRLSRKLINGIRDKQSGKTILDFLKSDGFANRNFMQLIHDDSLTFKEDIQKAQVSGQGDSLHEHIANLAGSPAIKKGILQTVKVVDELVKVMGRHKPENIVIEMARENQTTQKGQKNSRERMKRIEEGIKELGSQILKEHPVENTQLQNEKLYLYYLQNGRDMYVDQELDINRLSDYDVDHIVPQSFLKDDSIDNKVLTRSDKARGKSDNVPSEEVVKKMKNYWRQLLNAKLITQRKFDNLTKAERGGLSELDKAGFIKRQLVETRQITKHVAQILDSRMNTKYDENDKLIREVKVITLKSKLVSDFRKDFQFYKVREINNYHHAHDAYLNAVVGTALIKKYPKLESEFVYGDYKVYDVRKMIAKSEQEIGKATAKYFFYSNIMNFFKTEITLANGEIRKRPLIETNGETGEIVWDKGRDFATVRKVLSMPQVNIVKKTEVQTGGFSKESILPKRNSDKLIARKKDWDPKKYGGFDSPTVAYSVLVVAKVEKGKSKKLKSVKELLGITIMERSSFEKNPIDFLEAKGYKEVKKDLIIKLPKYSLFELENGRKRMLASAGELQKGNELALPSKYVNFLYLASHYEKLKGSPEDNEQKQLFVEQHKHYLDEIIEQISEFSKRVILADANLDKVLSAYNKHRDKPIREQAENIIHLFTLTNLGAPAAFKYFDTTIDRKRYTSTKEVLDATLIHQSITGLYETRIDLSQLGGDGGEAAAKGSSGGSGGTLNLEDEYRLYETSAEPEVSPGSTWLSDFPQAWAETGGMGLAVRQAPLIIPLKATSTPVSIKQYPMSQEAKLGIKPHIQRLLDQGILVPCQSPWNTPLLPVKKPGTNDYRPVQDLREVNKRVEDIHPTVPNPYNLLSGLPPSHRWYTVLDLKDAFFCLRLHPTSQPLFAFEWRDPGMGISGQLTWTRLPQGFKNSPTLFNEALHRDLADFRIQHPDLILLQYVDDILLAATSELDCQQGTRALLLTLGNLGYRASAKKAQLCQKQVKYLGYLLKEGQRWLTEARKETVMGQPTPKTPRQLREFLGTAGFCRLWIPGFAEMAAPLYPLTKPGTLFNWGPDQQKAYQEIKQALLTAPALGLPDLTKPFELFVDEKQGYAKGVLTQKLGPWRRPVAYLSKKLDPVAAGWPPCLRMVAAIAVLRKDAGKLTMGQPLVILAPHAVEALVKQPPDRWLSNARMTHYQAMLLDTDRVQFGPVVALNPATLLPLPEEGAPHDCLEILAETHGTRPDLTDQPIPDADHTWYTDGSSFLQEGQRKAGAAVTTETEVIWARALPAGTSAQRAELIALTQALKMAEGKRLNVYTDSRYAFATAHIHGEIYRRRGWLTSEGREIKNKSEILALLKALFLPKRLSIIHCLGHQKGDSAEARGNRLADQAAREAAIKTPPDTSTLLAGKRTADGSEFEKRTADGSEFESPKKKAKVE

SEQ ID NO: 7114 - protein, 2096 aa, synthetic construct
MPAAKRVKLDGGDKKYSIGLDIGTNSVGWAVITDEYKVPSKKFKVLGNTDRHSIKKNLIGALLFDSGETAEATRLKRTARRRYTRRKNRICYLQEIFSNEMAKVDDSFFHRLEESFLVEEDKKHERHPIFGNIVDEVAYHEKYPTIYHLRKKLVDSTDKADLRLIYLALAHMIKFRGHFLIEGDLNPDNSDVDKLFIQLVQTYNQLFEENPINASGVDAKAILSARLSKSRRLENLIAQLPGEKKNGLFGNLIALSLGLTPNFKSNFDLAEDAKLQLSKDTYDDDLDNLLAQIGDQYADLFLAAKNLSDAILLSDILRVNTEITKAPLSASMIKRYDEHHQDLTLLKALVRQQLPEKYKEIFFDQSKNGYAGYIDGGASQEEFYKFIKPILEKMDGTEELLVKLNREDLLRKQRTFDNGSIPHQIHLGELHAILRRQEDFYPFLKDNREKIEKILTFRIPYYVGPLARGNSRFAWMTRKSEETITPWNFEEVVDKGASAQSFIERMTNFDKNLPNEKVLPKHSLLYEYFTVYNELTKVKYVTEGMRKPAFLSGEQKKAIVDLLFKTNRKVTVKQLKEDYFKKIECFDSVEISGVEDRFNASLGTYHDLLKIIKDKDFLDNEENEDILEDIVLTLTLFEDREMIEERLKTYAHLFDDKVMKQLKRRRYTGWGRLSRKLINGIRDKQSGKTILDFLKSDGFANRNFMQLIHDDSLTFKEDIQKAQVSGQGDSLHEHIANLAGSPAIKKGILQTVKVVDELVKVMGRHKPENIVIEMARENQTTQKGQKNSRERMKRIEEGIKELGSQILKEHPVENTQLQNEKLYLYYLQNGRDMYVDQELDINRLSDYDVDHIVPQSFLKDDSIDNKVLTRSDKARGKSDNVPSEEVVKKMKNYWRQLLNAKLITQRKFDNLTKAERGGLSELDKAGFIKRQLVETRQITKHVAQILDSRMNTKYDENDKLIREVKVITLKSKLVSDFRKDFQFYKVREINNYHHAHDAYLNAVVGTALIKKYPKLESEFVYGDYKVYDVRKMIAKSEQEIGKATAKYFFYSNIMNFFKTEITLANGEIRKRPLIETNGETGEIVWDKGRDFATVRKVLSMPQVNIVKKTEVQTGGFSKESILPKRNSDKLIARKKDWDPKKYGGFDSPTVAYSVLVVAKVEKGKSKKLKSVKELLGITIMERSSFEKNPIDFLEAKGYKEVKKDLIIKLPKYSLFELENGRKRMLASAGELQKGNELALPSKYVNFLYLASHYEKLKGSPEDNEQKQLFVEQHKHYLDEIIEQISEFSKRVILADANLDKVLSAYNKHRDKPIREQAENIIHLFTLTNLGAPAAFKYFDTTIDRKRYTSTKEVLDATLIHQSITGLYETRIDLSQLGGDGGEAAAKGSSGGSGGTLNIEDEYRLHETSKGPDVPLGSTWLSDFPQAWAETGGMGLAVRQAPLIIPLKATSTPVSIKQYPMSQEARLGIKPHIQRLLDQGILVPCQSPWNTPLLPVKKPGTNDYRPVQDLREVNKRVEDIHPTVPNPYNLLSGLPPSHQWYTVLDLKDAFFCLRLHPTSQSLFAFEWRDPEMGISGQLTWTRLPQGFKNSPTLFDEALHRDLADFRIQHPDLILLQYVDDLLLAATSELDCQQGTRALLQTLGDLGYRASAKKAQICQKQVKYLGYLLKEGQRWLTEARKETVMGQPTPKTPRQLREFLGTAGFCRLWIPGFAEMAAPLYPLTKTGTLFEWGPDQQKAYQEIKQALLTAPALGLPDLTKPFELFVDEKQGYAKGVLTQKLGPWRRPVAYLSKKLDPVAAGWPPCLRMVAAIAVLTKDAGKLTMGQPLVILAPHAVEALVKQPPDRWLSNARMTHYQALLLDTDRVQFGPIVALNPATLLPLPEEGLQHDCLDILAEAHGTRPDLTDQPLPDADHTWYTDGSSFLQEGQRKAGAAVTTETEVVWAKALPAGTSAQRAELIALTQALKMAEGKKLNVYTDSRYAFATAHIHGEIYRRRGLLTSEGKEIKNKDEILALLKALFLPKRLSIIHCPGHQKGNRAEARGNRMADQAAREVATRETPETSTLLAGKRTADGSEFEKRTADGSEFESPKKKAKVE

SEQ ID NO: 7115 - protein, 2096 aa, synthetic construct
MPAAKRVKLDGGDKKYSIGLDIGTNSVGWAVITDEYKVPSKKFKVLGNTDRHSIKKNLIGALLFDSGETAEATRLKRTARRRYTRRKNRICYLQEIFSNEMAKVDDSFFHRLEESFLVEEDKKHERHPIFGNIVDEVAYHEKYPTIYHLRKKLVDSTDKADLRLIYLALAHMIKFRGHFLIEGDLNPDNSDVDKLFIQLVQTYNQLFEENPINASGVDAKAILSARLSKSRRLENLIAQLPGEKKNGLFGNLIALSLGLTPNFKSNFDLAEDAKLQLSKDTYDDDLDNLLAQIGDQYADLFLAAKNLSDAILLSDILRVNTEITKAPLSASMIKRYDEHHQDLTLLKALVRQQLPEKYKEIFFDQSKNGYAGYIDGGASQEEFYKFIKPILEKMDGTEELLVKLNREDLLRKQRTFDNGSIPHQIHLGELHAILRRQEDFYPFLKDNREKIEKILTFRIPYYVGPLARGNSRFAWMTRKSEETITPWNFEEVVDKGASAQSFIERMTNFDKNLPNEKVLPKHSLLYEYFTVYNELTKVKYVTEGMRKPAFLSGEQKKAIVDLLFKTNRKVTVKQLKEDYFKKIECFDSVEISGVEDRFNASLGTYHDLLKIIKDKDFLDNEENEDILEDIVLTLTLFEDREMIEERLKTYAHLFDDKVMKQLKRRRYTGWGRLSRKLINGIRDKQSGKTILDFLKSDGFANRNFMQLIHDDSLTFKEDIQKAQVSGQGDSLHEHIANLAGSPAIKKGILQTVKVVDELVKVMGRHKPENIVIEMARENQTTQKGQKNSRERMKRIEEGIKELGSQILKEHPVENTQLQNEKLYLYYLQNGRDMYVDQELDINRLSDYDVDHIVPQSFLKDDSIDNKVLTRSDKARGKSDNVPSEEVVKKMKNYWRQLLNAKLITQRKFDNLTKAERGGLSELDKAGFIKRQLVETRQITKHVAQILDSRMNTKYDENDKLIREVKVITLKSKLVSDFRKDFQFYKVREINNYHHAHDAYLNAVVGTALIKKYPKLESEFVYGDYKVYDVRKMIAKSEQEIGKATAKYFFYSNIMNFFKTEITLANGEIRKRPLIETNGETGEIVWDKGRDFATVRKVLSMPQVNIVKKTEVQTGGFSKESILPKRNSDKLIARKKDWDPKKYGGFDSPTVAYSVLVVAKVEKGKSKKLKSVKELLGITIMERSSFEKNPIDFLEAKGYKEVKKDLIIKLPKYSLFELENGRKRMLASAGELQKGNELALPSKYVNFLYLASHYEKLKGSPEDNEQKQLFVEQHKHYLDEIIEQISEFSKRVILADANLDKVLSAYNKHRDKPIREQAENIIHLFTLTNLGAPAAFKYFDTTIDRKRYTSTKEVLDATLIHQSITGLYETRIDLSQLGGDGGEAAAKGSSGGSGGTLNIEDEYRLHETSKGPDVPLGSTWLSDFPQAWAETGGMGLAVRQAPLIIPLKATSTPVSIKQYPMSQEARLGIKPHIQRLLDQGILVPCQSPWNTPLLPVKKPGTNDYRPVQDLREVNKRVEDIHPTVPNPYNLLSGLPPSHQWYTVLDLKDAFFCLRLHPTSQSLFAFEWRDPEMGISGQLTWTRLPQGFKNSPTLFNEALHRDLADFRIQHPDLILLQYVDDLLLAATSELDCQQGTRALLQTLGDLGYRASAKKAQICQKQVKYLGYLLKEGQRWLTEARKETVMGQPTPKTPRQLREFLGKAGFCRLFIPGFAEMAAPLYPLTKPGTLFEWGPDQQKAYQEIKQALLTAPALGLPDLTKPFELFVDEKQGYAKGVLTQKLGPWRRPVAYLSKKLDPVAAGWPPCLRMVAAIAVLTKDAGKLTMGQPLVILAPHAVEALVKQPPDRWLSNARMTHYQALLLDTDRVQFGPIVALNPATLLPLPEEGLQHDCLDILAEAHGTRPDLTDQPLPDADHTWYTDGSSFLQEGQRKAGAAVTTETEVVWAKALPAGTSAQRAELIALTQALKMAEGKKLNVYTDSRYAFATAHIHGEIYRRRGWLTSEGKEIKNKDEILALLKALFLPKRLSIIHCPGHQKGNRAEARGNRMADQAAREVATRETPETSTLLAGKRTADGSEFEKRTADGSEFESPKKKAKVE

SEQ ID NO: 7116 - protein, 2096 aa, synthetic construct
MPAAKRVKLDGGDKKYSIGLDIGTNSVGWAVITDEYKVPSKKFKVLGNTDRHSIKKNLIGALLFDSGETAEATRLKRTARRRYTRRKNRICYLQEIFSNEMAKVDDSFFHRLEESFLVEEDKKHERHPIFGNIVDEVAYHEKYPTIYHLRKKLVDSTDKADLRLIYLALAHMIKFRGHFLIEGDLNPDNSDVDKLFIQLVQTYNQLFEENPINASGVDAKAILSARLSKSRRLENLIAQLPGEKKNGLFGNLIALSLGLTPNFKSNFDLAEDAKLQLSKDTYDDDLDNLLAQIGDQYADLFLAAKNLSDAILLSDILRVNTEITKAPLSASMIKRYDEHHQDLTLLKALVRQQLPEKYKEIFFDQSKNGYAGYIDGGASQEEFYKFIKPILEKMDGTEELLVKLNREDLLRKQRTFDNGSIPHQIHLGELHAILRRQEDFYPFLKDNREKIEKILTFRIPYYVGPLARGNSRFAWMTRKSEETITPWNFEEVVDKGASAQSFIERMTNFDKNLPNEKVLPKHSLLYEYFTVYNELTKVKYVTEGMRKPAFLSGEQKKAIVDLLFKTNRKVTVKQLKEDYFKKIECFDSVEISGVEDRFNASLGTYHDLLKIIKDKDFLDNEENEDILEDIVLTLTLFEDREMIEERLKTYAHLFDDKVMKQLKRRRYTGWGRLSRKLINGIRDKQSGKTILDFLKSDGFANRNFMQLIHDDSLTFKEDIQKAQVSGQGDSLHEHIANLAGSPAIKKGILQTVKVVDELVKVMGRHKPENIVIEMARENQTTQKGQKNSRERMKRIEEGIKELGSQILKEHPVENTQLQNEKLYLYYLQNGRDMYVDQELDINRLSDYDVDHIVPQSFLKDDSIDNKVLTRSDKARGKSDNVPSEEVVKKMKNYWRQLLNAKLITQRKFDNLTKAERGGLSELDKAGFIKRQLVETRQITKHVAQILDSRMNTKYDENDKLIREVKVITLKSKLVSDFRKDFQFYKVREINNYHHAHDAYLNAVVGTALIKKYPKLESEFVYGDYKVYDVRKMIAKSEQEIGKATAKYFFYSNIMNFFKTEITLANGEIRKRPLIETNGETGEIVWDKGRDFATVRKVLSMPQVNIVKKTEVQTGGFSKESILPKRNSDKLIARKKDWDPKKYGGFDSPTVAYSVLVVAKVEKGKSKKLKSVKELLGITIMERSSFEKNPIDFLEAKGYKEVKKDLIIKLPKYSLFELENGRKRMLASAGELQKGNELALPSKYVNFLYLASHYEKLKGSPEDNEQKQLFVEQHKHYLDEIIEQISEFSKRVILADANLDKVLSAYNKHRDKPIREQAENIIHLFTLTNLGAPAAFKYFDTTIDRKRYTSTKEVLDATLIHQSITGLYETRIDLSQLGGDGGEAAAKGSSGGSGGTLNIEDEHRLHETSKEPDVSLGSTWLSDFPQAWAETGGMGLAVRQAPLIIPLKATSTPVSIKQYPMSQEARLGIKPHIQRLLDQGILVPCQSPWNTPLLPVKKPGTNDYRPVQDLREVNKRVEDIHPTVPNPYNLLSGLPPSHQWYTVLDLKDAFFCLRLHPTSQPLFAFEWRDPEMGISGQLTWTRLPQGFKNSPTLFDEALHRDLADFRIQHPDLILLQYVDDLLLAATSELDCQQGTRALLQTLGNLGYRASAKKAQICQKQVKYLGYLLKEGQRWLTEARKETVMGQPTPKTPRQLREFLGTAGFCRLWIPGFAEMAAPLYPLTKTGTLFNWGPDQQKAYQEIKQALLTAPALGLPDLTKPFELFVDEKQGYAKGVLTQKLGPWRRPVAYLSKKLDPVAAGWPPCLRMVAAIAVLTKDAGKLTMGQPLVILAPHAVEALVKQPPDRWLSNARMTHYQALLLDTDRVQFGPVVALNPATLLPLPEEGLQHNCLDILAEAHGTRPDLTDQPLPDADHTWYTDGSSLLQEGQRKAGAAVTTETEVIWAKALPAGTSAQRAELIALTQALKMAEGKKLNVYTDSRYAFATAHIHGEIYRRRGLLTSEGKEIKNKDEILALLKALFLPKRLSIIHCPGHQKGHSAEARGNRMADQAARKAAITETPDTSTLLAGKRTADGSEFEKRTADGSEFESPKKKAKVE

SEQ ID NO: 7117 - protein, 2090 aa, synthetic construct
MPAAKRVKLDGGDKKYSIGLDIGTNSVGWAVITDEYKVPSKKFKVLGNTDRHSIKKNLIGALLFDSGETAEATRLKRTARRRYTRRKNRICYLQEIFSNEMAKVDDSFFHRLEESFLVEEDKKHERHPIFGNIVDEVAYHEKYPTIYHLRKKLVDSTDKADLRLIYLALAHMIKFRGHFLIEGDLNPDNSDVDKLFIQLVQTYNQLFEENPINASGVDAKAILSARLSKSRRLENLIAQLPGEKKNGLFGNLIALSLGLTPNFKSNFDLAEDAKLQLSKDTYDDDLDNLLAQIGDQYADLFLAAKNLSDAILLSDILRVNTEITKAPLSASMIKRYDEHHQDLTLLKALVRQQLPEKYKEIFFDQSKNGYAGYIDGGASQEEFYKFIKPILEKMDGTEELLVKLNREDLLRKQRTFDNGSIPHQIHLGELHAILRRQEDFYPFLKDNREKIEKILTFRIPYYVGPLARGNSRFAWMTRKSEETITPWNFEEVVDKGASAQSFIERMTNFDKNLPNEKVLPKHSLLYEYFTVYNELTKVKYVTEGMRKPAFLSGEQKKAIVDLLFKTNRKVTVKQLKEDYFKKIECFDSVEISGVEDRFNASLGTYHDLLKIIKDKDFLDNEENEDILEDIVLTLTLFEDREMIEERLKTYAHLFDDKVMKQLKRRRYTGWGRLSRKLINGIRDKQSGKTILDFLKSDGFANRNFMQLIHDDSLTFKEDIQKAQVSGQGDSLHEHIANLAGSPAIKKGILQTVKVVDELVKVMGRHKPENIVIEMARENQTTQKGQKNSRERMKRIEEGIKELGSQILKEHPVENTQLQNEKLYLYYLQNGRDMYVDQELDINRLSDYDVDHIVPQSFLKDDSIDNKVLTRSDKARGKSDNVPSEEVVKKMKNYWRQLLNAKLITQRKFDNLTKAERGGLSELDKAGFIKRQLVETRQITKHVAQILDSRMNTKYDENDKLIREVKVITLKSKLVSDFRKDFQFYKVREINNYHHAHDAYLNAVVGTALIKKYPKLESEFVYGDYKVYDVRKMIAKSEQEIGKATAKYFFYSNIMNFFKTEITLANGEIRKRPLIETNGETGEIVWDKGRDFATVRKVLSMPQVNIVKKTEVQTGGFSKESILPKRNSDKLIARKKDWDPKKYGGFDSPTVAYSVLVVAKVEKGKSKKLKSVKELLGITIMERSSFEKNPIDFLEAKGYKEVKKDLIIKLPKYSLFELENGRKRMLASAGELQKGNELALPSKYVNFLYLASHYEKLKGSPEDNEQKQLFVEQHKHYLDEIIEQISEFSKRVILADANLDKVLSAYNKHRDKPIREQAENIIHLFTLTNLGAPAAFKYFDTTIDRKRYTSTKEVLDATLIHQSITGLYETRIDLSQLGGDGGEAAAKGSSGGSGGTLQLDDEYRLYSPLVKPDQNIQFWLEQFPQAWAETAGMGLAKQVPPQVIQLKASATPVSVRQYPLSKEAQEGIRPHVQRLIQQGILVPVQSPWNTPLLPVRKPGTNDYRPVQDLREVNKRVQDIHPTVPNPYNLLCALPPQRSWYTVLDLKDAFFCLRLHPTSQPLFAFEWRDPGTGRTGQLTWTRLPQGFKNSPTIFDEALHRDLANFRIQHPQVTLLQYVDDLLLAGATKQDCLEGTKALLLELSDLGYRASAKKAQICRREVTYLGYSLRDGQRWLTEARKKTVVQIPAPTTAKQVREFLGTAGFCRLWIPGFATLAAPLYPLTKEKGEFSWAPEHQKAFDAIKKALLSAPALALPDVTKPFTLYVDERKGVARGVLTQTLGPWRRPVAYLSKKLDPVASGWPVCLKAIAAVAILVKDADKLTLGQNITVIAPHALENIVRQPPDRWMTNARMTHYQSLLLTERVTFAPPAALNPATLLPEETDEPVTHDCHQLLIEETGVRKDLTDIPLTGEVLTWFTDGSSYVVEGKRMAGAAVVDGTRTIWASSLPEGTSAQKAELMALTQALRLAEGKSINIYTDSRYAFATAHVHGAIYKQRGLLTSAGREIKNKEEILSLLEALHLPKRLAIIHCPGHQKAKDPISRGNQMADRVAKQAAQGVNLLAGKRTADGSEFEKRTADGSEFESPKKKAKVE

SEQ ID NO: 7118 - protein, 2176 aa, synthetic construct
MPAAKRVKLDGGDKKYSIGLDIGTNSVGWAVITDEYKVPSKKFKVLGNTDRHSIKKNLIGALLFDSGETAEATRLKRTARRRYTRRKNRICYLQEIFSNEMAKVDDSFFHRLEESFLVEEDKKHERHPIFGNIVDEVAYHEKYPTIYHLRKKLVDSTDKADLRLIYLALAHMIKFRGHFLIEGDLNPDNSDVDKLFIQLVQTYNQLFEENPINASGVDAKAILSARLSKSRRLENLIAQLPGEKKNGLFGNLIALSLGLTPNFKSNFDLAEDAKLQLSKDTYDDDLDNLLAQIGDQYADLFLAAKNLSDAILLSDILRVNTEITKAPLSASMIKRYDEHHQDLTLLKALVRQQLPEKYKEIFFDQSKNGYAGYIDGGASQEEFYKFIKPILEKMDGTEELLVKLNREDLLRKQRTFDNGSIPHQIHLGELHAILRRQEDFYPFLKDNREKIEKILTFRIPYYVGPLARGNSRFAWMTRKSEETITPWNFEEVVDKGASAQSFIERMTNFDKNLPNEKVLPKHSLLYEYFTVYNELTKVKYVTEGMRKPAFLSGEQKKAIVDLLFKTNRKVTVKQLKEDYFKKIECFDSVEISGVEDRFNASLGTYHDLLKIIKDKDFLDNEENEDILEDIVLTLTLFEDREMIEERLKTYAHLFDDKVMKQLKRRRYTGWGRLSRKLINGIRDKQSGKTILDFLKSDGFANRNFMQLIHDDSLTFKEDIQKAQVSGQGDSLHEHIANLAGSPAIKKGILQTVKVVDELVKVMGRHKPENIVIEMARENQTTQKGQKNSRERMKRIEEGIKELGSQILKEHPVENTQLQNEKLYLYYLQNGRDMYVDQELDINRLSDYDVDHIVPQSFLKDDSIDNKVLTRSDKARGKSDNVPSEEVVKKMKNYWRQLLNAKLITQRKFDNLTKAERGGLSELDKAGFIKRQLVETRQITKHVAQILDSRMNTKYDENDKLIREVKVITLKSKLVSDFRKDFQFYKVREINNYHHAHDAYLNAVVGTALIKKYPKLESEFVYGDYKVYDVRKMIAKSEQEIGKATAKYFFYSNIMNFFKTEITLANGEIRKRPLIETNGETGEIVWDKGRDFATVRKVLSMPQVNIVKKTEVQTGGFSKESILPKRNSDKLIARKKDWDPKKYGGFDSPTVAYSVLVVAKVEKGKSKKLKSVKELLGITIMERSSFEKNPIDFLEAKGYKEVKKDLIIKLPKYSLFELENGRKRMLASAGELQKGNELALPSKYVNFLYLASHYEKLKGSPEDNEQKQLFVEQHKHYLDEIIEQISEFSKRVILADANLDKVLSAYNKHRDKPIREQAENIIHLFTLTNLGAPAAFKYFDTTIDRKRYTSTKEVLDATLIHQSITGLYETRIDLSQLGGDGGEAAAKGSSGGSGGMDPLQLLQPLEAEIKGTKLKAHWNSGATITCVPQAFLEEEVPIKNIWIKTIHGEKEQPVYYLTFKIQGRKVEAEVISSPYDYILVSPSDIPWLMKKPLQLTTLVPLQEYEERLLKQTMLTGSYKEKLQSLFLKYDALWQHWENQVGHRRIKPHHIATGTVNPRPQKQYPINPKAKASIQTVINDLLKQGVLIQQNSIMNTPVYPVPKPDGKWRMVLDYREVNKTIPLIAAQNQHSAGILSSIFRGKYKTTLDLSNGFWAHSITPESYWLTAFTWLGQQYCWTRLPQGFLNSPALFNADVVDLLKEVPNVQVYVDDIYISHDDPREHLEQLEKVFSLLLNAGYVVSLKKSEIAQHEVEFLGFNITKEGRGLTETFKQKLLNITPPRDLKQLQSILGLLNFARNFIPNFSELVKPLYNIIATAPGKYITWTTDNSQQLQNIISMLNSAENLEERNPEVRLIMKVNTSPSAGYIRFYNEFAKRPIMYLNYVYTKAEVKFTNTEKLLTTIHKGLIKALDLGMGQEILVYSPIVSMTKIQKTPLPERKALPIRWITWMSYLEDPRIQFHYDKTLPELQQVPTVTDDIIAKIKHPSEFSMVFYTDGSAIKHPNVNKSHNAGMGIAQVQFKPEFTVINTWSIPLGDHTAQLAEVAAVEFACKKALKIDGPVLIVTDSFYVAESVNKELPYWQSNGFFNNKKKPLKHVSKWKSIADCIQLKPDIIIIHEKGHQPTASTFHTEGNNLADKLATQGSYVVNAGKRTADGSEFEKRTADGSEFESPKKKAKVE

SEQ ID NO: 7119 - protein, 2094 aa, synthetic construct
MPAAKRVKLDGGDKKYSIGLDIGTNSVGWAVITDEYKVPSKKFKVLGNTDRHSIKKNLIGALLFDSGETAEATRLKRTARRRYTRRKNRICYLQEIFSNEMAKVDDSFFHRLEESFLVEEDKKHERHPIFGNIVDEVAYHEKYPTIYHLRKKLVDSTDKADLRLIYLALAHMIKFRGHFLIEGDLNPDNSDVDKLFIQLVQTYNQLFEENPINASGVDAKAILSARLSKSRRLENLIAQLPGEKKNGLFGNLIALSLGLTPNFKSNFDLAEDAKLQLSKDTYDDDLDNLLAQIGDQYADLFLAAKNLSDAILLSDILRVNTEITKAPLSASMIKRYDEHHQDLTLLKALVRQQLPEKYKEIFFDQSKNGYAGYIDGGASQEEFYKFIKPILEKMDGTEELLVKLNREDLLRKQRTFDNGSIPHQIHLGELHAILRRQEDFYPFLKDNREKIEKILTFRIPYYVGPLARGNSRFAWMTRKSEETITPWNFEEVVDKGASAQSFIERMTNFDKNLPNEKVLPKHSLLYEYFTVYNELTKVKYVTEGMRKPAFLSGEQKKAIVDLLFKTNRKVTVKQLKEDYFKKIECFDSVEISGVEDRFNASLGTYHDLLKIIKDKDFLDNEENEDILEDIVLTLTLFEDREMIEERLKTYAHLFDDKVMKQLKRRRYTGWGRLSRKLINGIRDKQSGKTILDFLKSDGFANRNFMQLIHDDSLTFKEDIQKAQVSGQGDSLHEHIANLAGSPAIKKGILQTVKVVDELVKVMGRHKPENIVIEMARENQTTQKGQKNSRERMKRIEEGIKELGSQILKEHPVENTQLQNEKLYLYYLQNGRDMYVDQELDINRLSDYDVDHIVPQSFLKDDSIDNKVLTRSDKARGKSDNVPSEEVVKKMKNYWRQLLNAKLITQRKFDNLTKAERGGLSELDKAGFIKRQLVETRQITKHVAQILDSRMNTKYDENDKLIREVKVITLKSKLVSDFRKDFQFYKVREINNYHHAHDAYLNAVVGTALIKKYPKLESEFVYGDYKVYDVRKMIAKSEQEIGKATAKYFFYSNIMNFFKTEITLANGEIRKRPLIETNGETGEIVWDKGRDFATVRKVLSMPQVNIVKKTEVQTGGFSKESILPKRNSDKLIARKKDWDPKKYGGFDSPTVAYSVLVVAKVEKGKSKKLKSVKELLGITIMERSSFEKNPIDFLEAKGYKEVKKDLIIKLPKYSLFELENGRKRMLASAGELQKGNELALPSKYVNFLYLASHYEKLKGSPEDNEQKQLFVEQHKHYLDEIIEQISEFSKRVILADANLDKVLSAYNKHRDKPIREQAENIIHLFTLTNLGAPAAFKYFDTTIDRKRYTSTKEVLDATLIHQSITGLYETRIDLSQLGGDGGEAAAKGSSGGSGGVLNLEEEYRLHEKPVPSSIDPSWLQLFPTVWAERAGMGLANQVPPVVVELRSGASPVAVRQYPMSKEAREGIRPHIQRFLDLGVLVPCQSPWNTPLLPVKKPGTNDYRPVQDLREINKRVQDIHPTVPNPYNLLSSLPPSHTWYSVLDLKDAFFCLKLHPNSQPLFAFEWRDPEKGNTGQLTWTRLPQGFKNSPTLFDEALHRDLAPFRALNPQVVLLQYVDDLLVAAPTYRDCKEGTQKLLQELSKLGYRVSAKKAQLCQKEVTYLGYLLKEGKRWLTPARKATVMKIPPPTTPRQVREFLGTAGFCRLWIPGFASLAAPLYPLTKESIPFIWTEEHQKAFDRIKEALLSAPALALPDLTKPFTLYVDERAGVARGVLTQTLGPWRRPVAYLSKKLDPVASGWPTCLKAVAAVALLLKDADKLTLGQNVTVIASHSLESIVRQPPDRWMTNARMTHYQSLLLNERVSFAPPAVLNPATLLPVESEATPVHRCSEILAEETGTRRDLKDQPLPGVPAWYTDGSSFIAEGKRRAGAAIVDGKRTVWASSLPEGTSAQKAELVALTQALRLAEGKDINIYTDSRYAFATAHIHGAIYKQRGLLTSAGKDIKNKEEILALLEAIHLPKRVAIIHCPGHQKGNDPVATGNRRADEAAKQAALSTRVLAETTKPAGKRTADGSEFEKRTADGSEFESPKKKAKVE

SEQ ID NO: 7120 - protein, 2094 aa, synthetic construct
MPAAKRVKLDGGDKKYSIGLDIGTNSVGWAVITDEYKVPSKKFKVLGNTDRHSIKKNLIGALLFDSGETAEATRLKRTARRRYTRRKNRICYLQEIFSNEMAKVDDSFFHRLEESFLVEEDKKHERHPIFGNIVDEVAYHEKYPTIYHLRKKLVDSTDKADLRLIYLALAHMIKFRGHFLIEGDLNPDNSDVDKLFIQLVQTYNQLFEENPINASGVDAKAILSARLSKSRRLENLIAQLPGEKKNGLFGNLIALSLGLTPNFKSNFDLAEDAKLQLSKDTYDDDLDNLLAQIGDQYADLFLAAKNLSDAILLSDILRVNTEITKAPLSASMIKRYDEHHQDLTLLKALVRQQLPEKYKEIFFDQSKNGYAGYIDGGASQEEFYKFIKPILEKMDGTEELLVKLNREDLLRKQRTFDNGSIPHQIHLGELHAILRRQEDFYPFLKDNREKIEKILTFRIPYYVGPLARGNSRFAWMTRKSEETITPWNFEEVVDKGASAQSFIERMTNFDKNLPNEKVLPKHSLLYEYFTVYNELTKVKYVTEGMRKPAFLSGEQKKAIVDLLFKTNRKVTVKQLKEDYFKKIECFDSVEISGVEDRFNASLGTYHDLLKIIKDKDFLDNEENEDILEDIVLTLTLFEDREMIEERLKTYAHLFDDKVMKQLKRRRYTGWGRLSRKLINGIRDKQSGKTILDFLKSDGFANRNFMQLIHDDSLTFKEDIQKAQVSGQGDSLHEHIANLAGSPAIKKGILQTVKVVDELVKVMGRHKPENIVIEMARENQTTQKGQKNSRERMKRIEEGIKELGSQILKEHPVENTQLQNEKLYLYYLQNGRDMYVDQELDINRLSDYDVDHIVPQSFLKDDSIDNKVLTRSDKARGKSDNVPSEEVVKKMKNYWRQLLNAKLITQRKFDNLTKAERGGLSELDKAGFIKRQLVETRQITKHVAQILDSRMNTKYDENDKLIREVKVITLKSKLVSDFRKDFQFYKVREINNYHHAHDAYLNAVVGTALIKKYPKLESEFVYGDYKVYDVRKMIAKSEQEIGKATAKYFFYSNIMNFFKTEITLANGEIRKRPLIETNGETGEIVWDKGRDFATVRKVLSMPQVNIVKKTEVQTGGFSKESILPKRNSDKLIARKKDWDPKKYGGFDSPTVAYSVLVVAKVEKGKSKKLKSVKELLGITIMERSSFEKNPIDFLEAKGYKEVKKDLIIKLPKYSLFELENGRKRMLASAGELQKGNELALPSKYVNFLYLASHYEKLKGSPEDNEQKQLFVEQHKHYLDEIIEQISEFSKRVILADANLDKVLSAYNKHRDKPIREQAENIIHLFTLTNLGAPAAFKYFDTTIDRKRYTSTKEVLDATLIHQSITGLYETRIDLSQLGGDGGEAAAKGSSGGSGGVLNLEEEYRLHEKPVPSSIDPSWLQLFPTVWAERAGMGLANQVPPVVVELRSGASPVAVRQYPMSKEAREGIRPHIQRFLDLGVLVPCQSPWNTPLLPVKKPGTNDYRPVQDLREINKRVQDIHPTVPNPYNLLSSLPPSHTWYSVLDLKDAFFCLKLHPNSQPLFAFEWRDPEKGNTGQLTWTRLPQGFKNSPTLFNEALHRDLAPFRALNPQVVLLQYVDDLLVAAPTYRDCKEGTQKLLQELSKLGYRVSAKKAQLCQKEVTYLGYLLKEGKRWLTPARKATVMKIPPPTTPRQVREFLGTAGFCRLWIPGFASLAAPLYPLTKPSIPFIWTEEHQKAFDRIKEALLSAPALALPDLTKPFTLYVDERAGVARGVLTQTLGPWRRPVAYLSKKLDPVASGWPTCLKAVAAVALLLKDADKLTLGQNVTVIASHSLESIVRQPPDRWMTNARMTHYQSLLLNERVSFAPPAVLNPATLLPVESEATPVHRCSEILAEETGTRRDLKDQPLPGVPAWYTDGSSFIAEGKRRAGAAIVDGKRTVWASSLPEGTSAQKAELVALTQALRLAEGKDINIYTDSRYAFATAHIHGAIYKQRGWLTSAGKDIKNKEEILALLEAIHLPKRVAIIHCPGHQKGNDPVATGNRRADEAAKQAALSTRVLAETTKPAGKRTADGSEFEKRTADGSEFESPKKKAKVE

SEQ ID NO: 7121 - protein, 2096 aa, synthetic construct; identical to SEQ ID NO: 4524

SEQ ID NO: 7122 - protein, 2096 aa, synthetic construct
MPAAKRVKLDGGDKKYSIGLDIGTNSVGWAVITDEYKVPSKKFKVLGNTDRHSIKKNLIGALLFDSGETAEATRLKRTARRRYTRRKNRICYLQEIFSNEMAKVDDSFFHRLEESFLVEEDKKHERHPIFGNIVDEVAYHEKYPTIYHLRKKLVDSTDKADLRLIYLALAHMIKFRGHFLIEGDLNPDNSDVDKLFIQLVQTYNQLFEENPINASGVDAKAILSARLSKSRRLENLIAQLPGEKKNGLFGNLIALSLGLTPNFKSNFDLAEDAKLQLSKDTYDDDLDNLLAQIGDQYADLFLAAKNLSDAILLSDILRVNTEITKAPLSASMIKRYDEHHQDLTLLKALVRQQLPEKYKEIFFDQSKNGYAGYIDGGASQEEFYKFIKPILEKMDGTEELLVKLNREDLLRKQRTFDNGSIPHQIHLGELHAILRRQEDFYPFLKDNREKIEKILTFRIPYYVGPLARGNSRFAWMTRKSEETITPWNFEEVVDKGASAQSFIERMTNFDKNLPNEKVLPKHSLLYEYFTVYNELTKVKYVTEGMRKPAFLSGEQKKAIVDLLFKTNRKVTVKQLKEDYFKKIECFDSVEISGVEDRFNASLGTYHDLLKIIKDKDFLDNEENEDILEDIVLTLTLFEDREMIEERLKTYAHLFDDKVMKQLKRRRYTGWGRLSRKLINGIRDKQSGKTILDFLKSDGFANRNFMQLIHDDSLTFKEDIQKAQVSGQGDSLHEHIANLAGSPAIKKGILQTVKVVDELVKVMGRHKPENIVIEMARENQTTQKGQKNSRERMKRIEEGIKELGSQILKEHPVENTQLQNEKLYLYYLQNGRDMYVDQELDINRLSDYDVDHIVPQSFLKDDSIDNKVLTRSDKARGKSDNVPSEEVVKKMKNYWRQLLNAKLITQRKFDNLTKAERGGLSELDKAGFIKRQLVETRQITKHVAQILDSRMNTKYDENDKLIREVKVITLKSKLVSDFRKDFQFYKVREINNYHHAHDAYLNAVVGTALIKKYPKLESEFVYGDYKVYDVRKMIAKSEQEIGKATAKYFFYSNIMNFFKTEITLANGEIRKRPLIETNGETGEIVWDKGRDFATVRKVLSMPQVNIVKKTEVQTGGFSKESILPKRNSDKLIARKKDWDPKKYGGFDSPTVAYSVLVVAKVEKGKSKKLKSVKELLGITIMERSSFEKNPIDFLEAKGYKEVKKDLIIKLPKYSLFELENGRKRMLASAGELQKGNELALPSKYVNFLYLASHYEKLKGSPEDNEQKQLFVEQHKHYLDEIIEQISEFSKRVILADANLDKVLSAYNKHRDKPIREQAENIIHLFTLTNLGAPAAFKYFDTTIDRKRYTSTKEVLDATLIHQSITGLYETRIDLSQLGGDGGGGSGSSPAPGGTAPLEEEYRLFLEAPIQNVTLLEQWKREIPKVWAEINPPGLASTQAPIHVQLLSTALPVRVRQYPITLEAKRSLRETIRKFRAAGILRPVHSPWNTPLLPVRKSGTSEYRMVQDLREVNKRVETIHPTVPNPYTLLSLLPPDRIWYSVLDLKDAFFCIPLAPESQLIFAFEWADAEEGESGQLTWTRLPQGFKNSPTLFNEALNRDLQGFRLDHPSVSLLQYVDDLLIAADTQAACLSATRDLLMTLAELGYRVSGKKAQLCQEEVTYLGFKIHKGSRSLSNSRTQAILQIPVPKTKRQVREFLGTIGYCRLWIPGFAELAQPLYAATRPGNDPLVWGEKEEEAFQSLKLALTQPPALALPSLDKPFQLFVEETSGAAKGVLTQALGPWKRPVAYLSKRLDPVAAGWPRCLRAIAAAALLTREASKLTFGQDIEITSSHNLESLLRSPPDKWLTNARITQYQVLLLDPPRVRFKQTAALNPATLLPETDDTLPIHHCLDTLDSLTSTRPDLTDQPLAQAEATLFTDGSSYIRDGKRYAGAAVVTLDSVIWAEPLPIGTSAQKAELIALTKALEWSKDKSVNIYTDSRYAFATLHVHGMIYRERGWLTAGGKAIKNAPEILALLTAVWLPKRVAVMHCKGHQKDDAPTSTGNRRADEVAREVAIRPLSTQATISAGKRTADGSEFEKRTADGSEFESPKKKAKVE

SEQ ID NO: 7123 - protein, 2096 aa, synthetic construct
MPAAKRVKLDGGDKKYSIGLDIGTNSVGWAVITDEYKVPSKKFKVLGNTDRHSIKKNLIGALLFDSGETAEATRLKRTARRRYTRRKNRICYLQEIFSNEMAKVDDSFFHRLEESFLVEEDKKHERHPIFGNIVDEVAYHEKYPTIYHLRKKLVDSTDKADLRLIYLALAHMIKFRGHFLIEGDLNPDNSDVDKLFIQLVQTYNQLFEENPINASGVDAKAILSARLSKSRRLENLIAQLPGEKKNGLFGNLIALSLGLTPNFKSNFDLAEDAKLQLSKDTYDDDLDNLLAQIGDQYADLFLAAKNLSDAILLSDILRVNTEITKAPLSASMIKRYDEHHQDLTLLKALVRQQLPEKYKEIFFDQSKNGYAGYIDGGASQEEFYKFIKPILEKMDGTEELLVKLNREDLLRKQRTFDNGSIPHQIHLGELHAILRRQEDFYPFLKDNREKIEKILTFRIPYYVGPLARGNSRFAWMTRKSEETITPWNFEEVVDKGASAQSFIERMTNFDKNLPNEKVLPKHSLLYEYFTVYNELTKVKYVTEGMRKPAFLSGEQKKAIVDLLFKTNRKVTVKQLKEDYFKKIECFDSVEISGVEDRFNASLGTYHDLLKIIKDKDFLDNEENEDILEDIVLTLTLFEDREMIEERLKTYAHLFDDKVMKQLKRRRYTGWGRLSRKLINGIRDKQSGKTILDFLKSDGFANRNFMQLIHDDSLTFKEDIQKAQVSGQGDSLHEHIANLAGSPAIKKGILQTVKVVDELVKVMGRHKPENIVIEMARENQTTQKGQKNSRERMKRIEEGIKELGSQILKEHPVENTQLQNEKLYLYYLQNGRDMYVDQELDINRLSDYDVDHIVPQSFLKDDSIDNKVLTRSDKARGKSDNVPSEEVVKKMKNYWRQLLNAKLITQRKFDNLTKAERGGLSELDKAGFIKRQLVETRQITKHVAQILDSRMNTKYDENDKLIREVKVITLKSKLVSDFRKDFQFYKVREINNYHHAHDAYLNAVVGTALIKKYPKLESEFVYGDYKVYDVRKMIAKSEQEIGKATAKYFFYSNIMNFFKTEITLANGEIRKRPLIETNGETGEIVWDKGRDFATVRKVLSMPQVNIVKKTEVQTGGFSKESILPKRNSDKLIARKKDWDPKKYGGFDSPTVAYSVLVVAKVEKGKSKKLKSVKELLGITIMERSSFEKNPIDFLEAKGYKEVKKDLIIKLPKYSLFELENGRKRMLASAGELQKGNELALPSKYVNFLYLASHYEKLKGSPEDNEQKQLFVEQHKHYLDEIIEQISEFSKRVILADANLDKVLSAYNKHRDKPIREQAENIIHLFTLTNLGAPAAFKYFDTTIDRKRYTSTKEVLDATLIHQSITGLYETRIDLSQLGGDGGGGSGSSPAPGGTAPLEEEYRLFLEAPIQNVTLLEQWKREIPKVWAEINPPGLASTQAPIHVQLLSTALPVRVRQYPITLEAKRSLRETIRKFRAAGILRPVHSPWNTPLLPVRKSGTSEYRMVQDLREVNKRVETIHPTVPNPYTLLSLLPPDRIWYSVLDLKDAFFCIPLAPESQLIFAFEWADAEEGESGQLTWTRLPQGFKNSPTLFNEALNRDLQGFRLDHPSVSLLQYVDDLLIAADTQAACLSATRDLLMTLAELGYRVSGKKAQLCQEEVTYLGFKIHKGSRSLSNSRTQAILQIPVPKTKRQVREFLGKIGYCRLFIPGFAELAQPLYAATRPGNDPLVWGEKEEEAFQSLKLALTQPPALALPSLDKPFQLFVEETSGAAKGVLTQALGPWKRPVAYLSKRLDPVAAGWPRCLRAIAAAALLTREASKLTFGQDIEITSSHNLESLLRSPPDKWLTNARITQYQVLLLDPPRVRFKQTAALNPATLLPETDDTLPIHHCLDTLDSLTSTRPDLTDQPLAQAEATLFTDGSSYIRDGKRYAGAAVVTLDSVIWAEPLPIGTSAQKAELIALTKALEWSKDKSVNIYTDSRYAFATLHVHGMIYRERGWLTAGGKAIKNAPEILALLTAVWLPKRVAVMHCKGHQKDDAPTSTGNRRADEVAREVAIRPLSTQATISAGKRTADGSEFEKRTADGSEFESPKKKAKVE

SEQ ID NO: 7124 - protein, 2093 aa, synthetic construct
MPAAKRVKLDGGDKKYSIGLDIGTNSVGWAVITDEYKVPSKKFKVLGNTDRHSIKKNLIGALLFDSGETAEATRLKRTARRRYTRRKNRICYLQEIFSNEMAKVDDSFFHRLEESFLVEEDKKHERHPIFGNIVDEVAYHEKYPTIYHLRKKLVDSTDKADLRLIYLALAHMIKFRGHFLIEGDLNPDNSDVDKLFIQLVQTYNQLFEENPINASGVDAKAILSARLSKSRRLENLIAQLPGEKKNGLFGNLIALSLGLTPNFKSNFDLAEDAKLQLSKDTYDDDLDNLLAQIGDQYADLFLAAKNLSDAILLSDILRVNTEITKAPLSASMIKRYDEHHQDLTLLKALVRQQLPEKYKEIFFDQSKNGYAGYIDGGASQEEFYKFIKPILEKMDGTEELLVKLNREDLLRKQRTFDNGSIPHQIHLGELHAILRRQEDFYPFLKDNREKIEKILTFRIPYYVGPLARGNSRFAWMTRKSEETITPWNFEEVVDKGASAQSFIERMTNFDKNLPNEKVLPKHSLLYEYFTVYNELTKVKYVTEGMRKPAFLSGEQKKAIVDLLFKTNRKVTVKQLKEDYFKKIECFDSVEISGVEDRFNASLGTYHDLLKIIKDKDFLDNEENEDILEDIVLTLTLFEDREMIEERLKTYAHLFDDKVMKQLKRRRYTGWGRLSRKLINGIRDKQSGKTILDFLKSDGFANRNFMQLIHDDSLTFKEDIQKAQVSGQGDSLHEHIANLAGSPAIKKGILQTVKVVDELVKVMGRHKPENIVIEMARENQTTQKGQKNSRERMKRIEEGIKELGSQILKEHPVENTQLQNEKLYLYYLQNGRDMYVDQELDINRLSDYDVDHIVPQSFLKDDSIDNKVLTRSDKARGKSDNVPSEEVVKKMKNYWRQLLNAKLITQRKFDNLTKAERGGLSELDKAGFIKRQLVETRQITKHVAQILDSRMNTKYDENDKLIREVKVITLKSKLVSDFRKDFQFYKVREINNYHHAHDAYLNAVVGTALIKKYPKLESEFVYGDYKVYDVRKMIAKSEQEIGKATAKYFFYSNIMNFFKTEITLANGEIRKRPLIETNGETGEIVWDKGRDFATVRKVLSMPQVNIVKKTEVQTGGFSKESILPKRNSDKLIARKKDWDPKKYGGFDSPTVAYSVLVVAKVEKGKSKKLKSVKELLGITIMERSSFEKNPIDFLEAKGYKEVKKDLIIKLPKYSLFELENGRKRMLASAGELQKGNELALPSKYVNFLYLASHYEKLKGSPEDNEQKQLFVEQHKHYLDEIIEQISEFSKRVILADANLDKVLSAYNKHRDKPIREQAENIIHLFTLTNLGAPAAFKYFDTTIDRKRYTSTKEVLDATLIHQSITGLYETRIDLSQLGGDGGGGSGSSPAPGGTLQLEEEYRLFEPESTQKQEMDIWLKNFPQAWAETGGMGTAHCQAPVLIQLKATATPISIRQYPMPHEAYQGIKPHIRRMLDQGILKPCQSPWNTPLLPVKKPGTEDYRPVQDLREVNKRVEDIHPTVPNPYNLLSTLPPSHPWYTVLDLKDAFFCLRLHSESQLLFAFEWRDPEIGLSGQLTWTRLPQGFKNSPTLFNEALHSDLADFRVRYPALVLLQYVDDLLLAAATRTECLEGTKALLETLGNKGYRASAKKAQICLQEVTYLGYSLKDGQRWLTKARKEAILSIPVPKNSRQVREFLGTAGYCRLWIPGFAELAAPLYPLTRPGTLFQWGTEQQLAFEDIKKALLSSPALGLPDITKPFELFIDENSGFAKGVLVQKLGPWKRPVAYLSKKLDTVASGWPPCLRMVAAIAILVKDAGKLTLGQPLTILTSHPVEALVRQPPNKWLSNARMTHYQAMLLDAERVHFGPTVSLNPATLLPLPSGGNHHDCLQILAETHGTRPDLTDQPLPDADLTWYTDGSSFIRNGEREAGAAVTTESEVIWAAPLPPGTSAQRAELIALTQALKMAEGKKLTVYTDSRYAFATTHVHGEIYRRRGWLTSEGKEIKNKNEILALLEALFLPKRLSIIHCPGHQKGDSPQAKGNRLADDTAKKAATETHSSLTVLPAGKRTADGSEFEKRTADGSEFESPKKKAKVE

SEQ ID NO: 7125 - protein, 2085 aa, synthetic construct
MPAAKRVKLDGGDKKYSIGLDIGTNSVGWAVITDEYKVPSKKFKVLGNTDRHSIKKNLIGALLFDSGETAEATRLKRTARRRYTRRKNRICYLQEIFSNEMAKVDDSFFHRLEESFLVEEDKKHERHPIFGNIVDEVAYHEKYPTIYHLRKKLVDSTDKADLRLIYLALAHMIKFRGHFLIEGDLNPDNSDVDKLFIQLVQTYNQLFEENPINASGVDAKAILSARLSKSRRLENLIAQLPGEKKNGLFGNLIALSLGLTPNFKSNFDLAEDAKLQLSKDTYDDDLDNLLAQIGDQYADLFLAAKNLSDAILLSDILRVNTEITKAPLSASMIKRYDEHHQDLTLLKALVRQQLPEKYKEIFFDQSKNGYAGYIDGGASQEEFYKFIKPILEKMDGTEELLVKLNREDLLRKQRTFDNGSIPHQIHLGELHAILRRQEDFYPFLKDNREKIEKILTFRIPYYVGPLARGNSRFAWMTRKSEETITPWNFEEVVDKGASAQSFIERMTNFDKNLPNEKVLPKHSLLYEYFTVYNELTKVKYVTEGMRKPAFLSGEQKKAIVDLLFKTNRKVTVKQLKEDYFKKIECFDSVEISGVEDRFNASLGTYHDLLKIIKDKDFLDNEENEDILEDIVLTLTLFEDREMIEERLKTYAHLFDDKVMKQLKRRRYTGWGRLSRKLINGIRDKQSGKTILDFLKSDGFANRNFMQLIHDDSLTFKEDIQKAQVSGQGDSLHEHIANLAGSPAIKKGILQTVKVVDELVKVMGRHKPENIVIEMARENQTTQKGQKNSRERMKRIEEGIKELGSQILKEHPVENTQLQNEKLYLYYLQNGRDMYVDQELDINRLSDYDVDHIVPQSFLKDDSIDNKVLTRSDKARGKSDNVPSEEVVKKMKNYWRQLLNAKLITQRKFDNLTKAERGGLSELDKAGFIKRQLVETRQITKHVAQILDSRMNTKYDENDKLIREVKVITLKSKLVSDFRKDFQFYKVREINNYHHAHDAYLNAVVGTALIKKYPKLESEFVYGDYKVYDVRKMIAKSEQEIGKATAKYFFYSNIMNFFKTEITLANGEIRKRPLIETNGETGEIVWDKGRDFATVRKVLSMPQVNIVKKTEVQTGGFSKESILPKRNSDKLIARKKDWDPKKYGGFDSPTVAYSVLVVAKVEKGKSKKLKSVKELLGITIMERSSFEKNPIDFLEAKGYKEVKKDLIIKLPKYSLFELENGRKRMLASAGELQKGNELALPSKYVNFLYLASHYEKLKGSPEDNEQKQLFVEQHKHYLDEIIEQISEFSKRVILADANLDKVLSAYNKHRDKPIREQAENIIHLFTLTNLGAPAAFKYFDTTIDRKRYTSTKEVLDATLIHQSITGLYETRIDLSQLGGDGGGGSGSSPAPGGVPWLTQQPLQLTILVPLQEYQEKILSKTALPEDQKQQLKTLFVKYDNLWQHWENQVGHRKIRPHNIATGDYPPRPQKQYPINPKAKPSIQIVIDDLLKQGVLTPQNSTMNTPVYPVPKPDGRWRMVLDYREVNKTIPLTAAQNQHSAGILATIVRQKYKTTLDLANGFWAHPITPESYWLTAFTWQGKQYCWTRLPQGFLNSPALFNADVVDLLKEIPNVQVYVDDIYLSHDDPKEHVQQLEKVFQILLQAGYVVSLKKSEIGQKTVEFLGFNITKEGRGLTDTFKTKLLNITPPKDLKQLQSILGLLNFARNFIPNFAELVQPLYNLIAPAKGKYIEWSEENTKQLNMVIEALNTASNLEERLPEQRLVIKVNTSPSAGYVRYYNETGKKPIMYLNYVFSKAELKFSMLEKLLTTMHKALIKAMDLAMGQEILVYSPIVSMTKIQKTPLPERKALPIRWITWMTYLEDPRIQFHYDKTLPELKHIPDVYTSSQSPVKHPSQYEGVFYTDGSAIKSPDPTKSNNAGMGIVHATYKPEYQVLNQWSIPLGNHTAQMAEIAAVEFACKKALKIPGPVLVITDSFYVAESANKELPYWKSNGFVNNKKKPLKHISKWKSIAECLSMKPDITIQHEKGISLQIPVFILKGNALADKLATQGSYVVNAGKRTADGSEFEKRTADGSEFESPKKKAKVE

SEQ ID NO: 7126 - protein, 2216 aa, synthetic construct
MPAAKRVKLDGGDKKYSIGLDIGTNSVGWAVITDEYKVPSKKFKVLGNTDRHSIKKNLIGALLFDSGETAEATRLKRTARRRYTRRKNRICYLQEIFSNEMAKVDDSFFHRLEESFLVEEDKKHERHPIFGNIVDEVAYHEKYPTIYHLRKKLVDSTDKADLRLIYLALAHMIKFRGHFLIEGDLNPDNSDVDKLFIQLVQTYNQLFEENPINASGVDAKAILSARLSKSRRLENLIAQLPGEKKNGLFGNLIALSLGLTPNFKSNFDLAEDAKLQLSKDTYDDDLDNLLAQIGDQYADLFLAAKNLSDAILLSDILRVNTEITKAPLSASMIKRYDEHHQDLTLLKALVRQQLPEKYKEIFFDQSKNGYAGYIDGGASQEEFYKFIKPILEKMDGTEELLVKLNREDLLRKQRTFDNGSIPHQIHLGELHAILRRQEDFYPFLKDNREKIEKILTFRIPYYVGPLARGNSRFAWMTRKSEETITPWNFEEVVDKGASAQSFIERMTNFDKNLPNEKVLPKHSLLYEYFTVYNELTKVKYVTEGMRKPAFLSGEQKKAIVDLLFKTNRKVTVKQLKEDYFKKIECFDSVEISGVEDRFNASLGTYHDLLKIIKDKDFLDNEENEDILEDIVLTLTLFEDREMIEERLKTYAHLFDDKVMKQLKRRRYTGWGRLSRKLINGIRDKQSGKTILDFLKSDGFANRNFMQLIHDDSLTFKEDIQKAQVSGQGDSLHEHIANLAGSPAIKKGILQTVKVVDELVKVMGRHKPENIVIEMARENQTTQKGQKNSRERMKRIEEGIKELGSQILKEHPVENTQLQNEKLYLYYLQNGRDMYVDQELDINRLSDYDVDHIVPQSFLKDDSIDNKVLTRSDKARGKSDNVPSEEVVKKMKNYWRQLLNAKLITQRKFDNLTKAERGGLSELDKAGFIKRQLVETRQITKHVAQILDSRMNTKYDENDKLIREVKVITLKSKLVSDFRKDFQFYKVREINNYHHAHDAYLNAVVGTALIKKYPKLESEFVYGDYKVYDVRKMIAKSEQEIGKATAKYFFYSNIMNFFKTEITLANGEIRKRPLIETNGETGEIVWDKGRDFATVRKVLSMPQVNIVKKTEVQTGGFSKESILPKRNSDKLIARKKDWDPKKYGGFDSPTVAYSVLVVAKVEKGKSKKLKSVKELLGITIMERSSFEKNPIDFLEAKGYKEVKKDLIIKLPKYSLFELENGRKRMLASAGELQKGNELALPSKYVNFLYLASHYEKLKGSPEDNEQKQLFVEQHKHYLDEIIEQISEFSKRVILADANLDKVLSAYNKHRDKPIREQAENIIHLFTLTNLGAPAAFKYFDTTIDRKRYTSTKEVLDATLIHQSITGLYETRIDLSQLGGDGGGGSGSSPAPGGTLGDQGSRGSDPLPEPRVTLTVEGIPTEFLVNTGAEHSVLTKPMGKMGSKRTVVAGATGSKVYPWTTKRLLKIGQKQVTHSFLVIPECPAPLLGRDLLTKLKAQIQFSTEGPQVTWEDRPAMCLVLNLEEEYRLHEKPVPPSIDPSWLQLFPMVWAEKAGMGLANQVPPVVVELKSDASPVAVRQYPMSKEAREGIRPHIQRFLDLGILVPCQSPWNTPLLPVKKPGTNDYRPVQDLREVNKRVQDIHPTVPNPYNLLSSLPPSHTWYSVLDLKDAFFCLKLHPNSQPLFAFEWRDPEKGNTGQLTWTRLPQGFKNSPTLFDEALHRDLASFRALNPQVVMLQYVDDLLVAAPTYRDCKEGTRRLLQELSKLGYRVSAKKAQLCREEVTYLGYLLKGGKRWLTPARKATVMKIPTPTTPRQVREFLGTAGFCRLWIPGFASLAAPLYPLTREKVPFTWTEAHQEAFGRIKEALLSAPALALPDLTKPFALYVDEKEGVARGVLTQTLGPWRRPVAYLSKKLDPVASGWPTCLKAIAAVALLLKDADKLTLGQNVLVIAPHNLESIVRQPPDRWMTNARMTHYQSLLLNERVSFAPPAILNPATLLPVESDDTPIHICSEILAEETGTRPDLRDQPLPGVPAWYTDGSSFIMDGRRQAGAAIVDNKRTVWASNLPEGTSAQKAELIALTQALRLAEGKSINIYTDSRYAFATAHVHGAIYKQRGLLTSAGKDIKNKEEILALLEAIHLPKRVAIIHCPGHQRGTDPVATGNRKADEAAKQAAQSTRILTETTKNAGKRTADGSEFEKRTADGSEFESPKKKAKVE

SEQ ID NO: 7127 - protein, 2125 aa, synthetic construct
MPAAKRVKLDGGDKKYSIGLDIGTNSVGWAVITDEYKVPSKKFKVLGNTDRHSIKKNLIGALLFDSGETAEATRLKRTARRRYTRRKNRICYLQEIFSNEMAKVDDSFFHRLEESFLVEEDKKHERHPIFGNIVDEVAYHEKYPTIYHLRKKLVDSTDKADLRLIYLALAHMIKFRGHFLIEGDLNPDNSDVDKLFIQLVQTYNQLFEENPINASGVDAKAILSARLSKSRRLENLIAQLPGEKKNGLFGNLIALSLGLTPNFKSNFDLAEDAKLQLSKDTYDDDLDNLLAQIGDQYADLFLAAKNLSDAILLSDILRVNTEITKAPLSASMIKRYDEHHQDLTLLKALVRQQLPEKYKEIFFDQSKNGYAGYIDGGASQEEFYKFIKPILEKMDGTEELLVKLNREDLLRKQRTFDNGSIPHQIHLGELHAILRRQEDFYPFLKDNREKIEKILTFRIPYYVGPLARGNSRFAWMTRKSEETITPWNFEEVVDKGASAQSFIERMTNFDKNLPNEKVLPKHSLLYEYFTVYNELTKVKYVTEGMRKPAFLSGEQKKAIVDLLFKTNRKVTVKQLKEDYFKKIECFDSVEISGVEDRFNASLGTYHDLLKIIKDKDFLDNEENEDILEDIVLTLTLFEDREMIEERLKTYAHLFDDKVMKQLKRRRYTGWGRLSRKLINGIRDKQSGKTILDFLKSDGFANRNFMQLIHDDSLTFKEDIQKAQVSGQGDSLHEHIANLAGSPAIKKGILQTVKVVDELVKVMGRHKPENIVIEMARENQTTQKGQKNSRERMKRIEEGIKELGSQILKEHPVENTQLQNEKLYLYYLQNGRDMYVDQELDINRLSDYDVDHIVPQSFLKDDSIDNKVLTRSDKARGKSDNVPSEEVVKKMKNYWRQLLNAKLITQRKFDNLTKAERGGLSELDKAGFIKRQLVETRQITKHVAQILDSRMNTKYDENDKLIREVKVITLKSKLVSDFRKDFQFYKVREINNYHHAHDAYLNAVVGTALIKKYPKLESEFVYGDYKVYDVRKMIAKSEQEIGKATAKYFFYSNIMNFFKTEITLANGEIRKRPLIETNGETGEIVWDKGRDFATVRKVLSMPQVNIVKKTEVQTGGFSKESILPKRNSDKLIARKKDWDPKKYGGFDSPTVAYSVLVVAKVEKGKSKKLKSVKELLGITIMERSSFEKNPIDFLEAKGYKEVKKDLIIKLPKYSLFELENGRKRMLASAGELQKGNELALPSKYVNFLYLASHYEKLKGSPEDNEQKQLFVEQHKHYLDEIIEQISEFSKRVILADANLDKVLSAYNKHRDKPIREQAENIIHLFTLTNLGAPAAFKYFDTTIDRKRYTSTKEVLDATLIHQSITGLYETRIDLSQLGGDGGGGSGSSPAPGGLLGRDLLTKLKAQIQFSTEGPQVTWEDRPAMCLVLNLEEEYRLHEKPVPPSIDPSWLQLFPMVWAEKAGMGLANQVPPVVVELKSDASPVAVRQYPMSKEAREGIRPHIQRFLDLGILVPCQSPWNTPLLPVKKPGTNDYRPVQDLREVNKRVQDIHPTVPNPYNLLSSLPPSHTWYSVLDLKDAFFCLKLHPNSQPLFAFEWRDPEKGNTGQLTWTRLPQGFKNSPTLFNEALHRDLASFRALNPQVVMLQYVDDLLVAAPTYRDCKEGTRRLLQELSKLGYRVSAKKAQLCREEVTYLGYLLKGGKRWLTPARKATVMKIPTPTTPRQVREFLGKAGFCRLFIPGFASLAAPLYPLTRPKVPFTWTEAHQEAFGRIKEALLSAPALALPDLTKPFALYVDEKEGVARGVLTQTLGPWRRPVAYLSKKLDPVASGWPTCLKAIAAVALLLKDADKLTLGQNVLVIAPHNLESIVRQPPDRWMTNARMTHYQSLLLNERVSFAPPAILNPATLLPVESDDTPIHICSEILAEETGTRPDLRDQPLPGVPAWYTDGSSFIMDGRRQAGAAIVDNKRTVWASNLPEGTSAQKAELIALTQALRLAEGKSINIYTDSRYAFATAHVHGAIYKQRGWLTSAGKDIKNKEEILALLEAIHLPKRVAIIHCPGHQRGTDPVATGNRKADEAAKQAAQSTRILTETTKNAGKRTADGSEFEKRTADGSEFESPKKKAKVE

SEQ ID NO: 7128 - protein, 2216 aa, synthetic construct
MPAAKRVKLDGGDKKYSIGLDIGTNSVGWAVITDEYKVPSKKFKVLGNTDRHSIKKNLIGALLFDSGETAEATRLKRTARRRYTRRKNRICYLQEIFSNEMAKVDDSFFHRLEESFLVEEDKKHERHPIFGNIVDEVAYHEKYPTIYHLRKKLVDSTDKADLRLIYLALAHMIKFRGHFLIEGDLNPDNSDVDKLFIQLVQTYNQLFEENPINASGVDAKAILSARLSKSRRLENLIAQLPGEKKNGLFGNLIALSLGLTPNFKSNFDLAEDAKLQLSKDTYDDDLDNLLAQIGDQYADLFLAAKNLSDAILLSDILRVNTEITKAPLSASMIKRYDEHHQDLTLLKALVRQQLPEKYKEIFFDQSKNGYAGYIDGGASQEEFYKFIKPILEKMDGTEELLVKLNREDLLRKQRTFDNGSIPHQIHLGELHAILRRQEDFYPFLKDNREKIEKILTFRIPYYVGPLARGNSRFAWMTRKSEETITPWNFEEVVDKGASAQSFIERMTNFDKNLPNEKVLPKHSLLYEYFTVYNELTKVKYVTEGMRKPAFLSGEQKKAIVDLLFKTNRKVTVKQLKEDYFKKIECFDSVEISGVEDRFNASLGTYHDLLKIIKDKDFLDNEENEDILEDIVLTLTLFEDREMIEERLKTYAHLFDDKVMKQLKRRRYTGWGRLSRKLINGIRDKQSGKTILDFLKSDGFANRNFMQLIHDDSLTFKEDIQKAQVSGQGDSLHEHIANLAGSPAIKKGILQTVKVVDELVKVMGRHKPENIVIEMARENQTTQKGQKNSRERMKRIEEGIKELGSQILKEHPVENTQLQNEKLYLYYLQNGRDMYVDQELDINRLSDYDVDHIVPQSFLKDDSIDNKVLTRSDKARGKSDNVPSEEVVKKMKNYWRQLLNAKLITQRKFDNLTKAERGGLSELDKAGFIKRQLVETRQITKHVAQILDSRMNTKYDENDKLIREVKVITLKSKLVSDFRKDFQFYKVREINNYHHAHDAYLNAVVGTALIKKYPKLESEFVYGDYKVYDVRKMIAKSEQEIGKATAKYFFYSNIMNFFKTEITLANGEIRKRPLIETNGETGEIVWDKGRDFATVRKVLSMPQVNIVKKTEVQTGGFSKESILPKRNSDKLIARKKDWDPKKYGGFDSPTVAYSVLVVAKVEKGKSKKLKSVKELLGITIMERSSFEKNPIDFLEAKGYKEVKKDLIIKLPKYSLFELENGRKRMLASAGELQKGNELALPSKYVNFLYLASHYEKLKGSPEDNEQKQLFVEQHKHYLDEIIEQISEFSKRVILADANLDKVLSAYNKHRDKPIREQAENIIHLFTLTNLGAPAAFKYFDTTIDRKRYTSTKEVLDATLIHQSITGLYETRIDLSQLGGDGGGGSGSSPAPGGTLGDQGSRGSDPLPEPRVTLTVEGIPTEFLVNTGAEHSVLTKPMGKMGSKRTVVAGATGSKVYPWTTKRLLKIGQKQVTHSFLVIPECPAPLLGRDLLTKLKAQIQFSTEGPQVTWEDRPAMCLVLNLEEEYRLHEKPVPPSIDPSWLQLFPMVWAEKAGMGLANQVPPVVVELKSDASPVAVRQYPMSKEAREGIRPHIQRFLDLGILVPCQSPWNTPLLPVKKPGTNDYRPVQDLREVNKRVQDIHPTVPNPYNLLSSLPPSHTWYSVLDLKDAFFCLKLHPNSQPLFAFEWRDPEKGNTGQLTWTRLPQGFKNSPTLFNEALHRDLASFRALNPQVVMLQYVDDLLVAAPTYRDCKEGTRRLLQELSKLGYRVSAKKAQLCREEVTYLGYLLKGGKRWLTPARKATVMKIPTPTTPRQVREFLGKAGFCRLFIPGFASLAAPLYPLTRPKVPFTWTEAHQEAFGRIKEALLSAPALALPDLTKPFALYVDEKEGVARGVLTQTLGPWRRPVAYLSKKLDPVASGWPTCLKAIAAVALLLKDADKLTLGQNVLVIAPHNLESIVRQPPDRWMTNARMTHYQSLLLNERVSFAPPAILNPATLLPVESDDTPIHICSEILAEETGTRPDLRDQPLPGVPAWYTDGSSFIMDGRRQAGAAIVDNKRTVWASNLPEGTSAQKAELIALTQALRLAEGKSINIYTDSRYAFATAHVHGAIYKQRGWLTSAGKDIKNKEEILALLEAIHLPKRVAIIHCPGHQRGTDPVATGNRKADEAAKQAAQSTRILTETTKNAGKRTADGSEFEKRTADGSEFESPKKKAKVE

SEQ ID NO: 7129 - protein, 2094 aa, synthetic construct
MPAAKRVKLDGGDKKYSIGLDIGTNSVGWAVITDEYKVPSKKFKVLGNTDRHSIKKNLIGALLFDSGETAEATRLKRTARRRYTRRKNRICYLQEIFSNEMAKVDDSFFHRLEESFLVEEDKKHERHPIFGNIVDEVAYHEKYPTIYHLRKKLVDSTDKADLRLIYLALAHMIKFRGHFLIEGDLNPDNSDVDKLFIQLVQTYNQLFEENPINASGVDAKAILSARLSKSRRLENLIAQLPGEKKNGLFGNLIALSLGLTPNFKSNFDLAEDAKLQLSKDTYDDDLDNLLAQIGDQYADLFLAAKNLSDAILLSDILRVNTEITKAPLSASMIKRYDEHHQDLTLLKALVRQQLPEKYKEIFFDQSKNGYAGYIDGGASQEEFYKFIKPILEKMDGTEELLVKLNREDLLRKQRTFDNGSIPHQIHLGELHAILRRQEDFYPFLKDNREKIEKILTFRIPYYVGPLARGNSRFAWMTRKSEETITPWNFEEVVDKGASAQSFIERMTNFDKNLPNEKVLPKHSLLYEYFTVYNELTKVKYVTEGMRKPAFLSGEQKKAIVDLLFKTNRKVTVKQLKEDYFKKIECFDSVEISGVEDRFNASLGTYHDLLKIIKDKDFLDNEENEDILEDIVLTLTLFEDREMIEERLKTYAHLFDDKVMKQLKRRRYTGWGRLSRKLINGIRDKQSGKTILDFLKSDGFANRNFMQLIHDDSLTFKEDIQKAQVSGQGDSLHEHIANLAGSPAIKKGILQTVKVVDELVKVMGRHKPENIVIEMARENQTTQKGQKNSRERMKRIEEGIKELGSQILKEHPVENTQLQNEKLYLYYLQNGRDMYVDQELDINRLSDYDVDHIVPQSFLKDDSIDNKVLTRSDKARGKSDNVPSEEVVKKMKNYWRQLLNAKLITQRKFDNLTKAERGGLSELDKAGFIKRQLVETRQITKHVAQILDSRMNTKYDENDKLIREVKVITLKSKLVSDFRKDFQFYKVREINNYHHAHDAYLNAVVGTALIKKYPKLESEFVYGDYKVYDVRKMIAKSEQEIGKATAKYFFYSNIMNFFKTEITLANGEIRKRPLIETNGETGEIVWDKGRDFATVRKVLSMPQVNIVKKTEVQTGGFSKESILPKRNSDKLIARKKDWDPKKYGGFDSPTVAYSVLVVAKVEKGKSKKLKSVKELLGITIMERSSFEKNPIDFLEAKGYKEVKKDLIIKLPKYSLFELENGRKRMLASAGELQKGNELALPSKYVNFLYLASHYEKLKGSPEDNEQKQLFVEQHKHYLDEIIEQISEFSKRVILADANLDKVLSAYNKHRDKPIREQAENIIHLFTLTNLGAPAAFKYFDTTIDRKRYTSTKEVLDATLIHQSITGLYETRIDLSQLGGDGGGGSGSSPAPGGTLNLEDEYRLYETSAEPEVSPGSTWLSDFPQAWAETGGMGLAVRQAPLIIPLKATSTPVSIKQYPMSQEAKLGIKPHIQRLLDQGILVPCQSPWNTPLLPVKKPGTNDYRPVQDLREVNKRVEDIHPTVPNPYNLLSGLPPSHRWYTVLDLKDAFFCLRLHPTSQPLFAFEWRDPGMGISGQLTWTRLPQGFKNSPTLFNEALHRDLADFRIQHPDLILLQYVDDILLAATSELDCQQGTRALLLTLGNLGYRASAKKAQLCQKQVKYLGYLLKEGQRWLTEARKETVMGQPTPKTPRQLREFLGKAGFCRLFIPGFAEMAAPLYPLTKPGTLFNWGPDQQKAYQEIKQALLTAPALGLPDLTKPFELFVDEKQGYAKGVLTQKLGPWRRPVAYLSKKLDPVAAGWPPCLRMVAAIAVLRKDAGKLTMGQPLVILAPHAVEALVKQPPDRWLSNARMTHYQAMLLDTDRVQFGPVVALNPATLLPLPEEGAPHDCLEILAETHGTRPDLTDQPIPDADHTWYTDGSSFLQEGQRKAGAAVTTETEVIWARALPAGTSAQRAELIALTQALKMAEGKRLNVYTDSRYAFATAHIHGEIYRRRGWLTSEGREIKNKSEILALLKALFLPKRLSIIHCLGHQKGDSAEARGNRLADQAAREAAIKTPPDTSTLLAGKRTADGSEFEKRTADGSEFESPKKKAKVE

SEQ ID NO: 7130 - protein, 2094 aa, synthetic construct
MPAAKRVKLDGGDKKYSIGLDIGTNSVGWAVITDEYKVPSKKFKVLGNTDRHSIKKNLIGALLFDSGETAEATRLKRTARRRYTRRKNRICYLQEIFSNEMAKVDDSFFHRLEESFLVEEDKKHERHPIFGNIVDEVAYHEKYPTIYHLRKKLVDSTDKADLRLIYLALAHMIKFRGHFLIEGDLNPDNSDVDKLFIQLVQTYNQLFEENPINASGVDAKAILSARLSKSRRLENLIAQLPGEKKNGLFGNLIALSLGLTPNFKSNFDLAEDAKLQLSKDTYDDDLDNLLAQIGDQYADLFLAAKNLSDAILLSDILRVNTEITKAPLSASMIKRYDEHHQDLTLLKALVRQQLPEKYKEIFFDQSKNGYAGYIDGGASQEEFYKFIKPILEKMDGTEELLVKLNREDLLRKQRTFDNGSIPHQIHLGELHAILRRQEDFYPFLKDNREKIEKILTFRIPYYVGPLARGNSRFAWMTRKSEETITPWNFEEVVDKGASAQSFIERMTNFDKNLPNEKVLPKHSLLYEYFTVYNELTKVKYVTEGMRKPAFLSGEQKKAIVDLLFKTNRKVTVKQLKEDYFKKIECFDSVEISGVEDRFNASLGTYHDLLKIIKDKDFLDNEENEDILEDIVLTLTLFEDREMIEERLKTYAHLFDDKVMKQLKRRRYTGWGRLSRKLINGIRDKQSGKTILDFLKSDGFANRNFMQLIHDDSLTFKEDIQKAQVSGQGDSLHEHIANLAGSPAIKKGILQTVKVVDELVKVMGRHKPENIVIEMARENQTTQKGQKNSRERMKRIEEGIKELGSQILKEHPVENTQLQNEKLYLYYLQNGRDMYVDQELDINRLSDYDVDHIVPQSFLKDDSIDNKVLTRSDKARGKSDNVPSEEVVKKMKNYWRQLLNAKLITQRKFDNLTKAERGGLSELDKAGFIKRQLVETRQITKHVAQILDSRMNTKYDENDKLIREVKVITLKSKLVSDFRKDFQFYKVREINNYHHAHDAYLNAVVGTALIKKYPKLESEFVYGDYKVYDVRKMIAKSEQEIGKATAKYFFYSNIMNFFKTEITLANGEIRKRPLIETNGETGEIVWDKGRDFATVRKVLSMPQVNIVKKTEVQTGGFSKESILPKRNSDKLIARKKDWDPKKYGGFDSPTVAYSVLVVAKVEKGKSKKLKSVKELLGITIMERSSFEKNPIDFLEAKGYKEVKKDLIIKLPKYSLFELENGRKRMLASAGELQKGNELALPSKYVNFLYLASHYEKLKGSPEDNEQKQLFVEQHKHYLDEIIEQISEFSKRVILADANLDKVLSAYNKHRDKPIREQAENIIHLFTLTNLGAPAAFKYFDTTIDRKRYTSTKEVLDATLIHQSITGLYETRIDLSQLGGDGGGGSGSSPAPGGLGIEDEYRLHETSTEPDVSLGSTWLSDFPQAWAETGGMGLAVRQAPLIIPLKATSTPVSIQQYPMSHEARLGIKPHIQRLLDQGILVPCQSPWNTPLLPVKKPGTNDYRPVQDLREVNKRVEDIHPTVPNPYNLLSGLPPSHQWYTVLDLKDAFFCLRLHPTSQPLFAFEWRDPGMGISGQLTWTRLPQGFKNSPTLFNEALHRDLADFRIQHPDLILLQYVDDILLAATSELDCQQGTRALLQTLGDLGYRASAKKAQICQKQVKYLGYLLREGQRWLTEARKETVMGQPVPKTPRQLREFLGKAGFCRLFIPGFAEMAAPLYPLTKPGTLFSWGPDQQKAYQEIKQALLTAPALGLPDLTKPFELFVDEKQGYAKGVLTQKLGPWRRPVAYLSKKLDPVAAGWPPCLRMVAAIAVLTKDAGKLTMGQPLVILAPHAVEALVKQPPDRWLSNARMTHYQAMLLDTDRVQFGPVVALNPATLLPLPEEGAPHDCLEILAETHGTRPDLTDQPIPDADHTWYTDGSSFLQEGQRKAGAAVTTETEVIWAGALPAGTSAQRAELIALTQALKMAEGKRLNVYTDSRYAFATAHIHGEIYRRRGWLTSEGREIKNKSEILALLKALFLPKRLSIIHCLGHQKGDSAEARGNRLADQAAREAAIKTPPDTSTLLIAGKRTADGSEFEKRTADGSEFESPKKKAKVE

SEQ ID NO: 7131 - protein, 2094 aa, synthetic construct; identical to SEQ ID NO: 7130

SEQ ID NO: 7132 - protein, 2094 aa, synthetic construct
MPAAKRVKLDGGDKKYSIGLDIGTNSVGWAVITDEYKVPSKKFKVLGNTDRHSIKKNLIGALLFDSGETAEATRLKRTARRRYTRRKNRICYLQEIFSNEMAKVDDSFFHRLEESFLVEEDKKHERHPIFGNIVDEVAYHEKYPTIYHLRKKLVDSTDKADLRLIYLALAHMIKFRGHFLIEGDLNPDNSDVDKLFIQLVQTYNQLFEENPINASGVDAKAILSARLSKSRRLENLIAQLPGEKKNGLFGNLIALSLGLTPNFKSNFDLAEDAKLQLSKDTYDDDLDNLLAQIGDQYADLFLAAKNLSDAILLSDILRVNTEITKAPLSASMIKRYDEHHQDLTLLKALVRQQLPEKYKEIFFDQSKNGYAGYIDGGASQEEFYKFIKPILEKMDGTEELLVKLNREDLLRKQRTFDNGSIPHQIHLGELHAILRRQEDFYPFLKDNREKIEKILTFRIPYYVGPLARGNSRFAWMTRKSEETITPWNFEEVVDKGASAQSFIERMTNFDKNLPNEKVLPKHSLLYEYFTVYNELTKVKYVTEGMRKPAFLSGEQKKAIVDLLFKTNRKVTVKQLKEDYFKKIECFDSVEISGVEDRFNASLGTYHDLLKIIKDKDFLDNEENEDILEDIVLTLTLFEDREMIEERLKTYAHLFDDKVMKQLKRRRYTGWGRLSRKLINGIRDKQSGKTILDFLKSDGFANRNFMQLIHDDSLTFKEDIQKAQVSGQGDSLHEHIANLAGSPAIKKGILQTVKVVDELVKVMGRHKPENIVIEMARENQTTQKGQKNSRERMKRIEEGIKELGSQILKEHPVENTQLQNEKLYLYYLQNGRDMYVDQELDINRLSDYDVDHIVPQSFLKDDSIDNKVLTRSDKARGKSDNVPSEEVVKKMKNYWRQLLNAKLITQRKFDNLTKAERGGLSELDKAGFIKRQLVETRQITKHVAQILDSRMNTKYDENDKLIREVKVITLKSKLVSDFRKDFQFYKVREINNYHHAHDAYLNAVVGTALIKKYPKLESEFVYGDYKVYDVRKMIAKSEQEIGKATAKYFFYSNIMNFFKTEITLANGEIRKRPLIETNGETGEIVWDKGRDFATVRKVLSMPQVNIVKKTEVQTGGFSKESILPKRNSDKLIARKKDWDPKKYGGFDSPTVAYSVLVVAKVEKGKSKKLKSVKELLGITIMERSSFEKNPIDFLEAKGYKEVKKDLIIKLPKYSLFELENGRKRMLASAGELQKGNELALPSKYVNFLYLASHYEKLKGSPEDNEQKQLFVEQHKHYLDEIIEQISEFSKRVILADANLDKVLSAYNKHRDKPIREQAENIIHLFTLTNLGAPAAFKYFDTTIDRKRYTSTKEVLDATLIHQSITGLYETRIDLSQLGGDGGGGSGSSPAPGGTLNIEDEYRLHETSKGPDVPLGSTWLSDFPQAWAETGGMGLAVRQAPLIIPLKATSTPVSIKQYPMSQEARLGIKPHIQRLLDQGILVPCQSPWNTPLLPVKKPGTNDYRPVQDLREVNKRVEDIHPTVPNPYNLLSGLPPSHQWYTVLDLKDAFFCLRLHPTSQSLFAFEWRDPEMGISGQLTWTRLPQGFKNSPTLFNEALHRDLADFRIQHPDLILLQYVDDLLLAATSELDCQQGTRALLQTLGDLGYRASAKKAQICQKQVKYLGYLLKEGQRWLTEARKETVMGQPTPKTPRQLREFLGTAGFCRLWIPGFAEMAAPLYPLTKPGTLFEWGPDQQKAYQEIKQALLTAPALGLPDLTKPFELFVDEKQGYAKGVLTQKLGPWRRPVAYLSKKLDPVAAGWPPCLRMVAAIAVLTKDAGKLTMGQPLVILAPHAVEALVKQPPDRWLSNARMTHYQALLLDTDRVQFGPIVALNPATLLPLPEEGLQHDCLDILAEAHGTRPDLTDQPLPDADHTWYTDGSSFLQEGQRKAGAAVTTETEVVWAKALPAGTSAQRAELIALTQALKMAEGKKLNVYTDSRYAFATAHIHGEIYRRRGWLTSEGKEIKNKDEILALLKALFLPKRLSIIHCPGHQKGNRAEARGNRMADQAAREVATRETPETSTLLAGKRTADGSEFEKRTADGSEFESPKKKAKVE

SEQ ID NO: 7133 - protein, 2094 aa, synthetic construct
MPAAKRVKLDGGDKKYSIGLDIGTNSVGWAVITDEYKVPSKKFKVLGNTDRHSIKKNLIGALLFDSGETAEATRLKRTARRRYTRRKNRICYLQEIFSNEMAKVDDSFFHRLEESFLVEEDKKHERHPIFGNIVDEVAYHEKYPTIYHLRKKLVDSTDKADLRLIYLALAHMIKFRGHFLIEGDLNPDNSDVDKLFIQLVQTYNQLFEENPINASGVDAKAILSARLSKSRRLENLIAQLPGEKKNGLFGNLIALSLGLTPNFKSNFDLAEDAKLQLSKDTYDDDLDNLLAQIGDQYADLFLAAKNLSDAILLSDILRVNTEITKAPLSASMIKRYDEHHQDLTLLKALVRQQLPEKYKEIFFDQSKNGYAGYIDGGASQEEFYKFIKPILEKMDGTEELLVKLNREDLLRKQRTFDNGSIPHQIHLGELHAILRRQEDFYPFLKDNREKIEKILTFRIPYYVGPLARGNSRFAWMTRKSEETITPWNFEEVVDKGASAQSFIERMTNFDKNLPNEKVLPKHSLLYEYFTVYNELTKVKYVTEGMRKPAFLSGEQKKAIVDLLFKTNRKVTVKQLKEDYFKKIECFDSVEISGVEDRFNASLGTYHDLLKIIKDKDFLDNEENEDILEDIVLTLTLFEDREMIEERLKTYAHLFDDKVMKQLKRRRYTGWGRLSRKLINGIRDKQSGKTILDFLKSDGFANRNFMQLIHDDSLTFKEDIQKAQVSGQGDSLHEHIANLAGSPAIKKGILQTVKVVDELVKVMGRHKPENIVIEMARENQTTQKGQKNSRERMKRIEEGIKELGSQILKEHPVENTQLQNEKLYLYYLQNGRDMYVDQELDINRLSDYDVDHIVPQSFLKDDSIDNKVLTRSDKARGKSDNVPSEEVVKKMKNYWRQLLNAKLITQRKFDNLTKAERGGLSELDKAGFIKRQLVETRQITKHVAQILDSRMNTKYDENDKLIREVKVITLKSKLVSDFRKDFQFYKVREINNYHHAHDAYLNAVVGTALIKKYPKLESEFVYGDYKVYDVRKMIAKSEQEIGKATAKYFFYSNIMNFFKTEITLANGEIRKRPLIETNGETGEIVWDKGRDFATVRKVLSMPQVNIVKKTEVQTGGFSKESILPKRNSDKLIARKKDWDPKKYGGFDSPTVAYSVLVVAKVEKGKSKKLKSVKELLGITIMERSSFEKNPIDFLEAKGYKEVKKDLIIKLPKYSLFELENGRKRMLASAGELQKGNELALPSKYVNFLYLASHYEKLKGSPEDNEQKQLFVEQHKHYLDEIIEQISEFSKRVILADANLDKVLSAYNKHRDKPIREQAENIIHLFTLTNLGAPAAFKYFDTTIDRKRYTSTKEVLDATLIHQSITGLYETRIDLSQLGGDGGGGSGSSPAPGGTLNIEDEYRLHEISTEPDVSPGSTWLSDFPQAWAETGGMGLAVRQAPLIIPLKATSTPVSIKQYPMSQEAKLGIKPHIQRLLDQGILVPCQSPWNTPLLPVKKPGTNDYRPVQGLREVNKRVEDIHPTVPNPYNLLSGLPTSHRWYTVLDLKDAFFCLRLHPTSQPLFASEWRDPGMGISGQLTWTRLPQGFKNSPTLFNEALHRGLADFRIQHPDLILLQYVDDLLLAATSELDCQQGTRALLKTLGNLGYRASAKKAQICQKQVKYLGYLLREGQRWLTEARKETVMGQPTPKTPRQLREFLGTAGFCRLWIPRFAEMAAPLYPLTKPGTLFNWGPDQQKAYHEIKQALLTAPALGLPDLTKPFELFVDEKQGYAKGVLTQKLGPWRRPVAYLSKKLDPVAAGWPPCLRMVAAIAVLTKDAGKLTMGQPLVILAPHAVEALVKQPPDRWLSNARMTHYQAMLLDTDRVQFGPVVALNPATLLPLPEEGAPHDCLEILAETHGTEPDLTDQPIPDADHTWYTDGSSFLQEGQRKAGAAVTTETEVIWARALPAGTSAQRAELIALTQALKMAEGKRLNVYTDSRYAFATAHIHGEIYKRRGWLTSEGREIKNKSEILALLKALFLPKRLSIIHCLGHQKGDSAEARGNRLADQAAREAAIKTPPDTSTLLAGKRTADGSEFEKRTADGSEFESPKKKAKVE

SEQ ID NO: 7134 - protein, 2088 aa, synthetic construct
MPAAKRVKLDGGDKKYSIGLDIGTNSVGWAVITDEYKVPSKKFKVLGNTDRHSIKKNLIGALLFDSGETAEATRLKRTARRRYTRRKNRICYLQEIFSNEMAKVDDSFFHRLEESFLVEEDKKHERHPIFGNIVDEVAYHEKYPTIYHLRKKLVDSTDKADLRLIYLALAHMIKFRGHFLIEGDLNPDNSDVDKLFIQLVQTYNQLFEENPINASGVDAKAILSARLSKSRRLENLIAQLPGEKKNGLFGNLIALSLGLTPNFKSNFDLAEDAKLQLSKDTYDDDLDNLLAQIGDQYADLFLAAKNLSDAILLSDILRVNTEITKAPLSASMIKRYDEHHQDLTLLKALVRQQLPEKYKEIFFDQSKNGYAGYIDGGASQEEFYKFIKPILEKMDGTEELLVKLNREDLLRKQRTFDNGSIPHQIHLGELHAILRRQEDFYPFLKDNREKIEKILTFRIPYYVGPLARGNSRFAWMTRKSEETITPWNFEEVVDKGASAQSFIERMTNFDKNLPNEKVLPKHSLLYEYFTVYNELTKVKYVTEGMRKPAFLSGEQKKAIVDLLFKTNRKVTVKQLKEDYFKKIECFDSVEISGVEDRFNASLGTYHDLLKIIKDKDFLDNEENEDILEDIVLTLTLFEDREMIEERLKTYAHLFDDKVMKQLKRRRYTGWGRLSRKLINGIRDKQSGKTILDFLKSDGFANRNFMQLIHDDSLTFKEDIQKAQVSGQGDSLHEHIANLAGSPAIKKGILQTVKVVDELVKVMGRHKPENIVIEMARENQTTQKGQKNSRERMKRIEEGIKELGSQILKEHPVENTQLQNEKLYLYYLQNGRDMYVDQELDINRLSDYDVDHIVPQSFLKDDSIDNKVLTRSDKARGKSDNVPSEEVVKKMKNYWRQLLNAKLITQRKFDNLTKAERGGLSELDKAGFIKRQLVETRQITKHVAQILDSRMNTKYDENDKLIREVKVITLKSKLVSDFRKDFQFYKVREINNYHHAHDAYLNAVVGTALIKKYPKLESEFVYGDYKVYDVRKMIAKSEQEIGKATAKYFFYSNIMNFFKTEITLANGEIRKRPLIETNGETGEIVWDKGRDFATVRKVLSMPQVNIVKKTEVQTGGFSKESILPKRNSDKLIARKKDWDPKKYGGFDSPTVAYSVLVVAKVEKGKSKKLKSVKELLGITIMERSSFEKNPIDFLEAKGYKEVKKDLIIKLPKYSLFELENGRKRMLASAGELQKGNELALPSKYVNFLYLASHYEKLKGSPEDNEQKQLFVEQHKHYLDEIIEQISEFSKRVILADANLDKVLSAYNKHRDKPIREQAENIIHLFTLTNLGAPAAFKYFDTTIDRKRYTSTKEVLDATLIHQSITGLYETRIDLSQLGGDGGGGSGSSPAPGGTLQLDDEYRLYSPLVKPDQNIQFWLEQFPQAWAETAGMGLAKQVPPQVIQLKASATPVSVRQYPLSKEAQEGIRPHVQRLIQQGILVPVQSPWNTPLLPVRKPGTNDYRPVQDLREVNKRVQDIHPTVPNPYNLLCALPPQRSWYTVLDLKDAFFCLRLHPTSQPLFAFEWRDPGTGRTGQLTWTRLPQGFKNSPTIFDEALHRDLANFRIQHPQVTLLQYVDDLLLAGATKQDCLEGTKALLLELSDLGYRASAKKAQICRREVTYLGYSLRDGQRWLTEARKKTVVQIPAPTTAKQVREFLGTAGFCRLWIPGFATLAAPLYPLTKEKGEFSWAPEHQKAFDAIKKALLSAPALALPDVTKPFTLYVDERKGVARGVLTQTLGPWRRPVAYLSKKLDPVASGWPVCLKAIAAVAILVKDADKLTLGQNITVIAPHALENIVRQPPDRWMTNARMTHYQSLLLTERVTFAPPAALNPATLLPEETDEPVTHDCHQLLIEETGVRKDLTDIPLTGEVLTWFTDGSSYVVEGKRMAGAAVVDGTRTIWASSLPEGTSAQKAELMALTQALRLAEGKSINIYTDSRYAFATAHVHGAIYKQRGLLTSAGREIKNKEEILSLLEALHLPKRLAIIHCPGHQKAKDPISRGNQMADRVAKQAAQGVNLLAGKRTADGSEFEKRTADGSEFESPKKKAKVE

SEQ ID NO: 7135 - protein, 2092 aa, synthetic construct
MPAAKRVKLDGGDKKYSIGLDIGTNSVGWAVITDEYKVPSKKFKVLGNTDRHSIKKNLIGALLFDSGETAEATRLKRTARRRYTRRKNRICYLQEIFSNEMAKVDDSFFHRLEESFLVEEDKKHERHPIFGNIVDEVAYHEKYPTIYHLRKKLVDSTDKADLRLIYLALAHMIKFRGHFLIEGDLNPDNSDVDKLFIQLVQTYNQLFEENPINASGVDAKAILSARLSKSRRLENLIAQLPGEKKNGLFGNLIALSLGLTPNFKSNFDLAEDAKLQLSKDTYDDDLDNLLAQIGDQYADLFLAAKNLSDAILLSDILRVNTEITKAPLSASMIKRYDEHHQDLTLLKALVRQQLPEKYKEIFFDQSKNGYAGYIDGGASQEEFYKFIKPILEKMDGTEELLVKLNREDLLRKQRTFDNGSIPHQIHLGELHAILRRQEDFYPFLKDNREKIEKILTFRIPYYVGPLARGNSRFAWMTRKSEETITPWNFEEVVDKGASAQSFIERMTNFDKNLPNEKVLPKHSLLYEYFTVYNELTKVKYVTEGMRKPAFLSGEQKKAIVDLLFKTNRKVTVKQLKEDYFKKIECFDSVEISGVEDRFNASLGTYHDLLKIIKDKDFLDNEENEDILEDIVLTLTLFEDREMIEERLKTYAHLFDDKVMKQLKRRRYTGWGRLSRKLINGIRDKQSGKTILDFLKSDGFANRNFMQLIHDDSLTFKEDIQKAQVSGQGDSLHEHIANLAGSPAIKKGILQTVKVVDELVKVMGRHKPENIVIEMARENQTTQKGQKNSRERMKRIEEGIKELGSQILKEHPVENTQLQNEKLYLYYLQNGRDMYVDQELDINRLSDYDVDHIVPQSFLKDDSIDNKVLTRSDKARGKSDNVPSEEVVKKMKNYWRQLLNAKLITQRKFDNLTKAERGGLSELDKAGFIKRQLVETRQITKHVAQILDSRMNTKYDENDKLIREVKVITLKSKLVSDFRKDFQFYKVREINNYHHAHDAYLNAVVGTALIKKYPKLESEFVYGDYKVYDVRKMIAKSEQEIGKATAKYFFYSNIMNFFKTEITLANGEIRKRPLIETNGETGEIVWDKGRDFATVRKVLSMPQVNIVKKTEVQTGGFSKESILPKRNSDKLIARKKDWDPKKYGGFDSPTVAYSVLVVAKVEKGKSKKLKSVKELLGITIMERSSFEKNPIDFLEAKGYKEVKKDLIIKLPKYSLFELENGRKRMLASAGELQKGNELALPSKYVNFLYLASHYEKLKGSPEDNEQKQLFVEQHKHYLDEIIEQISEFSKRVILADANLDKVLSAYNKHRDKPIREQAENIIHLFTLTNLGAPAAFKYFDTTIDRKRYTSTKEVLDATLIHQSITGLYETRIDLSQLGGDGGGGSGSSPAPGGVLNLEEEYRLHEKPVPSSIDPSWLQLFPTVWAERAGMGLANQVPPVVVELRSGASPVAVRQYPMSKEAREGIRPHIQRFLDLGVLVPCQSPWNTPLLPVKKPGTNDYRPVQDLREINKRVQDIHPTVPNPYNLLSSLPPSHTWYSVLDLKDAFFCLKLHPNSQPLFAFEWRDPEKGNTGQLTWTRLPQGFKNSPTLFNEALHRDLAPFRALNPQVVLLQYVDDLLVAAPTYRDCKEGTQKLLQELSKLGYRVSAKKAQLCQKEVTYLGYLLKEGKRWLTPARKATVMKIPPPTTPRQVREFLGTAGFCRLWIPGFASLAAPLYPLTKPSIPFIWTEEHQKAFDRIKEALLSAPALALPDLTKPFTLYVDERAGVARGVLTQTLGPWRRPVAYLSKKLDPVASGWPTCLKAVAAVALLLKDADKLTLGQNVTVIASHSLESIVRQPPDRWMTNARMTHYQSLLLNERVSFAPPAVLNPATLLPVESEATPVHRCSEILAEETGTRRDLKDQPLPGVPAWYTDGSSFIAEGKRRAGAAIVDGKRTVWASSLPEGTSAQKAELVALTQALRLAEGKDINIYTDSRYAFATAHIHGAIYKQRGWLTSAGKDIKNKEEILALLEAIHLPKRVAIIHCPGHQKGNDPVATGNRRADEAAKQAALSTRVLAETTKPAGKRTADGSEFEKRTADGSEFESPKKKAKVE

SEQ ID NO: 7136 - protein, 2094 aa, synthetic construct
MPAAKRVKLDGGDKKYSIGLDIGTNSVGWAVITDEYKVPSKKFKVLGNTDRHSIKKNLIGALLFDSGETAEATRLKRTARRRYTRRKNRICYLQEIFSNEMAKVDDSFFHRLEESFLVEEDKKHERHPIFGNIVDEVAYHEKYPTIYHLRKKLVDSTDKADLRLIYLALAHMIKFRGHFLIEGDLNPDNSDVDKLFIQLVQTYNQLFEENPINASGVDAKAILSARLSKSRRLENLIAQLPGEKKNGLFGNLIALSLGLTPNFKSNFDLAEDAKLQLSKDTYDDDLDNLLAQIGDQYADLFLAAKNLSDAILLSDILRVNTEITKAPLSASMIKRYDEHHQDLTLLKALVRQQLPEKYKEIFFDQSKNGYAGYIDGGASQEEFYKFIKPILEKMDGTEELLVKLNREDLLRKQRTFDNGSIPHQIHLGELHAILRRQEDFYPFLKDNREKIEKILTFRIPYYVGPLARGNSRFAWMTRKSEETITPWNFEEVVDKGASAQSFIERMTNFDKNLPNEKVLPKHSLLYEYFTVYNELTKVKYVTEGMRKPAFLSGEQKKAIVDLLFKTNRKVTVKQLKEDYFKKIECFDSVEISGVEDRFNASLGTYHDLLKIIKDKDFLDNEENEDILEDIVLTLTLFEDREMIEERLKTYAHLFDDKVMKQLKRRRYTGWGRLSRKLINGIRDKQSGKTILDFLKSDGFANRNFMQLIHDDSLTFKEDIQKAQVSGQGDSLHEHIANLAGSPAIKKGILQTVKVVDELVKVMGRHKPENIVIEMARENQTTQKGQKNSRERMKRIEEGIKELGSQILKEHPVENTQLQNEKLYLYYLQNGRDMYVDQELDINRLSDYDVDHIVPQSFLKDDSIDNKVLTRSDKARGKSDNVPSEEVVKKMKNYWRQLLNAKLITQRKFDNLTKAERGGLSELDKAGFIKRQLVETRQITKHVAQILDSRMNTKYDENDKLIREVKVITLKSKLVSDFRKDFQFYKVREINNYHHAHDAYLNAVVGTALIKKYPKLESEFVYGDYKVYDVRKMIAKSEQEIGKATAKYFFYSNIMNFFKTEITLANGEIRKRPLIETNGETGEIVWDKGRDFATVRKVLSMPQVNIVKKTEVQTGGFSKESILPKRNSDKLIARKKDWDPKKYGGFDSPTVAYSVLVVAKVEKGKSKKLKSVKELLGITIMERSSFEKNPIDFLEAKGYKEVKKDLIIKLPKYSLFELENGRKRMLASAGELQKGNELALPSKYVNFLYLASHYEKLKGSPEDNEQKQLFVEQHKHYLDEIIEQISEFSKRVILADANLDKVLSAYNKHRDKPIREQAENIIHLFTLTNLGAPAAFKYFDTTIDRKRYTSTKEVLDATLIHQSITGLYETRIDLSQLGGDGGGGSGSSPAPGGTLNIEDEYRLHETSKEPDVPLGSTWLSDFPQAWAETGGMGLAVRQAPLIIPLKATSTPVSIKQYPMSQEARLGIKPHIQRLLDQGILVPCQSPWNTPLLPVKKPGTNDYRPVQDLREVNKRVEDIHPTVPNPYNLLSGLPPSHQWYTVLDLKDAFFCLRLHPTSQPLFAFEWRDPEMGISGQLTWTRLPQGFKNSPTLFDEALHRDLADFRIQHPDLILLQYVDDLLLAATSEQDCQRGTRALLQTLGNLGYRASAKKAQICQKQVKYLGYLLKEGQRWLTEARKETVMGQPTPKTPRQLREFLGTAGFCRLWIPGFAEMAAPLYPLTKTGTLFNWGPDQQKAYQEIKQALLTAPALGLPDLTKPFELFVDEKQGYAKGVLTQKLGPWRRPVAYLSKKLDPVAAGWPPCLRMVAAIAVLTKDAGKLTMGQPLVILAPHAVEALVKQPPDRWLSNARMTHYQAMLLDTDRVQFGPVVALNPATLLPLPEKEAPHDCLEILAETHGTRPDLTDQPIPDADYTWYTDGSSFLQEGQRRAGAAVTTETEVIWARALPAGTSAQRAELIALTQALKMAEGKKLNVYTDSRYAFATAHVHGEIYRRRGLLTSEGREIKNKNEILALLKALFLPKRLSIIHCPGHQKGNSAEARGNRMADQAAREAAMKAVLETSTLLAGKRTADGSEFEKRTADGSEFESPKKKAKVE

SEQ ID NO: 7137 - protein, 2094 aa, synthetic construct
MPAAKRVKLDGGDKKYSIGLDIGTNSVGWAVITDEYKVPSKKFKVLGNTDRHSIKKNLIGALLFDSGETAEATRLKRTARRRYTRRKNRICYLQEIFSNEMAKVDDSFFHRLEESFLVEEDKKHERHPIFGNIVDEVAYHEKYPTIYHLRKKLVDSTDKADLRLIYLALAHMIKFRGHFLIEGDLNPDNSDVDKLFIQLVQTYNQLFEENPINASGVDAKAILSARLSKSRRLENLIAQLPGEKKNGLFGNLIALSLGLTPNFKSNFDLAEDAKLQLSKDTYDDDLDNLLAQIGDQYADLFLAAKNLSDAILLSDILRVNTEITKAPLSASMIKRYDEHHQDLTLLKALVRQQLPEKYKEIFFDQSKNGYAGYIDGGASQEEFYKFIKPILEKMDGTEELLVKLNREDLLRKQRTFDNGSIPHQIHLGELHAILRRQEDFYPFLKDNREKIEKILTFRIPYYVGPLARGNSRFAWMTRKSEETITPWNFEEVVDKGASAQSFIERMTNFDKNLPNEKVLPKHSLLYEYFTVYNELTKVKYVTEGMRKPAFLSGEQKKAIVDLLFKTNRKVTVKQLKEDYFKKIECFDSVEISGVEDRFNASLGTYHDLLKIIKDKDFLDNEENEDILEDIVLTLTLFEDREMIEERLKTYAHLFDDKVMKQLKRRRYTGWGRLSRKLINGIRDKQSGKTILDFLKSDGFANRNFMQLIHDDSLTFKEDIQKAQVSGQGDSLHEHIANLAGSPAIKKGILQTVKVVDELVKVMGRHKPENIVIEMARENQTTQKGQKNSRERMKRIEEGIKELGSQILKEHPVENTQLQNEKLYLYYLQNGRDMYVDQELDINRLSDYDVDHIVPQSFLKDDSIDNKVLTRSDKARGKSDNVPSEEVVKKMKNYWRQLLNAKLITQRKFDNLTKAERGGLSELDKAGFIKRQLVETRQITKHVAQILDSRMNTKYDENDKLIREVKVITLKSKLVSDFRKDFQFYKVREINNYHHAHDAYLNAVVGTALIKKYPKLESEFVYGDYKVYDVRKMIAKSEQEIGKATAKYFFYSNIMNFFKTEITLANGEIRKRPLIETNGETGEIVWDKGRDFATVRKVLSMPQVNIVKKTEVQTGGFSKESILPKRNSDKLIARKKDWDPKKYGGFDSPTVAYSVLVVAKVEKGKSKKLKSVKELLGITIMERSSFEKNPIDFLEAKGYKEVKKDLIIKLPKYSLFELENGRKRMLASAGELQKGNELALPSKYVNFLYLASHYEKLKGSPEDNEQKQLFVEQHKHYLDEIIEQISEFSKRVILADANLDKVLSAYNKHRDKPIREQAENIIHLFTLTNLGAPAAFKYFDTTIDRKRYTSTKEVLDATLIHQSITGLYETRIDLSQLGGDGGGGSGSSPAPGGTLNIEDEYRLHETSKEPDVPLGSTWLSDFPQAWAETGGMGLAVRQAPLIIPLKATSTPVSIKQYPMSQEARLGIKPHIQRLLDQGILVPCQSPWNTPLLPVKKPGTNDYRPVQDLREVNKRVEDIHPTVPNPYNLLSGLPPSHQWYTVLDLKDAFFCLRLHPTSQPLFAFEWRDPEMGISGQLTWTRLPQGFKNSPTLFNEALHRDLADFRIQHPDLILLQYVDDLLLAATSEQDCQRGTRALLQTLGNLGYRASAKKAQICQKQVKYLGYLLKEGQRWLTEARKETVMGQPTPKTPRQLREFLGTAGFCRLWIPGFAEMAAPLYPLTKPGTLFNWGPDQQKAYQEIKQALLTAPALGLPDLTKPFELFVDEKQGYAKGVLTQKLGPWRRPVAYLSKKLDPVAAGWPPCLRMVAAIAVLTKDAGKLTMGQPLVILAPHAVEALVKQPPDRWLSNARMTHYQAMLLDTDRVQFGPVVALNPATLLPLPEKEAPHDCLEILAETHGTRPDLTDQPIPDADYTWYTDGSSFLQEGQRRAGAAVTTETEVIWARALPAGTSAQRAELIALTQALKMAEGKKLNVYTDSRYAFATAHVHGEIYRRRGWLTSEGREIKNKNEILALLKALFLPKRLSIIHCPGHQKGNSAEARGNRMADQAAREAAMKAVLETSTLLAGKRTADGSEFEKRTADGSEFESPKKKAKVE

SEQ ID NO: 7138 - protein, 2093 aa, synthetic construct
MPAAKRVKLDGGDKKYSIGLDIGTNSVGWAVITDEYKVPSKKFKVLGNTDRHSIKKNLIGALLFDSGETAEATRLKRTARRRYTRRKNRICYLQEIFSNEMAKVDDSFFHRLEESFLVEEDKKHERHPIFGNIVDEVAYHEKYPTIYHLRKKLVDSTDKADLRLIYLALAHMIKFRGHFLIEGDLNPDNSDVDKLFIQLVQTYNQLFEENPINASGVDAKAILSARLSKSRRLENLIAQLPGEKKNGLFGNLIALSLGLTPNFKSNFDLAEDAKLQLSKDTYDDDLDNLLAQIGDQYADLFLAAKNLSDAILLSDILRVNTEITKAPLSASMIKRYDEHHQDLTLLKALVRQQLPEKYKEIFFDQSKNGYAGYIDGGASQEEFYKFIKPILEKMDGTEELLVKLNREDLLRKQRTFDNGSIPHQIHLGELHAILRRQEDFYPFLKDNREKIEKILTFRIPYYVGPLARGNSRFAWMTRKSEETITPWNFEEVVDKGASAQSFIERMTNFDKNLPNEKVLPKHSLLYEYFTVYNELTKVKYVTEGMRKPAFLSGEQKKAIVDLLFKTNRKVTVKQLKEDYFKKIECFDSVEISGVEDRFNASLGTYHDLLKIIKDKDFLDNEENEDILEDIVLTLTLFEDREMIEERLKTYAHLFDDKVMKQLKRRRYTGWGRLSRKLINGIRDKQSGKTILDFLKSDGFANRNFMQLIHDDSLTFKEDIQKAQVSGQGDSLHEHIANLAGSPAIKKGILQTVKVVDELVKVMGRHKPENIVIEMARENQTTQKGQKNSRERMKRIEEGIKELGSQILKEHPVENTQLQNEKLYLYYLQNGRDMYVDQELDINRLSDYDVDHIVPQSFLKDDSIDNKVLTRSDKARGKSDNVPSEEVVKKMKNYWRQLLNAKLITQRKFDNLTKAERGGLSELDKAGFIKRQLVETRQITKHVAQILDSRMNTKYDENDKLIREVKVITLKSKLVSDFRKDFQFYKVREINNYHHAHDAYLNAVVGTALIKKYPKLESEFVYGDYKVYDVRKMIAKSEQEIGKATAKYFFYSNIMNFFKTEITLANGEIRKRPLIETNGETGEIVWDKGRDFATVRKVLSMPQVNIVKKTEVQTGGFSKESILPKRNSDKLIARKKDWDPKKYGGFDSPTVAYSVLVVAKVEKGKSKKLKSVKELLGITIMERSSFEKNPIDFLEAKGYKEVKKDLIIKLPKYSLFELENGRKRMLASAGELQKGNELALPSKYVNFLYLASHYEKLKGSPEDNEQKQLFVEQHKHYLDEIIEQISEFSKRVILADANLDKVLSAYNKHRDKPIREQAENIIHLFTLTNLGAPAAFKYFDTTIDRKRYTSTKEVLDATLIHQSITGLYETRIDLSQLGGDGGGGSPAPGSSGGTLQLEEEYRLFEPESTQKQEMDIWLKNFPQAWAETGGMGTAHCQAPVLIQLKATATPISIRQYPMPHEAYQGIKPHIRRMLDQGILKPCQSPWNTPLLPVKKPGTEDYRPVQDLREVNKRVEDIHPTVPNPYNLLSTLPPSHPWYTVLDLKDAFFCLRLHSESQLLFAFEWRDPEIGLSGQLTWTRLPQGFKNSPTLFNEALHSDLADFRVRYPALVLLQYVDDLLLAAATRTECLEGTKALLETLGNKGYRASAKKAQICLQEVTYLGYSLKDGQRWLTKARKEAILSIPVPKNSRQVREFLGTAGYCRLWIPGFAELAAPLYPLTRPGTLFQWGTEQQLAFEDIKKALLSSPALGLPDITKPFELFIDENSGFAKGVLVQKLGPWKRPVAYLSKKLDTVASGWPPCLRMVAAIAILVKDAGKLTLGQPLTILTSHPVEALVRQPPNKWLSNARMTHYQAMLLDAERVHFGPTVSLNPATLLPLPSGGNHHDCLQILAETHGTRPDLTDQPLPDADLTWYTDGSSFIRNGEREAGAAVTTESEVIWAAPLPPGTSAQRAELIALTQALKMAEGKKLTVYTDSRYAFATTHVHGEIYRRRGWLTSEGKEIKNKNEILALLEALFLPKRLSIIHCPGHQKGDSPQAKGNRLADDTAKKAATETHSSLTVLPAGKRTADGSEFEKRTADGSEFESPKKKAKVE
